United States Patent Application Publication US 2026/0240958 A1 - sequence listing, part 16

SEQ ID NO: 15365 - RNA, 9485 nt, synthetic construct
  source 1..9485: mol_type = other RNA
aggaaataagagagaaaagaagagtaagaagaaatataagagccaccatggcccctaagaagaagcgtaaagtgagccggatggaacgcctcgtctacgaggtgcggcagaagtgcagaaacatcgaggacatctgcatctcctgcggatctctgaacgtgaccctggagcacccactgttcatcggcggcatgtgccagaactgtaaaaactgttttctggagtgtgcctatcaatacgacgatgacggctaccagagctactgcaccatctgttgcggcggaagagaggtgctgatgtgtggaaataacaactgctgccggtgcttctgcgtggaatgcgtggacctgctggtgggccccggcgccgcccaggccgctattaaggaagatccttggaactgctacatgtgcggccacaagggcacatacggcctgctgagacggagagaggactggcctagcagactgcagatgttcttcgccaataaccacgaccaggagttcgacccccctaaggtgtaccctcccgtccccgccgagaagagaaagcccatccgggtcctgagcctgttcgatggcatcgccaccggtctgctggtgctgaaggacctgggcatccaggtggataggtacattgcctccgaggtgtgcgaggactccatcaccgtgggaatggtgcgtcatcagggcaagatcatgtacgtgggcgacgtgcggagcgtgacacagaagcatatccaggagtggggccctttcgacctggtgatcggcggcagcccttgcaatgacctgagcatcgtgaacccagcccggaagggcctgtacgagggaaccggcagactgttcttcgagttttacagactgctgcacgacgcccggcctaaggaaggcgacgaccggcccttcttttggctgttcgagaatgtggtggccatgggagtcagcgacaagcgggatattagccggttcctggagagcaaccccgtgatgatcgatgccaaggaagtgagcgccgcccaccgggccagatacttctggggcaatctgcctggcatgaacagacccctggccagcaccgtgaacgacaagctggagctgcaggagtgcctggagcacggccggatcgccaagttcagcaaggtgagaaccatcaccacccgaagcaacagcatcaaacaaggcaaggaccagcactttcctgtgttcatgaacgagaaggaggacatcctgtggtgtaccgagatggagagagtgttcgggttcccagtccactacacagatgtcagcaacatgtctagactggccagacagagactgctgggaagaagctggtccgtccctgtgatcagacacctgttcgcccctctgaaggagtacttcgcctgcgtgagcagcggcaacagcaacgccaacagccggggccccagcttctctagcggcctggtgccactgtccctgagagggagccacatgggccccatggagatctacaaaaccgtgagcgcctggaagcggcagcctgtgcgcgtgctgagcctgtttcggaatatcgataaagtcctgaaaagcctgggattcctggagagcggctctggctccggcggtggcaccctgaagtacgtggaggatgtgacaaacgtggtcagacgggatgtggagaagtggggccccttcgatctggtgtacggcagcacccaacccctgggcagctcttgtgaccggtgccctggctggtacatgtttcagttccaccggatcctgcagtacgccctgccgagacaggagtcccagcggccattcttttggattttcatggacaacttgctgctgaccgaggatgaccaggaaactaccactcggttcctgcagaccgaagccgtgaccctgcaggacgtgagaggccgggactaccagaacgccatgcgggtgtggtccaacatccctggactgaaaagcaagcacgcacctctgacccctaaagaagaggagtacctgcaggcccaggtgcggagcagaagcaagctggacgcccctaaggtggatctgctggtgaagaattgcctcctgcccctgagagagtacttcaagtatttcagccagaatagtctgcccctgggaggcagcggcggcggcgccctggtgacatttgaggacgtcgccgtgcggttcacccaggaggaatgggctctgctggatccttctcagaaaatcctgtaccgggacgtgatgagagagacataccggaatctgacctccgtgggcatcaactgggaatgttgggaccttgaagcctgcttcagaagcctgggaagaaacctgagagtgcaggtggtgaagagaaagtgcgagctgaccaacagcggcccctgcgccgagggcggcccaagcagcggcgcccctcctcccagcggcggcagcccagccggctccccaacctctaccgaggagggcacctctgagtccgccacccccgagagcggccctggcacctccaccgagcccagcgagggcagcgcacccggcagccctgccggcagccccacctccacagaggagggaaccagcaccgagcccagcgaaggcagcgccccaggcaccagcaccgagcctagtgagcaggagattaaacggatcaacaagatcagaagaagacttgtgaaagacagcaacaccaagaaggccggcaagacaggccccatgaaaaccctgctggttagagtgatgacacccgatctgagagagcggctggaaaacctgagaaagaagcctgaaaatatcccccagcccatcagcaatacatctagagccaacctgaataagctgctgaccgattacaccgaaatgaagaaggcgatcctgcatgtgtactgggaagagttccagaaggaccctgtgggcctgatgagccgggtggcccagcctgccagcaagaagatcgatcagaacaagctgaaacctgagatggacgagaagggcaacctgaccaccgccggctttgcctgctctcagtgtggccagcccctgttcgtgtacaagctggagcaggtgtctgagaagggcaaggcttacaccaactacttcggacggtgcaatgtggccgagcacgaaaagctgatcctgctggcccagctgaagcccgagaaggatagcgacgaagccgtgacatatagcctgggaaagtttgggcagagggccctggatttctacagcattcatgtgaccaaggagtccacccaccccgtgaagcccctggcccagatcgccggaaacagatacgcctccggacctgtgggaaaggccctgagcgacgcatgtatgggcacaatcgcctccttcctgtctaagtaccaggacatcatcatcgaacaccagaaggtggtgaagggcaaccagaagagactggagagcctgcgggagctggccggcaaggaaaacctggaataccctagcgtgaccctgccacctcagcctcacaccaaggagggcgttgatgcctacaacgaagtgatcgcccgggtgcgaatgtgggtgaacctgaacctgtggcagaagctgaagctaagcagagatgatgccaagcctctgctgagactgaagggattcccttcctttcctctggtcgagagacaggccaacgaagtggactggtgggacatggtgtgtaacgtgaagaagctgatcaacgagaaaaaggaggatggcaaggtgttttggcagaatctggctggctacaagagacaggaagccctgagaccatacctgagcagcgaggaagatcggaagaagggaaagaaattcgctcggtaccagctgggcgacctgctgctgcacctggaaaagaagcacggcgaggactggggaaaggtgtacgacgaggcctgggagcggattgacaagaaagtggaaggcctgagcaagcacatcaagctggaagaggaacggagaagcgaggacgcccagagcaaggccgccctgaccgactggctgcgggctaaggccagcttcgtgatcgagggcctgaaggaggccgacaaggacgagttctgcagatgcgagctgaagctgcagaagtggtacggggacctgcggggaaagcccttcgccatcgaagccgagaacagcatcctggacatcagcggcttcagcaagcagtacaactgtgccttcatctggcagaaggacggcgtgaagaagctgaacctgtacctgatcatcaactacttcaagggcggcaagctgcggttcaagaagatcaaacctgaagccttcgaagccaacagattctacaccgtgatcaacaaaaagagcggcgagatcgtgcccatggaggtgaacttcaacttcgacgaccccaacctgatcatcctgcctctggcctttggcaagagacagggcagagaattcatctggaacgacctgctgtccctggaaaccggcagcctgaagctggccaacggaagagtgatcgagaagacactgtacaacagaagaacccggcaggatgagcctgccctgttcgtggccctgaccttcgagcggcgggaggtcctggactcctccaatatcaaaccaatgaacctgatcggcgtggcaagaggcgaaaacatccccgccgtgatcgccctgaccgaccccgagggctgcccactgagccggtttaaggatagcctgggaaacccaacccacatcctgagaatcggcgagagctataaggagaagcagcggaccatccaggccaagaaggaggtggagcagcggagagccggcggctacagccggaagtacgccagcaaagccaagaatctggcagacgatatggtgagaaacaccgctagagatctgctgtactacgccgtgacccaggatgccatgctgatcttcgccaacctgagccggggcttcggccggcagggcaagcggaccttcatggccgagagacagtacacacggatggaggactggctgaccgccaagctggcctacgagggcctgagcaagacctacctgtccaagacactggcccagtacacctccaagacatgcagcaactgtgggtttaccatcaccagcgccgactacgacagggtgctggagaagctgaagaagacagcaacaggctggatgaccacaattaacggcaaggagctgaaggtggagggccagattacctactacaacagatacaagagacagaacgtagtcaaggacctgtccgtcgagctggatagactgagcgaagaatctgtgaacaacgacatctcctcctggacaaagggcagaagcggagaagctctgagcctcctgaagaaaagattctcccatagacccgtgcaggagaagttcgtgtgcctgaactgcggcttcgagacacacgcagccgagcaagccgccctgaacatcgccagatcctggctgttcctgcggagccaggagtacaagaaataccagacaaacaagacaaccggcaacaccgataagagagccttcgtcgagacctggcagtccttttaccggaagaagcttaaggaggtgtggaaacctgccgtgcggtctggcggatctggcggaggctccatgaacaccgtgacctacgacgacgtgcacatcggcttcacctgggaggagtggaccctgctggaccccagccagaagaacctgtacaaggacgtgatgctggagacctacaggaacctggccatcatcggctacagctgggaggaccacaacatcgaggagcactaccagaacagcaggaggcacgagaggcacgagaggagccagaccggcatgaagaccagcgtgcacacccagtgcagcggcggcccaagcagcggcgcccctcctcccagcggcggcagcccagccggctccccaacctctaccgaggagggcacctctgagtccgccacccccgagagcggccctggcacctccaccgagcccagcgagggcagcgcacccggcagccctgccggcagccccacctccacagaggagggaaccagcaccgagcccagcgaaggcagcgccccaggcaccagcaccgagcctagtgagcaggagattaaacggatcaacaagatcagaagaagacttgtgaaagacagcaacaccaagaaggccggcaagacaggccccatgaaaaccctgctggttagagtgatgacacccgatctgagagagcggctggaaaacctgagaaagaagcctgaaaatatcccccagcccatcagcaatacatctagagccaacctgaataagctgctgaccgattacaccgaaatgaagaaggcgatcctgcatgtgtactgggaagagttccagaaggaccctgtgggcctgatgagccgggtggcccagcctgccagcaagaagatcgatcagaacaagctgaaacctgagatggacgagaagggcaacctgaccaccgccggctttgcctgctctcagtgtggccagcccctgttcgtgtacaagctggagcaggtgtctgagaagggcaaggcttacaccaactacttcggacggtgcaatgtggccgagcacgaaaagctgatcctgctggcccagctgaagcccgagaaggatagcgacgaagccgtgacatatagcctgggaaagtttgggcagagggccctggatttctacagcattcatgtgaccaaggagtccacccaccccgtgaagcccctggcccagatcgccggaaacagatacgcctccggacctgtgggaaaggccctgagcgacgcatgtatgggcacaatcgcctccttcctgtctaagtaccaggacatcatcatcgaacaccagaaggtggtgaagggcaaccagaagagactggagagcctgcgggagctggccggcaaggaaaacctggaataccctagcgtgaccctgccacctcagcctcacaccaaggagggcgttgatgcctacaacgaagtgatcgcccgggtgcgaatgtgggtgaacctgaacctgtggcagaagctgaagctaagcagagatgatgccaagcctctgctgagactgaagggattcccttcctttcctctggtcgagagacaggccaacgaagtggactggtgggacatggtgtgtaacgtgaagaagctgatcaacgagaaaaaggaggatggcaaggtgttttggcagaatctggctggctacaagagacaggaagccctgagaccatacctgagcagcgaggaagatcggaagaagggaaagaaattcgctcggtaccagctgggcgacctgctgctgcacctggaaaagaagcacggcgaggactggggaaaggtgtacgacgaggcctgggagcggattgacaagaaagtggaaggcctgagcaagcacatcaagctggaagaggaacggagaagcgaggacgcccagagcaaggccgccctgaccgactggctgcgggctaaggccagcttcgtgatcgagggcctgaaggaggccgacaaggacgagttctgcagatgcgagctgaagctgcagaagtggtacggggacctgcggggaaagcccttcgccatcgaagccgagaacagcatcctggacatcagcggcttcagcaagcagtacaactgtgccttcatctggcagaaggacggcgtgaagaagctgaacctgtacctgatcatcaactacttcaagggcggcaagctgcggttcaagaagatcaaacctgaagccttcgaagccaacagattctacaccgtgatcaacaaaaagagcggcgagatcgtgcccatggaggtgaacttcaacttcgacgaccccaacctgatcatcctgcctctggcctttggcaagagacagggcagagaattcatctggaacgacctgctgtccctggaaaccggcagcctgaagctggccaacggaagagtgatcgagaagacactgtacaacagaagaacccggcaggatgagcctgccctgttcgtggccctgaccttcgagcggcgggaggtcctggactcctccaatatcaaaccaatgaacctgatcggcgtggcaagaggcgaaaacatccccgccgtgatcgccctgaccgaccccgagggctgcccactgagccggtttaaggatagcctgggaaacccaacccacatcctgagaatcggcgagagctataaggagaagcagcggaccatccaggccaagaaggaggtggagcagcggagagccggcggctacagccggaagtacgccagcaaagccaagaatctggcagacgatatggtgagaaacaccgctagagatctgctgtactacgccgtgacccaggatgccatgctgatcttcgccaacctgagccggggcttcggccggcagggcaagcggaccttcatggccgagagacagtacacacggatggaggactggctgaccgccaagctggcctacgagggcctgagcaagacctacctgtccaagacactggcccagtacacctccaagacatgcagcaactgtgggtttaccatcaccagcgccgactacgacagggtgctggagaagctgaagaagacagcaacaggctggatgaccacaattaacggcaaggagctgaaggtggagggccagattacctactacaacagatacaagagacagaacgtagtcaaggacctgtccgtcgagctggatagactgagcgaagaatctgtgaacaacgacatctcctcctggacaaagggcagaagcggagaagctctgagcctcctgaagaaaagattctcccatagacccgtgcaggagaagttcgtgtgcctgaactgcggcttcgagacacacgcagccgagcaagccgccctgaacatcgccagatcctggctgttcctgcggagccaggagtacaagaaataccagacaaacaagacaaccggcaacaccgataagagagccttcgtcgagacctggcagtccttttaccggaagaagcttaaggaggtgtggaaacctgccgtgcggtctggcggatctggcggaggctcctatgaacaccgtgacctacgacgacgtgcacatcggcttcacctgggaggagtggaccctgctggaccccagccagaagaacctgtacaaggacgtgatgctggagacctacaggaacctggccatcatcggctacagctgggaggaccacaacatcgaggagcactaccagaacagcaggaggcacgagaggcacgagaggagccagaccggcatgaagaccagcgtgcacacccagtgcagcggatctggctccggcagcggccccaagaaaaagagaaaagtctaagctgccttctgcggggcttgccttctggccatgcccttcttctctcccttgcacctgtacctcttggtctttgaataaagcctgagtaggaaggctagcaaaaaaaaaaaaaaaaaaaaaaaaaaaaaaaaaaaaaaaaaaaaaaaaaaaaaaaaaaaaaaaaaaaaaaaaaaaaaaaa

SEQ ID NO: 15366 - RNA, 9485 nt, synthetic construct
  source 1..9485: mol_type = other RNA
aggaaataagagagaaaagaagagtaagaagaaatataagagccaccatggcccctaagaagaagcgtaaagtgagccggatggaacgcctcgtctacgaggtgcggcagaagtgcagaaacatcgaggacatctgcatctcctgcggatctctgaacgtgaccctggagcacccactgttcatcggcggcatgtgccagaactgtaaaaactgttttctggagtgtgcctatcaatacgacgatgacggctaccagagctactgcaccatctgttgcggcggaagagaggtgctgatgtgtggaaataacaactgctgccggtgcttctgcgtggaatgcgtggacctgctggtgggccccggcgccgcccaggccgctattaaggaagatccttggaactgctacatgtgcggccacaagggcacatacggcctgctgagacggagagaggactggcctagcagactgcagatgttcttcgccaataaccacgaccaggagttcgacccccctaaggtgtaccctcccgtccccgccgagaagagaaagcccatccgggtcctgagcctgttcgatggcatcgccaccggtctgctggtgctgaaggacctgggcatccaggtggataggtacattgcctccgaggtgtgcgaggactccatcaccgtgggaatggtgcgtcatcagggcaagatcatgtacgtgggcgacgtgcggagcgtgacacagaagcatatccaggagtggggccctttcgacctggtgatcggcggcagcccttgcaatgacctgagcatcgtgaacccagcccggaagggcctgtacgagggaaccggcagactgttcttcgagttttacagactgctgcacgacgcccggcctaaggaaggcgacgaccggcccttcttttggctgttcgagaatgtggtggccatgggagtcagcgacaagcgggatattagccggttcctggagagcaaccccgtgatgatcgatgccaaggaagtgagcgccgcccaccgggccagatacttctggggcaatctgcctggcatgaacagacccctggccagcaccgtgaacgacaagctggagctgcaggagtgcctggagcacggccggatcgccaagttcagcaaggtgagaaccatcaccacccgaagcaacagcatcaaacaaggcaaggaccagcactttcctgtgttcatgaacgagaaggaggacatcctgtggtgtaccgagatggagagagtgttcgggttcccagtccactacacagatgtcagcaacatgtctagactggccagacagagactgctgggaagaagctggtccgtccctgtgatcagacacctgttcgcccctctgaaggagtacttcgcctgcgtgagcagcggcaacagcaacgccaacagccggggccccagcttctctagcggcctggtgccactgtccctgagagggagccacatgggccccatggagatctacaaaaccgtgagcgcctggaagcggcagcctgtgcgcgtgctgagcctgtttcggaatatcgataaagtcctgaaaagcctgggattcctggagagcggctctggctccggcggtggcaccctgaagtacgtggaggatgtgacaaacgtggtcagacgggatgtggagaagtggggccccttcgatctggtgtacggcagcacccaacccctgggcagctcttgtgaccggtgccctggctggtacatgtttcagttccaccggatcctgcagtacgccctgccgagacaggagtcccagcggccattcttttggattttcatggacaacttgctgctgaccgaggatgaccaggaaactaccactcggttcctgcagaccgaagccgtgaccctgcaggacgtgagaggccgggactaccagaacgccatgcgggtgtggtccaacatccctggactgaaaagcaagcacgcacctctgacccctaaagaagaggagtacctgcaggcccaggtgcggagcagaagcaagctggacgcccctaaggtggatctgctggtgaagaattgcctcctgcccctgagagagtacttcaagtatttcagccagaatagtctgcccctgggaggcagcggcggcggcgccctggtgacatttgaggacgtcgccgtgcggttcacccaggaggaatgggctctgctggatccttctcagaaaatcctgtaccgggacgtgatgagagagacataccggaatctgacctccgtgggcatcaactgggaatgttgggaccttgaagcctgcttcagaagcctgggaagaaacctgagagtgcaggtggtgaagagaaagtgcgagctgaccaacagcggcccctgcgccgagggcggcccaagcagcggcgcccctcctcccagcggcggcagcccagccggctccccaacctctaccgaggagggcacctctgagtccgccacccccgagagcggccctggcacctccaccgagcccagcgagggcagcgcacccggcagccctgccggcagccccacctccacagaggagggaaccagcaccgagcccagcgaaggcagcgccccaggcaccagcaccgagcctagtgagcaggagattaaacggatcaacaagatcagaagaagacttgtgaaagacagcaacaccaagaaggccggcaagacaggccccatgaaaaccctgctggttagagtgatgacacccgatctgagagagcggctggaaaacctgagaaagaagcctgaaaatatcccccagcccatcagcaatacatctagagccaacctgaataagctgctgaccgattacaccgaaatgaagaaggcgatcctgcatgtgtactgggaagagttccagaaggaccctgtgggcctgatgagccgggtggcccagcctgccagcaagaagatcgatcagaacaagctgaaacctgagatggacgagaagggcaacctgaccaccgccggctttgcctgctctcagtgtggccagcccctgttcgtgtacaagctggagcaggtgtctgagaagggcaaggcttacaccaactacttcggacggtgcaatgtggccgagcacgaaaagctgatcctgctggcccagctgaagcccgagaaggatagcgacgaagccgtgacatatagcctgggaaagtttgggcagagggccctggatttctacagcattcatgtgaccaaggagtccacccaccccgtgaagcccctggcccagatcgccggaaacagatacgcctccggacctgtgggaaaggccctgagcgacgcatgtatgggcacaatcgcctccttcctgtctaagtaccaggacatcatcatcgaacaccagaaggtggtgaagggcaaccagaagagactggagagcctgcgggagctggccggcaaggaaaacctggaataccctagcgtgaccctgccacctcagcctcacaccaaggagggcgttgatgcctacaacgaagtgatcgcccgggtgcgaatgtgggtgaacctgaacctgtggcagaagctgaagctaagcagagatgatgccaagcctctgctgagactgaagggattcccttcctttcctctggtcgagagacaggccaacgaagtggactggtgggacatggtgtgtaacgtgaagaagctgatcaacgagaaaaaggaggatggcaaggtgttttggcagaatctggctggctacaagagacaggaagccctgagaccatacctgagcagcgaggaagatcggaagaagggaaagaaattcgctcggtaccagctgggcgacctgctgctgcacctggaaaagaagcacggcgaggactggggaaaggtgtacgacgaggcctgggagcggattgacaagaaagtggaaggcctgagcaagcacatcaagctggaagaggaacggagaagcgaggacgcccagagcaaggccgccctgaccgactggctgcgggctaaggccagcttcgtgatcgagggcctgaaggaggccgacaaggacgagttctgcagatgcgagctgaagctgcagaagtggtacggggacctgcggggaaagcccttcgccatcgaagccgagaacagcatcctggacatcagcggcttcagcaagcagtacaactgtgccttcatctggcagaaggacggcgtgaagaagctgaacctgtacctgatcatcaactacttcaagggcggcaagctgcggttcaagaagatcaaacctgaagccttcgaagccaacagattctacaccgtgatcaacaaaaagagcggcgagatcgtgcccatggaggtgaacttcaacttcgacgaccccaacctgatcatcctgcctctggcctttggcaagagacagggcagagaattcatctggaacgacctgctgtccctggaaaccggcagcctgaagctggccaacggaagagtgatcgagaagacactgtacaacagaagaacccggcaggatgagcctgccctgttcgtggccctgaccttcgagcggcgggaggtcctggactcctccaatatcaaaccaatgaacctgatcggcgtggcaagaggcgaaaacatccccgccgtgatcgccctgaccgaccccgagggctgcccactgagccggtttaaggatagcctgggaaacccaacccacatcctgagaatcggcgagagctataaggagaagcagcggaccatccaggccaagaaggaggtggagcagcggagagccggcggctacagccggaagtacgccagcaaagccaagaatctggcagacgatatggtgagaaacaccgctagagatctgctgtactacgccgtgacccaggatgccatgctgatcttcgccaacctgagccggggcttcggccggcagggcaagcggaccttcatggccgagagacagtacacacggatggaggactggctgaccgccaagctggcctacgagggcctgagcaagacctacctgtccaagacactggcccagtacacctccaagacatgcagcaactgtgggtttaccatcaccagcgccgactacgacagggtgctggagaagctgaagaagacagcaacaggctggatgaccacaattaacggcaaggagctgaaggtggagggccagattacctactacaacagatacaagagacagaacgtagtcaaggacctgtccgtcgagctggatagactgagcgaagaatctgtgaacaacgacatctcctcctggacaaagggcagaagcggagaagctctgagcctcctgaagaaaagattctcccatagacccgtgcaggagaagttcgtgtgcctgaactgcggcttcgagacacacgcagccgagcaagccgccctgaacatcgccagatcctggctgttcctgcggagccaggagtacaagaaataccagacaaacaagacaaccggcaacaccgataagagagccttcgtcgagacctggcagtccttttaccggaagaagcttaaggaggtgtggaaacctgccgtgcggtctggcggatctggcggaggctccttccagaacagcctgacctacgacgacgtgcacatcaacttcacctgcgaggagtgggccctgctggacgccagccagaagaggctgtacaaggacgtgatgctggagacctacagcaacctgaccgccatcggctacaagtgggaggaccacaacatcgaggagcactgccagaggttcaggaggaggggcaggcacaagaggagcaggaccgaggagaggccctacgagtgcaagcagtgcggcggcccaagcagcggcgcccctcctcccagcggcggcagcccagccggctccccaacctctaccgaggagggcacctctgagtccgccacccccgagagcggccctggcacctccaccgagcccagcgagggcagcgcacccggcagccctgccggcagccccacctccacagaggagggaaccagcaccgagcccagcgaaggcagcgccccaggcaccagcaccgagcctagtgagcaggagattaaacggatcaacaagatcagaagaagacttgtgaaagacagcaacaccaagaaggccggcaagacaggccccatgaaaaccctgctggttagagtgatgacacccgatctgagagagcggctggaaaacctgagaaagaagcctgaaaatatcccccagcccatcagcaatacatctagagccaacctgaataagctgctgaccgattacaccgaaatgaagaaggcgatcctgcatgtgtactgggaagagttccagaaggaccctgtgggcctgatgagccgggtggcccagcctgccagcaagaagatcgatcagaacaagctgaaacctgagatggacgagaagggcaacctgaccaccgccggctttgcctgctctcagtgtggccagcccctgttcgtgtacaagctggagcaggtgtctgagaagggcaaggcttacaccaactacttcggacggtgcaatgtggccgagcacgaaaagctgatcctgctggcccagctgaagcccgagaaggatagcgacgaagccgtgacatatagcctgggaaagtttgggcagagggccctggatttctacagcattcatgtgaccaaggagtccacccaccccgtgaagcccctggcccagatcgccggaaacagatacgcctccggacctgtgggaaaggccctgagcgacgcatgtatgggcacaatcgcctccttcctgtctaagtaccaggacatcatcatcgaacaccagaaggtggtgaagggcaaccagaagagactggagagcctgcgggagctggccggcaaggaaaacctggaataccctagcgtgaccctgccacctcagcctcacaccaaggagggcgttgatgcctacaacgaagtgatcgcccgggtgcgaatgtgggtgaacctgaacctgtggcagaagctgaagctaagcagagatgatgccaagcctctgctgagactgaagggattcccttcctttcctctggtcgagagacaggccaacgaagtggactggtgggacatggtgtgtaacgtgaagaagctgatcaacgagaaaaaggaggatggcaaggtgttttggcagaatctggctggctacaagagacaggaagccctgagaccatacctgagcagcgaggaagatcggaagaagggaaagaaattcgctcggtaccagctgggcgacctgctgctgcacctggaaaagaagcacggcgaggactggggaaaggtgtacgacgaggcctgggagcggattgacaagaaagtggaaggcctgagcaagcacatcaagctggaagaggaacggagaagcgaggacgcccagagcaaggccgccctgaccgactggctgcgggctaaggccagcttcgtgatcgagggcctgaaggaggccgacaaggacgagttctgcagatgcgagctgaagctgcagaagtggtacggggacctgcggggaaagcccttcgccatcgaagccgagaacagcatcctggacatcagcggcttcagcaagcagtacaactgtgccttcatctggcagaaggacggcgtgaagaagctgaacctgtacctgatcatcaactacttcaagggcggcaagctgcggttcaagaagatcaaacctgaagccttcgaagccaacagattctacaccgtgatcaacaaaaagagcggcgagatcgtgcccatggaggtgaacttcaacttcgacgaccccaacctgatcatcctgcctctggcctttggcaagagacagggcagagaattcatctggaacgacctgctgtccctggaaaccggcagcctgaagctggccaacggaagagtgatcgagaagacactgtacaacagaagaacccggcaggatgagcctgccctgttcgtggccctgaccttcgagcggcgggaggtcctggactcctccaatatcaaaccaatgaacctgatcggcgtggcaagaggcgaaaacatccccgccgtgatcgccctgaccgaccccgagggctgcccactgagccggtttaaggatagcctgggaaacccaacccacatcctgagaatcggcgagagctataaggagaagcagcggaccatccaggccaagaaggaggtggagcagcggagagccggcggctacagccggaagtacgccagcaaagccaagaatctggcagacgatatggtgagaaacaccgctagagatctgctgtactacgccgtgacccaggatgccatgctgatcttcgccaacctgagccggggcttcggccggcagggcaagcggaccttcatggccgagagacagtacacacggatggaggactggctgaccgccaagctggcctacgagggcctgagcaagacctacctgtccaagacactggcccagtacacctccaagacatgcagcaactgtgggtttaccatcaccagcgccgactacgacagggtgctggagaagctgaagaagacagcaacaggctggatgaccacaattaacggcaaggagctgaaggtggagggccagattacctactacaacagatacaagagacagaacgtagtcaaggacctgtccgtcgagctggatagactgagcgaagaatctgtgaacaacgacatctcctcctggacaaagggcagaagcggagaagctctgagcctcctgaagaaaagattctcccatagacccgtgcaggagaagttcgtgtgcctgaactgcggcttcgagacacacgcagccgagcaagccgccctgaacatcgccagatcctggctgttcctgcggagccaggagtacaagaaataccagacaaacaagacaaccggcaacaccgataagagagccttcgtcgagacctggcagtccttttaccggaagaagcttaaggaggtgtggaaacctgccgtgcggtctggcggatctggcggaggctcctttccagaacagcctgacctacgacgacgtgcacatcaacttcacctgcgaggagtgggccctgctggacgccagccagaagaggctgtacaaggacgtgatgctggagacctacagcaacctgaccgccatcggctacaagtgggaggaccacaacatcgaggagcactgccagaggttcaggaggaggggcaggcacaagaggagcaggaccgaggagaggccctacgagtgcaagcagtgcggatctggctccggcagcggccccaagaaaaagagaaaagtctaagctgccttctgcggggcttgccttctggccatgcccttcttctctcccttgcacctgtacctcttggtctttgaataaagcctgagtaggaaggctagcaaaaaaaaaaaaaaaaaaaaaaaaaaaaaaaaaaaaaaaaaaaaaaaaaaaaaaaaaaaaaaaaaaaaaaaaaaaaaaaa

SEQ ID NO: 15367 - RNA, 9485 nt, synthetic construct
  source 1..9485: mol_type = other RNA
aggaaataagagagaaaagaagagtaagaagaaatataagagccaccatggcccctaagaagaagcgtaaagtgagccggatggaacgcctcgtctacgaggtgcggcagaagtgcagaaacatcgaggacatctgcatctcctgcggatctctgaacgtgaccctggagcacccactgttcatcggcggcatgtgccagaactgtaaaaactgttttctggagtgtgcctatcaatacgacgatgacggctaccagagctactgcaccatctgttgcggcggaagagaggtgctgatgtgtggaaataacaactgctgccggtgcttctgcgtggaatgcgtggacctgctggtgggccccggcgccgcccaggccgctattaaggaagatccttggaactgctacatgtgcggccacaagggcacatacggcctgctgagacggagagaggactggcctagcagactgcagatgttcttcgccaataaccacgaccaggagttcgacccccctaaggtgtaccctcccgtccccgccgagaagagaaagcccatccgggtcctgagcctgttcgatggcatcgccaccggtctgctggtgctgaaggacctgggcatccaggtggataggtacattgcctccgaggtgtgcgaggactccatcaccgtgggaatggtgcgtcatcagggcaagatcatgtacgtgggcgacgtgcggagcgtgacacagaagcatatccaggagtggggccctttcgacctggtgatcggcggcagcccttgcaatgacctgagcatcgtgaacccagcccggaagggcctgtacgagggaaccggcagactgttcttcgagttttacagactgctgcacgacgcccggcctaaggaaggcgacgaccggcccttcttttggctgttcgagaatgtggtggccatgggagtcagcgacaagcgggatattagccggttcctggagagcaaccccgtgatgatcgatgccaaggaagtgagcgccgcccaccgggccagatacttctggggcaatctgcctggcatgaacagacccctggccagcaccgtgaacgacaagctggagctgcaggagtgcctggagcacggccggatcgccaagttcagcaaggtgagaaccatcaccacccgaagcaacagcatcaaacaaggcaaggaccagcactttcctgtgttcatgaacgagaaggaggacatcctgtggtgtaccgagatggagagagtgttcgggttcccagtccactacacagatgtcagcaacatgtctagactggccagacagagactgctgggaagaagctggtccgtccctgtgatcagacacctgttcgcccctctgaaggagtacttcgcctgcgtgagcagcggcaacagcaacgccaacagccggggccccagcttctctagcggcctggtgccactgtccctgagagggagccacatgggccccatggagatctacaaaaccgtgagcgcctggaagcggcagcctgtgcgcgtgctgagcctgtttcggaatatcgataaagtcctgaaaagcctgggattcctggagagcggctctggctccggcggtggcaccctgaagtacgtggaggatgtgacaaacgtggtcagacgggatgtggagaagtggggccccttcgatctggtgtacggcagcacccaacccctgggcagctcttgtgaccggtgccctggctggtacatgtttcagttccaccggatcctgcagtacgccctgccgagacaggagtcccagcggccattcttttggattttcatggacaacttgctgctgaccgaggatgaccaggaaactaccactcggttcctgcagaccgaagccgtgaccctgcaggacgtgagaggccgggactaccagaacgccatgcgggtgtggtccaacatccctggactgaaaagcaagcacgcacctctgacccctaaagaagaggagtacctgcaggcccaggtgcggagcagaagcaagctggacgcccctaaggtggatctgctggtgaagaattgcctcctgcccctgagagagtacttcaagtatttcagccagaatagtctgcccctgggaggcagcggcggcggcgccctggtgacatttgaggacgtcgccgtgcggttcacccaggaggaatgggctctgctggatccttctcagaaaatcctgtaccgggacgtgatgagagagacataccggaatctgacctccgtgggcatcaactgggaatgttgggaccttgaagcctgcttcagaagcctgggaagaaacctgagagtgcaggtggtgaagagaaagtgcgagctgaccaacagcggcccctgcgccgagggcggcccaagcagcggcgcccctcctcccagcggcggcagcccagccggctccccaacctctaccgaggagggcacctctgagtccgccacccccgagagcggccctggcacctccaccgagcccagcgagggcagcgcacccggcagccctgccggcagccccacctccacagaggagggaaccagcaccgagcccagcgaaggcagcgccccaggcaccagcaccgagcctagtgagcaggagattaaacggatcaacaagatcagaagaagacttgtgaaagacagcaacaccaagaaggccggcaagacaggccccatgaaaaccctgctggttagagtgatgacacccgatctgagagagcggctggaaaacctgagaaagaagcctgaaaatatcccccagcccatcagcaatacatctagagccaacctgaataagctgctgaccgattacaccgaaatgaagaaggcgatcctgcatgtgtactgggaagagttccagaaggaccctgtgggcctgatgagccgggtggcccagcctgccagcaagaagatcgatcagaacaagctgaaacctgagatggacgagaagggcaacctgaccaccgccggctttgcctgctctcagtgtggccagcccctgttcgtgtacaagctggagcaggtgtctgagaagggcaaggcttacaccaactacttcggacggtgcaatgtggccgagcacgaaaagctgatcctgctggcccagctgaagcccgagaaggatagcgacgaagccgtgacatatagcctgggaaagtttgggcagagggccctggatttctacagcattcatgtgaccaaggagtccacccaccccgtgaagcccctggcccagatcgccggaaacagatacgcctccggacctgtgggaaaggccctgagcgacgcatgtatgggcacaatcgcctccttcctgtctaagtaccaggacatcatcatcgaacaccagaaggtggtgaagggcaaccagaagagactggagagcctgcgggagctggccggcaaggaaaacctggaataccctagcgtgaccctgccacctcagcctcacaccaaggagggcgttgatgcctacaacgaagtgatcgcccgggtgcgaatgtgggtgaacctgaacctgtggcagaagctgaagctaagcagagatgatgccaagcctctgctgagactgaagggattcccttcctttcctctggtcgagagacaggccaacgaagtggactggtgggacatggtgtgtaacgtgaagaagctgatcaacgagaaaaaggaggatggcaaggtgttttggcagaatctggctggctacaagagacaggaagccctgagaccatacctgagcagcgaggaagatcggaagaagggaaagaaattcgctcggtaccagctgggcgacctgctgctgcacctggaaaagaagcacggcgaggactggggaaaggtgtacgacgaggcctgggagcggattgacaagaaagtggaaggcctgagcaagcacatcaagctggaagaggaacggagaagcgaggacgcccagagcaaggccgccctgaccgactggctgcgggctaaggccagcttcgtgatcgagggcctgaaggaggccgacaaggacgagttctgcagatgcgagctgaagctgcagaagtggtacggggacctgcggggaaagcccttcgccatcgaagccgagaacagcatcctggacatcagcggcttcagcaagcagtacaactgtgccttcatctggcagaaggacggcgtgaagaagctgaacctgtacctgatcatcaactacttcaagggcggcaagctgcggttcaagaagatcaaacctgaagccttcgaagccaacagattctacaccgtgatcaacaaaaagagcggcgagatcgtgcccatggaggtgaacttcaacttcgacgaccccaacctgatcatcctgcctctggcctttggcaagagacagggcagagaattcatctggaacgacctgctgtccctggaaaccggcagcctgaagctggccaacggaagagtgatcgagaagacactgtacaacagaagaacccggcaggatgagcctgccctgttcgtggccctgaccttcgagcggcgggaggtcctggactcctccaatatcaaaccaatgaacctgatcggcgtggcaagaggcgaaaacatccccgccgtgatcgccctgaccgaccccgagggctgcccactgagccggtttaaggatagcctgggaaacccaacccacatcctgagaatcggcgagagctataaggagaagcagcggaccatccaggccaagaaggaggtggagcagcggagagccggcggctacagccggaagtacgccagcaaagccaagaatctggcagacgatatggtgagaaacaccgctagagatctgctgtactacgccgtgacccaggatgccatgctgatcttcgccaacctgagccggggcttcggccggcagggcaagcggaccttcatggccgagagacagtacacacggatggaggactggctgaccgccaagctggcctacgagggcctgagcaagacctacctgtccaagacactggcccagtacacctccaagacatgcagcaactgtgggtttaccatcaccagcgccgactacgacagggtgctggagaagctgaagaagacagcaacaggctggatgaccacaattaacggcaaggagctgaaggtggagggccagattacctactacaacagatacaagagacagaacgtagtcaaggacctgtccgtcgagctggatagactgagcgaagaatctgtgaacaacgacatctcctcctggacaaagggcagaagcggagaagctctgagcctcctgaagaaaagattctcccatagacccgtgcaggagaagttcgtgtgcctgaactgcggcttcgagacacacgcagccgagcaagccgccctgaacatcgccagatcctggctgttcctgcggagccaggagtacaagaaataccagacaaacaagacaaccggcaacaccgataagagagccttcgtcgagacctggcagtccttttaccggaagaagcttaaggaggtgtggaaacctgccgtgcggtctggcggatctggcggaggctccagcaaggcccccatcaccttcggcgacctggccatctacttcagccaggaggagtgggagtggctgagccccatccagaaggacctgtacgaggacgtgatgctggagaactacaggaacctggtgagcctgggcctgagcttcaggaggcccaacgtgatcaccctgctggagaagggcaaggccccctggatggtggagcccgtgaggaggaggagggcccccgagctggtgaccgtggccggcggcccaagcagcggcgcccctcctcccagcggcggcagcccagccggctccccaacctctaccgaggagggcacctctgagtccgccacccccgagagcggccctggcacctccaccgagcccagcgagggcagcgcacccggcagccctgccggcagccccacctccacagaggagggaaccagcaccgagcccagcgaaggcagcgccccaggcaccagcaccgagcctagtgagcaggagattaaacggatcaacaagatcagaagaagacttgtgaaagacagcaacaccaagaaggccggcaagacaggccccatgaaaaccctgctggttagagtgatgacacccgatctgagagagcggctggaaaacctgagaaagaagcctgaaaatatcccccagcccatcagcaatacatctagagccaacctgaataagctgctgaccgattacaccgaaatgaagaaggcgatcctgcatgtgtactgggaagagttccagaaggaccctgtgggcctgatgagccgggtggcccagcctgccagcaagaagatcgatcagaacaagctgaaacctgagatggacgagaagggcaacctgaccaccgccggctttgcctgctctcagtgtggccagcccctgttcgtgtacaagctggagcaggtgtctgagaagggcaaggcttacaccaactacttcggacggtgcaatgtggccgagcacgaaaagctgatcctgctggcccagctgaagcccgagaaggatagcgacgaagccgtgacatatagcctgggaaagtttgggcagagggccctggatttctacagcattcatgtgaccaaggagtccacccaccccgtgaagcccctggcccagatcgccggaaacagatacgcctccggacctgtgggaaaggccctgagcgacgcatgtatgggcacaatcgcctccttcctgtctaagtaccaggacatcatcatcgaacaccagaaggtggtgaagggcaaccagaagagactggagagcctgcgggagctggccggcaaggaaaacctggaataccctagcgtgaccctgccacctcagcctcacaccaaggagggcgttgatgcctacaacgaagtgatcgcccgggtgcgaatgtgggtgaacctgaacctgtggcagaagctgaagctaagcagagatgatgccaagcctctgctgagactgaagggattcccttcctttcctctggtcgagagacaggccaacgaagtggactggtgggacatggtgtgtaacgtgaagaagctgatcaacgagaaaaaggaggatggcaaggtgttttggcagaatctggctggctacaagagacaggaagccctgagaccatacctgagcagcgaggaagatcggaagaagggaaagaaattcgctcggtaccagctgggcgacctgctgctgcacctggaaaagaagcacggcgaggactggggaaaggtgtacgacgaggcctgggagcggattgacaagaaagtggaaggcctgagcaagcacatcaagctggaagaggaacggagaagcgaggacgcccagagcaaggccgccctgaccgactggctgcgggctaaggccagcttcgtgatcgagggcctgaaggaggccgacaaggacgagttctgcagatgcgagctgaagctgcagaagtggtacggggacctgcggggaaagcccttcgccatcgaagccgagaacagcatcctggacatcagcggcttcagcaagcagtacaactgtgccttcatctggcagaaggacggcgtgaagaagctgaacctgtacctgatcatcaactacttcaagggcggcaagctgcggttcaagaagatcaaacctgaagccttcgaagccaacagattctacaccgtgatcaacaaaaagagcggcgagatcgtgcccatggaggtgaacttcaacttcgacgaccccaacctgatcatcctgcctctggcctttggcaagagacagggcagagaattcatctggaacgacctgctgtccctggaaaccggcagcctgaagctggccaacggaagagtgatcgagaagacactgtacaacagaagaacccggcaggatgagcctgccctgttcgtggccctgaccttcgagcggcgggaggtcctggactcctccaatatcaaaccaatgaacctgatcggcgtggcaagaggcgaaaacatccccgccgtgatcgccctgaccgaccccgagggctgcccactgagccggtttaaggatagcctgggaaacccaacccacatcctgagaatcggcgagagctataaggagaagcagcggaccatccaggccaagaaggaggtggagcagcggagagccggcggctacagccggaagtacgccagcaaagccaagaatctggcagacgatatggtgagaaacaccgctagagatctgctgtactacgccgtgacccaggatgccatgctgatcttcgccaacctgagccggggcttcggccggcagggcaagcggaccttcatggccgagagacagtacacacggatggaggactggctgaccgccaagctggcctacgagggcctgagcaagacctacctgtccaagacactggcccagtacacctccaagacatgcagcaactgtgggtttaccatcaccagcgccgactacgacagggtgctggagaagctgaagaagacagcaacaggctggatgaccacaattaacggcaaggagctgaaggtggagggccagattacctactacaacagatacaagagacagaacgtagtcaaggacctgtccgtcgagctggatagactgagcgaagaatctgtgaacaacgacatctcctcctggacaaagggcagaagcggagaagctctgagcctcctgaagaaaagattctcccatagacccgtgcaggagaagttcgtgtgcctgaactgcggcttcgagacacacgcagccgagcaagccgccctgaacatcgccagatcctggctgttcctgcggagccaggagtacaagaaataccagacaaacaagacaaccggcaacaccgataagagagccttcgtcgagacctggcagtccttttaccggaagaagcttaaggaggtgtggaaacctgccgtgcggtctggcggatctggcggaggctcctagcaaggcccccatcaccttcggcgacctggccatctacttcagccaggaggagtgggagtggctgagccccatccagaaggacctgtacgaggacgtgatgctggagaactacaggaacctggtgagcctgggcctgagcttcaggaggcccaacgtgatcaccctgctggagaagggcaaggccccctggatggtggagcccgtgaggaggaggagggcccccgagctggtgaccgtggccggatctggctccggcagcggccccaagaaaaagagaaaagtctaagctgccttctgcggggcttgccttctggccatgcccttcttctctcccttgcacctgtacctcttggtctttgaataaagcctgagtaggaaggctagcaaaaaaaaaaaaaaaaaaaaaaaaaaaaaaaaaaaaaaaaaaaaaaaaaaaaaaaaaaaaaaaaaaaaaaaaaaaaaaaa

SEQ ID NO: 15368 - RNA, 9485 nt, synthetic construct
  source 1..9485: mol_type = other RNA
aggaaataagagagaaaagaagagtaagaagaaatataagagccaccatggcccctaagaagaagcgtaaagtgagccggatggaacgcctcgtctacgaggtgcggcagaagtgcagaaacatcgaggacatctgcatctcctgcggatctctgaacgtgaccctggagcacccactgttcatcggcggcatgtgccagaactgtaaaaactgttttctggagtgtgcctatcaatacgacgatgacggctaccagagctactgcaccatctgttgcggcggaagagaggtgctgatgtgtggaaataacaactgctgccggtgcttctgcgtggaatgcgtggacctgctggtgggccccggcgccgcccaggccgctattaaggaagatccttggaactgctacatgtgcggccacaagggcacatacggcctgctgagacggagagaggactggcctagcagactgcagatgttcttcgccaataaccacgaccaggagttcgacccccctaaggtgtaccctcccgtccccgccgagaagagaaagcccatccgggtcctgagcctgttcgatggcatcgccaccggtctgctggtgctgaaggacctgggcatccaggtggataggtacattgcctccgaggtgtgcgaggactccatcaccgtgggaatggtgcgtcatcagggcaagatcatgtacgtgggcgacgtgcggagcgtgacacagaagcatatccaggagtggggccctttcgacctggtgatcggcggcagcccttgcaatgacctgagcatcgtgaacccagcccggaagggcctgtacgagggaaccggcagactgttcttcgagttttacagactgctgcacgacgcccggcctaaggaaggcgacgaccggcccttcttttggctgttcgagaatgtggtggccatgggagtcagcgacaagcgggatattagccggttcctggagagcaaccccgtgatgatcgatgccaaggaagtgagcgccgcccaccgggccagatacttctggggcaatctgcctggcatgaacagacccctggccagcaccgtgaacgacaagctggagctgcaggagtgcctggagcacggccggatcgccaagttcagcaaggtgagaaccatcaccacccgaagcaacagcatcaaacaaggcaaggaccagcactttcctgtgttcatgaacgagaaggaggacatcctgtggtgtaccgagatggagagagtgttcgggttcccagtccactacacagatgtcagcaacatgtctagactggccagacagagactgctgggaagaagctggtccgtccctgtgatcagacacctgttcgcccctctgaaggagtacttcgcctgcgtgagcagcggcaacagcaacgccaacagccggggccccagcttctctagcggcctggtgccactgtccctgagagggagccacatgggccccatggagatctacaaaaccgtgagcgcctggaagcggcagcctgtgcgcgtgctgagcctgtttcggaatatcgataaagtcctgaaaagcctgggattcctggagagcggctctggctccggcggtggcaccctgaagtacgtggaggatgtgacaaacgtggtcagacgggatgtggagaagtggggccccttcgatctggtgtacggcagcacccaacccctgggcagctcttgtgaccggtgccctggctggtacatgtttcagttccaccggatcctgcagtacgccctgccgagacaggagtcccagcggccattcttttggattttcatggacaacttgctgctgaccgaggatgaccaggaaactaccactcggttcctgcagaccgaagccgtgaccctgcaggacgtgagaggccgggactaccagaacgccatgcgggtgtggtccaacatccctggactgaaaagcaagcacgcacctctgacccctaaagaagaggagtacctgcaggcccaggtgcggagcagaagcaagctggacgcccctaaggtggatctgctggtgaagaattgcctcctgcccctgagagagtacttcaagtatttcagccagaatagtctgcccctgggaggcagcggcggcggcgccctggtgacatttgaggacgtcgccgtgcggttcacccaggaggaatgggctctgctggatccttctcagaaaatcctgtaccgggacgtgatgagagagacataccggaatctgacctccgtgggcatcaactgggaatgttgggaccttgaagcctgcttcagaagcctgggaagaaacctgagagtgcaggtggtgaagagaaagtgcgagctgaccaacagcggcccctgcgccgagggcggcccaagcagcggcgcccctcctcccagcggcggcagcccagccggctccccaacctctaccgaggagggcacctctgagtccgccacccccgagagcggccctggcacctccaccgagcccagcgagggcagcgcacccggcagccctgccggcagccccacctccacagaggagggaaccagcaccgagcccagcgaaggcagcgccccaggcaccagcaccgagcctagtgagcaggagattaaacggatcaacaagatcagaagaagacttgtgaaagacagcaacaccaagaaggccggcaagacaggccccatgaaaaccctgctggttagagtgatgacacccgatctgagagagcggctggaaaacctgagaaagaagcctgaaaatatcccccagcccatcagcaatacatctagagccaacctgaataagctgctgaccgattacaccgaaatgaagaaggcgatcctgcatgtgtactgggaagagttccagaaggaccctgtgggcctgatgagccgggtggcccagcctgccagcaagaagatcgatcagaacaagctgaaacctgagatggacgagaagggcaacctgaccaccgccggctttgcctgctctcagtgtggccagcccctgttcgtgtacaagctggagcaggtgtctgagaagggcaaggcttacaccaactacttcggacggtgcaatgtggccgagcacgaaaagctgatcctgctggcccagctgaagcccgagaaggatagcgacgaagccgtgacatatagcctgggaaagtttgggcagagggccctggatttctacagcattcatgtgaccaaggagtccacccaccccgtgaagcccctggcccagatcgccggaaacagatacgcctccggacctgtgggaaaggccctgagcgacgcatgtatgggcacaatcgcctccttcctgtctaagtaccaggacatcatcatcgaacaccagaaggtggtgaagggcaaccagaagagactggagagcctgcgggagctggccggcaaggaaaacctggaataccctagcgtgaccctgccacctcagcctcacaccaaggagggcgttgatgcctacaacgaagtgatcgcccgggtgcgaatgtgggtgaacctgaacctgtggcagaagctgaagctaagcagagatgatgccaagcctctgctgagactgaagggattcccttcctttcctctggtcgagagacaggccaacgaagtggactggtgggacatggtgtgtaacgtgaagaagctgatcaacgagaaaaaggaggatggcaaggtgttttggcagaatctggctggctacaagagacaggaagccctgagaccatacctgagcagcgaggaagatcggaagaagggaaagaaattcgctcggtaccagctgggcgacctgctgctgcacctggaaaagaagcacggcgaggactggggaaaggtgtacgacgaggcctgggagcggattgacaagaaagtggaaggcctgagcaagcacatcaagctggaagaggaacggagaagcgaggacgcccagagcaaggccgccctgaccgactggctgcgggctaaggccagcttcgtgatcgagggcctgaaggaggccgacaaggacgagttctgcagatgcgagctgaagctgcagaagtggtacggggacctgcggggaaagcccttcgccatcgaagccgagaacagcatcctggacatcagcggcttcagcaagcagtacaactgtgccttcatctggcagaaggacggcgtgaagaagctgaacctgtacctgatcatcaactacttcaagggcggcaagctgcggttcaagaagatcaaacctgaagccttcgaagccaacagattctacaccgtgatcaacaaaaagagcggcgagatcgtgcccatggaggtgaacttcaacttcgacgaccccaacctgatcatcctgcctctggcctttggcaagagacagggcagagaattcatctggaacgacctgctgtccctggaaaccggcagcctgaagctggccaacggaagagtgatcgagaagacactgtacaacagaagaacccggcaggatgagcctgccctgttcgtggccctgaccttcgagcggcgggaggtcctggactcctccaatatcaaaccaatgaacctgatcggcgtggcaagaggcgaaaacatccccgccgtgatcgccctgaccgaccccgagggctgcccactgagccggtttaaggatagcctgggaaacccaacccacatcctgagaatcggcgagagctataaggagaagcagcggaccatccaggccaagaaggaggtggagcagcggagagccggcggctacagccggaagtacgccagcaaagccaagaatctggcagacgatatggtgagaaacaccgctagagatctgctgtactacgccgtgacccaggatgccatgctgatcttcgccaacctgagccggggcttcggccggcagggcaagcggaccttcatggccgagagacagtacacacggatggaggactggctgaccgccaagctggcctacgagggcctgagcaagacctacctgtccaagacactggcccagtacacctccaagacatgcagcaactgtgggtttaccatcaccagcgccgactacgacagggtgctggagaagctgaagaagacagcaacaggctggatgaccacaattaacggcaaggagctgaaggtggagggccagattacctactacaacagatacaagagacagaacgtagtcaaggacctgtccgtcgagctggatagactgagcgaagaatctgtgaacaacgacatctcctcctggacaaagggcagaagcggagaagctctgagcctcctgaagaaaagattctcccatagacccgtgcaggagaagttcgtgtgcctgaactgcggcttcgagacacacgcagccgagcaagccgccctgaacatcgccagatcctggctgttcctgcggagccaggagtacaagaaataccagacaaacaagacaaccggcaacaccgataagagagccttcgtcgagacctggcagtccttttaccggaagaagcttaaggaggtgtggaaacctgccgtgcggtctggcggatctggcggaggctccggcaaccagttcagcttccagagcctgctgaccttcaaggacgtggccatcaacttcagcaaggaggagtgggagtgcctgcacaccagccagaggaacctgtacagggacgtgatgctggagaactacagcaacctggtgagcgtgggcctgagcgagagcaagcccgagctggtgacctgcctggagcagaacaaggagccctggatggtgaacatcgacgaggccgagggcctgggccagggcggcccaagcagcggcgcccctcctcccagcggcggcagcccagccggctccccaacctctaccgaggagggcacctctgagtccgccacccccgagagcggccctggcacctccaccgagcccagcgagggcagcgcacccggcagccctgccggcagccccacctccacagaggagggaaccagcaccgagcccagcgaaggcagcgccccaggcaccagcaccgagcctagtgagcaggagattaaacggatcaacaagatcagaagaagacttgtgaaagacagcaacaccaagaaggccggcaagacaggccccatgaaaaccctgctggttagagtgatgacacccgatctgagagagcggctggaaaacctgagaaagaagcctgaaaatatcccccagcccatcagcaatacatctagagccaacctgaataagctgctgaccgattacaccgaaatgaagaaggcgatcctgcatgtgtactgggaagagttccagaaggaccctgtgggcctgatgagccgggtggcccagcctgccagcaagaagatcgatcagaacaagctgaaacctgagatggacgagaagggcaacctgaccaccgccggctttgcctgctctcagtgtggccagcccctgttcgtgtacaagctggagcaggtgtctgagaagggcaaggcttacaccaactacttcggacggtgcaatgtggccgagcacgaaaagctgatcctgctggcccagctgaagcccgagaaggatagcgacgaagccgtgacatatagcctgggaaagtttgggcagagggccctggatttctacagcattcatgtgaccaaggagtccacccaccccgtgaagcccctggcccagatcgccggaaacagatacgcctccggacctgtgggaaaggccctgagcgacgcatgtatgggcacaatcgcctccttcctgtctaagtaccaggacatcatcatcgaacaccagaaggtggtgaagggcaaccagaagagactggagagcctgcgggagctggccggcaaggaaaacctggaataccctagcgtgaccctgccacctcagcctcacaccaaggagggcgttgatgcctacaacgaagtgatcgcccgggtgcgaatgtgggtgaacctgaacctgtggcagaagctgaagctaagcagagatgatgccaagcctctgctgagactgaagggattcccttcctttcctctggtcgagagacaggccaacgaagtggactggtgggacatggtgtgtaacgtgaagaagctgatcaacgagaaaaaggaggatggcaaggtgttttggcagaatctggctggctacaagagacaggaagccctgagaccatacctgagcagcgaggaagatcggaagaagggaaagaaattcgctcggtaccagctgggcgacctgctgctgcacctggaaaagaagcacggcgaggactggggaaaggtgtacgacgaggcctgggagcggattgacaagaaagtggaaggcctgagcaagcacatcaagctggaagaggaacggagaagcgaggacgcccagagcaaggccgccctgaccgactggctgcgggctaaggccagcttcgtgatcgagggcctgaaggaggccgacaaggacgagttctgcagatgcgagctgaagctgcagaagtggtacggggacctgcggggaaagcccttcgccatcgaagccgagaacagcatcctggacatcagcggcttcagcaagcagtacaactgtgccttcatctggcagaaggacggcgtgaagaagctgaacctgtacctgatcatcaactacttcaagggcggcaagctgcggttcaagaagatcaaacctgaagccttcgaagccaacagattctacaccgtgatcaacaaaaagagcggcgagatcgtgcccatggaggtgaacttcaacttcgacgaccccaacctgatcatcctgcctctggcctttggcaagagacagggcagagaattcatctggaacgacctgctgtccctggaaaccggcagcctgaagctggccaacggaagagtgatcgagaagacactgtacaacagaagaacccggcaggatgagcctgccctgttcgtggccctgaccttcgagcggcgggaggtcctggactcctccaatatcaaaccaatgaacctgatcggcgtggcaagaggcgaaaacatccccgccgtgatcgccctgaccgaccccgagggctgcccactgagccggtttaaggatagcctgggaaacccaacccacatcctgagaatcggcgagagctataaggagaagcagcggaccatccaggccaagaaggaggtggagcagcggagagccggcggctacagccggaagtacgccagcaaagccaagaatctggcagacgatatggtgagaaacaccgctagagatctgctgtactacgccgtgacccaggatgccatgctgatcttcgccaacctgagccggggcttcggccggcagggcaagcggaccttcatggccgagagacagtacacacggatggaggactggctgaccgccaagctggcctacgagggcctgagcaagacctacctgtccaagacactggcccagtacacctccaagacatgcagcaactgtgggtttaccatcaccagcgccgactacgacagggtgctggagaagctgaagaagacagcaacaggctggatgaccacaattaacggcaaggagctgaaggtggagggccagattacctactacaacagatacaagagacagaacgtagtcaaggacctgtccgtcgagctggatagactgagcgaagaatctgtgaacaacgacatctcctcctggacaaagggcagaagcggagaagctctgagcctcctgaagaaaagattctcccatagacccgtgcaggagaagttcgtgtgcctgaactgcggcttcgagacacacgcagccgagcaagccgccctgaacatcgccagatcctggctgttcctgcggagccaggagtacaagaaataccagacaaacaagacaaccggcaacaccgataagagagccttcgtcgagacctggcagtccttttaccggaagaagcttaaggaggtgtggaaacctgccgtgcggtctggcggatctggcggaggctcctggcaaccagttcagcttccagagcctgctgaccttcaaggacgtggccatcaacttcagcaaggaggagtgggagtgcctgcacaccagccagaggaacctgtacagggacgtgatgctggagaactacagcaacctggtgagcgtgggcctgagcgagagcaagcccgagctggtgacctgcctggagcagaacaaggagccctggatggtgaacatcgacgaggccgagggcctgggccagggatctggctccggcagcggccccaagaaaaagagaaaagtctaagctgccttctgcggggcttgccttctggccatgcccttcttctctcccttgcacctgtacctcttggtctttgaataaagcctgagtaggaaggctagcaaaaaaaaaaaaaaaaaaaaaaaaaaaaaaaaaaaaaaaaaaaaaaaaaaaaaaaaaaaaaaaaaaaaaaaaaaaaaaaa

SEQ ID NO: 15369 - RNA, 9485 nt, synthetic construct
  source 1..9485: mol_type = other RNA
aggaaataagagagaaaagaagagtaagaagaaatataagagccaccatggcccctaagaagaagcgtaaagtgagccggatggaacgcctcgtctacgaggtgcggcagaagtgcagaaacatcgaggacatctgcatctcctgcggatctctgaacgtgaccctggagcacccactgttcatcggcggcatgtgccagaactgtaaaaactgttttctggagtgtgcctatcaatacgacgatgacggctaccagagctactgcaccatctgttgcggcggaagagaggtgctgatgtgtggaaataacaactgctgccggtgcttctgcgtggaatgcgtggacctgctggtgggccccggcgccgcccaggccgctattaaggaagatccttggaactgctacatgtgcggccacaagggcacatacggcctgctgagacggagagaggactggcctagcagactgcagatgttcttcgccaataaccacgaccaggagttcgacccccctaaggtgtaccctcccgtccccgccgagaagagaaagcccatccgggtcctgagcctgttcgatggcatcgccaccggtctgctggtgctgaaggacctgggcatccaggtggataggtacattgcctccgaggtgtgcgaggactccatcaccgtgggaatggtgcgtcatcagggcaagatcatgtacgtgggcgacgtgcggagcgtgacacagaagcatatccaggagtggggccctttcgacctggtgatcggcggcagcccttgcaatgacctgagcatcgtgaacccagcccggaagggcctgtacgagggaaccggcagactgttcttcgagttttacagactgctgcacgacgcccggcctaaggaaggcgacgaccggcccttcttttggctgttcgagaatgtggtggccatgggagtcagcgacaagcgggatattagccggttcctggagagcaaccccgtgatgatcgatgccaaggaagtgagcgccgcccaccgggccagatacttctggggcaatctgcctggcatgaacagacccctggccagcaccgtgaacgacaagctggagctgcaggagtgcctggagcacggccggatcgccaagttcagcaaggtgagaaccatcaccacccgaagcaacagcatcaaacaaggcaaggaccagcactttcctgtgttcatgaacgagaaggaggacatcctgtggtgtaccgagatggagagagtgttcgggttcccagtccactacacagatgtcagcaacatgtctagactggccagacagagactgctgggaagaagctggtccgtccctgtgatcagacacctgttcgcccctctgaaggagtacttcgcctgcgtgagcagcggcaacagcaacgccaacagccggggccccagcttctctagcggcctggtgccactgtccctgagagggagccacatgggccccatggagatctacaaaaccgtgagcgcctggaagcggcagcctgtgcgcgtgctgagcctgtttcggaatatcgataaagtcctgaaaagcctgggattcctggagagcggctctggctccggcggtggcaccctgaagtacgtggaggatgtgacaaacgtggtcagacgggatgtggagaagtggggccccttcgatctggtgtacggcagcacccaacccctgggcagctcttgtgaccggtgccctggctggtacatgtttcagttccaccggatcctgcagtacgccctgccgagacaggagtcccagcggccattcttttggattttcatggacaacttgctgctgaccgaggatgaccaggaaactaccactcggttcctgcagaccgaagccgtgaccctgcaggacgtgagaggccgggactaccagaacgccatgcgggtgtggtccaacatccctggactgaaaagcaagcacgcacctctgacccctaaagaagaggagtacctgcaggcccaggtgcggagcagaagcaagctggacgcccctaaggtggatctgctggtgaagaattgcctcctgcccctgagagagtacttcaagtatttcagccagaatagtctgcccctgggaggcagcggcggcggcgccctggtgacatttgaggacgtcgccgtgcggttcacccaggaggaatgggctctgctggatccttctcagaaaatcctgtaccgggacgtgatgagagagacataccggaatctgacctccgtgggcatcaactgggaatgttgggaccttgaagcctgcttcagaagcctgggaagaaacctgagagtgcaggtggtgaagagaaagtgcgagctgaccaacagcggcccctgcgccgagggcggcccaagcagcggcgcccctcctcccagcggcggcagcccagccggctccccaacctctaccgaggagggcacctctgagtccgccacccccgagagcggccctggcacctccaccgagcccagcgagggcagcgcacccggcagccctgccggcagccccacctccacagaggagggaaccagcaccgagcccagcgaaggcagcgccccaggcaccagcaccgagcctagtgagcaggagattaaacggatcaacaagatcagaagaagacttgtgaaagacagcaacaccaagaaggccggcaagacaggccccatgaaaaccctgctggttagagtgatgacacccgatctgagagagcggctggaaaacctgagaaagaagcctgaaaatatcccccagcccatcagcaatacatctagagccaacctgaataagctgctgaccgattacaccgaaatgaagaaggcgatcctgcatgtgtactgggaagagttccagaaggaccctgtgggcctgatgagccgggtggcccagcctgccagcaagaagatcgatcagaacaagctgaaacctgagatggacgagaagggcaacctgaccaccgccggctttgcctgctctcagtgtggccagcccctgttcgtgtacaagctggagcaggtgtctgagaagggcaaggcttacaccaactacttcggacggtgcaatgtggccgagcacgaaaagctgatcctgctggcccagctgaagcccgagaaggatagcgacgaagccgtgacatatagcctgggaaagtttgggcagagggccctggatttctacagcattcatgtgaccaaggagtccacccaccccgtgaagcccctggcccagatcgccggaaacagatacgcctccggacctgtgggaaaggccctgagcgacgcatgtatgggcacaatcgcctccttcctgtctaagtaccaggacatcatcatcgaacaccagaaggtggtgaagggcaaccagaagagactggagagcctgcgggagctggccggcaaggaaaacctggaataccctagcgtgaccctgccacctcagcctcacaccaaggagggcgttgatgcctacaacgaagtgatcgcccgggtgcgaatgtgggtgaacctgaacctgtggcagaagctgaagctaagcagagatgatgccaagcctctgctgagactgaagggattcccttcctttcctctggtcgagagacaggccaacgaagtggactggtgggacatggtgtgtaacgtgaagaagctgatcaacgagaaaaaggaggatggcaaggtgttttggcagaatctggctggctacaagagacaggaagccctgagaccatacctgagcagcgaggaagatcggaagaagggaaagaaattcgctcggtaccagctgggcgacctgctgctgcacctggaaaagaagcacggcgaggactggggaaaggtgtacgacgaggcctgggagcggattgacaagaaagtggaaggcctgagcaagcacatcaagctggaagaggaacggagaagcgaggacgcccagagcaaggccgccctgaccgactggctgcgggctaaggccagcttcgtgatcgagggcctgaaggaggccgacaaggacgagttctgcagatgcgagctgaagctgcagaagtggtacggggacctgcggggaaagcccttcgccatcgaagccgagaacagcatcctggacatcagcggcttcagcaagcagtacaactgtgccttcatctggcagaaggacggcgtgaagaagctgaacctgtacctgatcatcaactacttcaagggcggcaagctgcggttcaagaagatcaaacctgaagccttcgaagccaacagattctacaccgtgatcaacaaaaagagcggcgagatcgtgcccatggaggtgaacttcaacttcgacgaccccaacctgatcatcctgcctctggcctttggcaagagacagggcagagaattcatctggaacgacctgctgtccctggaaaccggcagcctgaagctggccaacggaagagtgatcgagaagacactgtacaacagaagaacccggcaggatgagcctgccctgttcgtggccctgaccttcgagcggcgggaggtcctggactcctccaatatcaaaccaatgaacctgatcggcgtggcaagaggcgaaaacatccccgccgtgatcgccctgaccgaccccgagggctgcccactgagccggtttaaggatagcctgggaaacccaacccacatcctgagaatcggcgagagctataaggagaagcagcggaccatccaggccaagaaggaggtggagcagcggagagccggcggctacagccggaagtacgccagcaaagccaagaatctggcagacgatatggtgagaaacaccgctagagatctgctgtactacgccgtgacccaggatgccatgctgatcttcgccaacctgagccggggcttcggccggcagggcaagcggaccttcatggccgagagacagtacacacggatggaggactggctgaccgccaagctggcctacgagggcctgagcaagacctacctgtccaagacactggcccagtacacctccaagacatgcagcaactgtgggtttaccatcaccagcgccgactacgacagggtgctggagaagctgaagaagacagcaacaggctggatgaccacaattaacggcaaggagctgaaggtggagggccagattacctactacaacagatacaagagacagaacgtagtcaaggacctgtccgtcgagctggatagactgagcgaagaatctgtgaacaacgacatctcctcctggacaaagggcagaagcggagaagctctgagcctcctgaagaaaagattctcccatagacccgtgcaggagaagttcgtgtgcctgaactgcggcttcgagacacacgcagccgagcaagccgccctgaacatcgccagatcctggctgttcctgcggagccaggagtacaagaaataccagacaaacaagacaaccggcaacaccgataagagagccttcgtcgagacctggcagtccttttaccggaagaagcttaaggaggtgtggaaacctgccgtgcggtctggcggatctggcggaggctccatggccttcgaggacgtggccgtgtacttcagccaggaggagtggggcctgctggacaccgcccagagggccctgtacaggagggtgatgctggacaacttcgccctggtggccagcctgggcctgagcaccagcaggcccagggtggtgatccagctggagaggggcgaggagccctgggtgcccagcaggaccgacaccatcctgagcaggaacacctacaggaggaggaaccccggcagcggcggcccaagcagcggcgcccctcctcccagcggcggcagcccagccggctccccaacctctaccgaggagggcacctctgagtccgccacccccgagagcggccctggcacctccaccgagcccagcgagggcagcgcacccggcagccctgccggcagccccacctccacagaggagggaaccagcaccgagcccagcgaaggcagcgccccaggcaccagcaccgagcctagtgagcaggagattaaacggatcaacaagatcagaagaagacttgtgaaagacagcaacaccaagaaggccggcaagacaggccccatgaaaaccctgctggttagagtgatgacacccgatctgagagagcggctggaaaacctgagaaagaagcctgaaaatatcccccagcccatcagcaatacatctagagccaacctgaataagctgctgaccgattacaccgaaatgaagaaggcgatcctgcatgtgtactgggaagagttccagaaggaccctgtgggcctgatgagccgggtggcccagcctgccagcaagaagatcgatcagaacaagctgaaacctgagatggacgagaagggcaacctgaccaccgccggctttgcctgctctcagtgtggccagcccctgttcgtgtacaagctggagcaggtgtctgagaagggcaaggcttacaccaactacttcggacggtgcaatgtggccgagcacgaaaagctgatcctgctggcccagctgaagcccgagaaggatagcgacgaagccgtgacatatagcctgggaaagtttgggcagagggccctggatttctacagcattcatgtgaccaaggagtccacccaccccgtgaagcccctggcccagatcgccggaaacagatacgcctccggacctgtgggaaaggccctgagcgacgcatgtatgggcacaatcgcctccttcctgtctaagtaccaggacatcatcatcgaacaccagaaggtggtgaagggcaaccagaagagactggagagcctgcgggagctggccggcaaggaaaacctggaataccctagcgtgaccctgccacctcagcctcacaccaaggagggcgttgatgcctacaacgaagtgatcgcccgggtgcgaatgtgggtgaacctgaacctgtggcagaagctgaagctaagcagagatgatgccaagcctctgctgagactgaagggattcccttcctttcctctggtcgagagacaggccaacgaagtggactggtgggacatggtgtgtaacgtgaagaagctgatcaacgagaaaaaggaggatggcaaggtgttttggcagaatctggctggctacaagagacaggaagccctgagaccatacctgagcagcgaggaagatcggaagaagggaaagaaattcgctcggtaccagctgggcgacctgctgctgcacctggaaaagaagcacggcgaggactggggaaaggtgtacgacgaggcctgggagcggattgacaagaaagtggaaggcctgagcaagcacatcaagctggaagaggaacggagaagcgaggacgcccagagcaaggccgccctgaccgactggctgcgggctaaggccagcttcgtgatcgagggcctgaaggaggccgacaaggacgagttctgcagatgcgagctgaagctgcagaagtggtacggggacctgcggggaaagcccttcgccatcgaagccgagaacagcatcctggacatcagcggcttcagcaagcagtacaactgtgccttcatctggcagaaggacggcgtgaagaagctgaacctgtacctgatcatcaactacttcaagggcggcaagctgcggttcaagaagatcaaacctgaagccttcgaagccaacagattctacaccgtgatcaacaaaaagagcggcgagatcgtgcccatggaggtgaacttcaacttcgacgaccccaacctgatcatcctgcctctggcctttggcaagagacagggcagagaattcatctggaacgacctgctgtccctggaaaccggcagcctgaagctggccaacggaagagtgatcgagaagacactgtacaacagaagaacccggcaggatgagcctgccctgttcgtggccctgaccttcgagcggcgggaggtcctggactcctccaatatcaaaccaatgaacctgatcggcgtggcaagaggcgaaaacatccccgccgtgatcgccctgaccgaccccgagggctgcccactgagccggtttaaggatagcctgggaaacccaacccacatcctgagaatcggcgagagctataaggagaagcagcggaccatccaggccaagaaggaggtggagcagcggagagccggcggctacagccggaagtacgccagcaaagccaagaatctggcagacgatatggtgagaaacaccgctagagatctgctgtactacgccgtgacccaggatgccatgctgatcttcgccaacctgagccggggcttcggccggcagggcaagcggaccttcatggccgagagacagtacacacggatggaggactggctgaccgccaagctggcctacgagggcctgagcaagacctacctgtccaagacactggcccagtacacctccaagacatgcagcaactgtgggtttaccatcaccagcgccgactacgacagggtgctggagaagctgaagaagacagcaacaggctggatgaccacaattaacggcaaggagctgaaggtggagggccagattacctactacaacagatacaagagacagaacgtagtcaaggacctgtccgtcgagctggatagactgagcgaagaatctgtgaacaacgacatctcctcctggacaaagggcagaagcggagaagctctgagcctcctgaagaaaagattctcccatagacccgtgcaggagaagttcgtgtgcctgaactgcggcttcgagacacacgcagccgagcaagccgccctgaacatcgccagatcctggctgttcctgcggagccaggagtacaagaaataccagacaaacaagacaaccggcaacaccgataagagagccttcgtcgagacctggcagtccttttaccggaagaagcttaaggaggtgtggaaacctgccgtgcggtctggcggatctggcggaggctcctatggccttcgaggacgtggccgtgtacttcagccaggaggagtggggcctgctggacaccgcccagagggccctgtacaggagggtgatgctggacaacttcgccctggtggccagcctgggcctgagcaccagcaggcccagggtggtgatccagctggagaggggcgaggagccctgggtgcccagcaggaccgacaccatcctgagcaggaacacctacaggaggaggaaccccggcagcggatctggctccggcagcggccccaagaaaaagagaaaagtctaagctgccttctgcggggcttgccttctggccatgcccttcttctctcccttgcacctgtacctcttggtctttgaataaagcctgagtaggaaggctagcaaaaaaaaaaaaaaaaaaaaaaaaaaaaaaaaaaaaaaaaaaaaaaaaaaaaaaaaaaaaaaaaaaaaaaaaaaaaaaaa

SEQ ID NO: 15370 - RNA, 9485 nt, synthetic construct
  source 1..9485: mol_type = other RNA
aggaaataagagagaaaagaagagtaagaagaaatataagagccaccatggcccctaagaagaagcgtaaagtgagccggatggaacgcctcgtctacgaggtgcggcagaagtgcagaaacatcgaggacatctgcatctcctgcggatctctgaacgtgaccctggagcacccactgttcatcggcggcatgtgccagaactgtaaaaactgttttctggagtgtgcctatcaatacgacgatgacggctaccagagctactgcaccatctgttgcggcggaagagaggtgctgatgtgtggaaataacaactgctgccggtgcttctgcgtggaatgcgtggacctgctggtgggccccggcgccgcccaggccgctattaaggaagatccttggaactgctacatgtgcggccacaagggcacatacggcctgctgagacggagagaggactggcctagcagactgcagatgttcttcgccaataaccacgaccaggagttcgacccccctaaggtgtaccctcccgtccccgccgagaagagaaagcccatccgggtcctgagcctgttcgatggcatcgccaccggtctgctggtgctgaaggacctgggcatccaggtggataggtacattgcctccgaggtgtgcgaggactccatcaccgtgggaatggtgcgtcatcagggcaagatcatgtacgtgggcgacgtgcggagcgtgacacagaagcatatccaggagtggggccctttcgacctggtgatcggcggcagcccttgcaatgacctgagcatcgtgaacccagcccggaagggcctgtacgagggaaccggcagactgttcttcgagttttacagactgctgcacgacgcccggcctaaggaaggcgacgaccggcccttcttttggctgttcgagaatgtggtggccatgggagtcagcgacaagcgggatattagccggttcctggagagcaaccccgtgatgatcgatgccaaggaagtgagcgccgcccaccgggccagatacttctggggcaatctgcctggcatgaacagacccctggccagcaccgtgaacgacaagctggagctgcaggagtgcctggagcacggccggatcgccaagttcagcaaggtgagaaccatcaccacccgaagcaacagcatcaaacaaggcaaggaccagcactttcctgtgttcatgaacgagaaggaggacatcctgtggtgtaccgagatggagagagtgttcgggttcccagtccactacacagatgtcagcaacatgtctagactggccagacagagactgctgggaagaagctggtccgtccctgtgatcagacacctgttcgcccctctgaaggagtacttcgcctgcgtgagcagcggcaacagcaacgccaacagccggggccccagcttctctagcggcctggtgccactgtccctgagagggagccacatgggccccatggagatctacaaaaccgtgagcgcctggaagcggcagcctgtgcgcgtgctgagcctgtttcggaatatcgataaagtcctgaaaagcctgggattcctggagagcggctctggctccggcggtggcaccctgaagtacgtggaggatgtgacaaacgtggtcagacgggatgtggagaagtggggccccttcgatctggtgtacggcagcacccaacccctgggcagctcttgtgaccggtgccctggctggtacatgtttcagttccaccggatcctgcagtacgccctgccgagacaggagtcccagcggccattcttttggattttcatggacaacttgctgctgaccgaggatgaccaggaaactaccactcggttcctgcagaccgaagccgtgaccctgcaggacgtgagaggccgggactaccagaacgccatgcgggtgtggtccaacatccctggactgaaaagcaagcacgcacctctgacccctaaagaagaggagtacctgcaggcccaggtgcggagcagaagcaagctggacgcccctaaggtggatctgctggtgaagaattgcctcctgcccctgagagagtacttcaagtatttcagccagaatagtctgcccctgggaggcagcggcggcggcgccctggtgacatttgaggacgtcgccgtgcggttcacccaggaggaatgggctctgctggatccttctcagaaaatcctgtaccgggacgtgatgagagagacataccggaatctgacctccgtgggcatcaactgggaatgttgggaccttgaagcctgcttcagaagcctgggaagaaacctgagagtgcaggtggtgaagagaaagtgcgagctgaccaacagcggcccctgcgccgagggcggcccaagcagcggcgcccctcctcccagcggcggcagcccagccggctccccaacctctaccgaggagggcacctctgagtccgccacccccgagagcggccctggcacctccaccgagcccagcgagggcagcgcacccggcagccctgccggcagccccacctccacagaggagggaaccagcaccgagcccagcgaaggcagcgccccaggcaccagcaccgagcctagtgagcaggagattaaacggatcaacaagatcagaagaagacttgtgaaagacagcaacaccaagaaggccggcaagacaggccccatgaaaaccctgctggttagagtgatgacacccgatctgagagagcggctggaaaacctgagaaagaagcctgaaaatatcccccagcccatcagcaatacatctagagccaacctgaataagctgctgaccgattacaccgaaatgaagaaggcgatcctgcatgtgtactgggaagagttccagaaggaccctgtgggcctgatgagccgggtggcccagcctgccagcaagaagatcgatcagaacaagctgaaacctgagatggacgagaagggcaacctgaccaccgccggctttgcctgctctcagtgtggccagcccctgttcgtgtacaagctggagcaggtgtctgagaagggcaaggcttacaccaactacttcggacggtgcaatgtggccgagcacgaaaagctgatcctgctggcccagctgaagcccgagaaggatagcgacgaagccgtgacatatagcctgggaaagtttgggcagagggccctggatttctacagcattcatgtgaccaaggagtccacccaccccgtgaagcccctggcccagatcgccggaaacagatacgcctccggacctgtgggaaaggccctgagcgacgcatgtatgggcacaatcgcctccttcctgtctaagtaccaggacatcatcatcgaacaccagaaggtggtgaagggcaaccagaagagactggagagcctgcgggagctggccggcaaggaaaacctggaataccctagcgtgaccctgccacctcagcctcacaccaaggagggcgttgatgcctacaacgaagtgatcgcccgggtgcgaatgtgggtgaacctgaacctgtggcagaagctgaagctaagcagagatgatgccaagcctctgctgagactgaagggattcccttcctttcctctggtcgagagacaggccaacgaagtggactggtgggacatggtgtgtaacgtgaagaagctgatcaacgagaaaaaggaggatggcaaggtgttttggcagaatctggctggctacaagagacaggaagccctgagaccatacctgagcagcgaggaagatcggaagaagggaaagaaattcgctcggtaccagctgggcgacctgctgctgcacctggaaaagaagcacggcgaggactggggaaaggtgtacgacgaggcctgggagcggattgacaagaaagtggaaggcctgagcaagcacatcaagctggaagaggaacggagaagcgaggacgcccagagcaaggccgccctgaccgactggctgcgggctaaggccagcttcgtgatcgagggcctgaaggaggccgacaaggacgagttctgcagatgcgagctgaagctgcagaagtggtacggggacctgcggggaaagcccttcgccatcgaagccgagaacagcatcctggacatcagcggcttcagcaagcagtacaactgtgccttcatctggcagaaggacggcgtgaagaagctgaacctgtacctgatcatcaactacttcaagggcggcaagctgcggttcaagaagatcaaacctgaagccttcgaagccaacagattctacaccgtgatcaacaaaaagagcggcgagatcgtgcccatggaggtgaacttcaacttcgacgaccccaacctgatcatcctgcctctggcctttggcaagagacagggcagagaattcatctggaacgacctgctgtccctggaaaccggcagcctgaagctggccaacggaagagtgatcgagaagacactgtacaacagaagaacccggcaggatgagcctgccctgttcgtggccctgaccttcgagcggcgggaggtcctggactcctccaatatcaaaccaatgaacctgatcggcgtggcaagaggcgaaaacatccccgccgtgatcgccctgaccgaccccgagggctgcccactgagccggtttaaggatagcctgggaaacccaacccacatcctgagaatcggcgagagctataaggagaagcagcggaccatccaggccaagaaggaggtggagcagcggagagccggcggctacagccggaagtacgccagcaaagccaagaatctggcagacgatatggtgagaaacaccgctagagatctgctgtactacgccgtgacccaggatgccatgctgatcttcgccaacctgagccggggcttcggccggcagggcaagcggaccttcatggccgagagacagtacacacggatggaggactggctgaccgccaagctggcctacgagggcctgagcaagacctacctgtccaagacactggcccagtacacctccaagacatgcagcaactgtgggtttaccatcaccagcgccgactacgacagggtgctggagaagctgaagaagacagcaacaggctggatgaccacaattaacggcaaggagctgaaggtggagggccagattacctactacaacagatacaagagacagaacgtagtcaaggacctgtccgtcgagctggatagactgagcgaagaatctgtgaacaacgacatctcctcctggacaaagggcagaagcggagaagctctgagcctcctgaagaaaagattctcccatagacccgtgcaggagaagttcgtgtgcctgaactgcggcttcgagacacacgcagccgagcaagccgccctgaacatcgccagatcctggctgttcctgcggagccaggagtacaagaaataccagacaaacaagacaaccggcaacaccgataagagagccttcgtcgagacctggcagtccttttaccggaagaagcttaaggaggtgtggaaacctgccgtgcggtctggcggatctggcggaggctccatggccttcgaggacgtggccgtgtacttcagccaggaggagtggggcctgctggacaccgcccagagggccctgtacaggagggtgatgctggacaacttcgccctggtggccagcctgggcctgagcaccagcaggcccagggtggtgatccagctggagaggggcgaggagccctgggtgcccagcgagaccgacatgaccatgagcaggaacacccacaggaggaggaaccccggcagcggcggcccaagcagcggcgcccctcctcccagcggcggcagcccagccggctccccaacctctaccgaggagggcacctctgagtccgccacccccgagagcggccctggcacctccaccgagcccagcgagggcagcgcacccggcagccctgccggcagccccacctccacagaggagggaaccagcaccgagcccagcgaaggcagcgccccaggcaccagcaccgagcctagtgagcaggagattaaacggatcaacaagatcagaagaagacttgtgaaagacagcaacaccaagaaggccggcaagacaggccccatgaaaaccctgctggttagagtgatgacacccgatctgagagagcggctggaaaacctgagaaagaagcctgaaaatatcccccagcccatcagcaatacatctagagccaacctgaataagctgctgaccgattacaccgaaatgaagaaggcgatcctgcatgtgtactgggaagagttccagaaggaccctgtgggcctgatgagccgggtggcccagcctgccagcaagaagatcgatcagaacaagctgaaacctgagatggacgagaagggcaacctgaccaccgccggctttgcctgctctcagtgtggccagcccctgttcgtgtacaagctggagcaggtgtctgagaagggcaaggcttacaccaactacttcggacggtgcaatgtggccgagcacgaaaagctgatcctgctggcccagctgaagcccgagaaggatagcgacgaagccgtgacatatagcctgggaaagtttgggcagagggccctggatttctacagcattcatgtgaccaaggagtccacccaccccgtgaagcccctggcccagatcgccggaaacagatacgcctccggacctgtgggaaaggccctgagcgacgcatgtatgggcacaatcgcctccttcctgtctaagtaccaggacatcatcatcgaacaccagaaggtggtgaagggcaaccagaagagactggagagcctgcgggagctggccggcaaggaaaacctggaataccctagcgtgaccctgccacctcagcctcacaccaaggagggcgttgatgcctacaacgaagtgatcgcccgggtgcgaatgtgggtgaacctgaacctgtggcagaagctgaagctaagcagagatgatgccaagcctctgctgagactgaagggattcccttcctttcctctggtcgagagacaggccaacgaagtggactggtgggacatggtgtgtaacgtgaagaagctgatcaacgagaaaaaggaggatggcaaggtgttttggcagaatctggctggctacaagagacaggaagccctgagaccatacctgagcagcgaggaagatcggaagaagggaaagaaattcgctcggtaccagctgggcgacctgctgctgcacctggaaaagaagcacggcgaggactggggaaaggtgtacgacgaggcctgggagcggattgacaagaaagtggaaggcctgagcaagcacatcaagctggaagaggaacggagaagcgaggacgcccagagcaaggccgccctgaccgactggctgcgggctaaggccagcttcgtgatcgagggcctgaaggaggccgacaaggacgagttctgcagatgcgagctgaagctgcagaagtggtacggggacctgcggggaaagcccttcgccatcgaagccgagaacagcatcctggacatcagcggcttcagcaagcagtacaactgtgccttcatctggcagaaggacggcgtgaagaagctgaacctgtacctgatcatcaactacttcaagggcggcaagctgcggttcaagaagatcaaacctgaagccttcgaagccaacagattctacaccgtgatcaacaaaaagagcggcgagatcgtgcccatggaggtgaacttcaacttcgacgaccccaacctgatcatcctgcctctggcctttggcaagagacagggcagagaattcatctggaacgacctgctgtccctggaaaccggcagcctgaagctggccaacggaagagtgatcgagaagacactgtacaacagaagaacccggcaggatgagcctgccctgttcgtggccctgaccttcgagcggcgggaggtcctggactcctccaatatcaaaccaatgaacctgatcggcgtggcaagaggcgaaaacatccccgccgtgatcgccctgaccgaccccgagggctgcccactgagccggtttaaggatagcctgggaaacccaacccacatcctgagaatcggcgagagctataaggagaagcagcggaccatccaggccaagaaggaggtggagcagcggagagccggcggctacagccggaagtacgccagcaaagccaagaatctggcagacgatatggtgagaaacaccgctagagatctgctgtactacgccgtgacccaggatgccatgctgatcttcgccaacctgagccggggcttcggccggcagggcaagcggaccttcatggccgagagacagtacacacggatggaggactggctgaccgccaagctggcctacgagggcctgagcaagacctacctgtccaagacactggcccagtacacctccaagacatgcagcaactgtgggtttaccatcaccagcgccgactacgacagggtgctggagaagctgaagaagacagcaacaggctggatgaccacaattaacggcaaggagctgaaggtggagggccagattacctactacaacagatacaagagacagaacgtagtcaaggacctgtccgtcgagctggatagactgagcgaagaatctgtgaacaacgacatctcctcctggacaaagggcagaagcggagaagctctgagcctcctgaagaaaagattctcccatagacccgtgcaggagaagttcgtgtgcctgaactgcggcttcgagacacacgcagccgagcaagccgccctgaacatcgccagatcctggctgttcctgcggagccaggagtacaagaaataccagacaaacaagacaaccggcaacaccgataagagagccttcgtcgagacctggcagtccttttaccggaagaagcttaaggaggtgtggaaacctgccgtgcggtctggcggatctggcggaggctcctatggccttcgaggacgtggccgtgtacttcagccaggaggagtggggcctgctggacaccgcccagagggccctgtacaggagggtgatgctggacaacttcgccctggtggccagcctgggcctgagcaccagcaggcccagggtggtgatccagctggagaggggcgaggagccctgggtgcccagcgagaccgacatgaccatgagcaggaacacccacaggaggaggaaccccggcagcggatctggctccggcagcggccccaagaaaaagagaaaagtctaagctgccttctgcggggcttgccttctggccatgcccttcttctctcccttgcacctgtacctcttggtctttgaataaagcctgagtaggaaggctagcaaaaaaaaaaaaaaaaaaaaaaaaaaaaaaaaaaaaaaaaaaaaaaaaaaaaaaaaaaaaaaaaaaaaaaaaaaaaaaaa

SEQ ID NO: 15371 - RNA, 9485 nt, synthetic construct
  source 1..9485: mol_type = other RNA
aggaaataagagagaaaagaagagtaagaagaaatataagagccaccatggcccctaagaagaagcgtaaagtgagccggatggaacgcctcgtctacgaggtgcggcagaagtgcagaaacatcgaggacatctgcatctcctgcggatctctgaacgtgaccctggagcacccactgttcatcggcggcatgtgccagaactgtaaaaactgttttctggagtgtgcctatcaatacgacgatgacggctaccagagctactgcaccatctgttgcggcggaagagaggtgctgatgtgtggaaataacaactgctgccggtgcttctgcgtggaatgcgtggacctgctggtgggccccggcgccgcccaggccgctattaaggaagatccttggaactgctacatgtgcggccacaagggcacatacggcctgctgagacggagagaggactggcctagcagactgcagatgttcttcgccaataaccacgaccaggagttcgacccccctaaggtgtaccctcccgtccccgccgagaagagaaagcccatccgggtcctgagcctgttcgatggcatcgccaccggtctgctggtgctgaaggacctgggcatccaggtggataggtacattgcctccgaggtgtgcgaggactccatcaccgtgggaatggtgcgtcatcagggcaagatcatgtacgtgggcgacgtgcggagcgtgacacagaagcatatccaggagtggggccctttcgacctggtgatcggcggcagcccttgcaatgacctgagcatcgtgaacccagcccggaagggcctgtacgagggaaccggcagactgttcttcgagttttacagactgctgcacgacgcccggcctaaggaaggcgacgaccggcccttcttttggctgttcgagaatgtggtggccatgggagtcagcgacaagcgggatattagccggttcctggagagcaaccccgtgatgatcgatgccaaggaagtgagcgccgcccaccgggccagatacttctggggcaatctgcctggcatgaacagacccctggccagcaccgtgaacgacaagctggagctgcaggagtgcctggagcacggccggatcgccaagttcagcaaggtgagaaccatcaccacccgaagcaacagcatcaaacaaggcaaggaccagcactttcctgtgttcatgaacgagaaggaggacatcctgtggtgtaccgagatggagagagtgttcgggttcccagtccactacacagatgtcagcaacatgtctagactggccagacagagactgctgggaagaagctggtccgtccctgtgatcagacacctgttcgcccctctgaaggagtacttcgcctgcgtgagcagcggcaacagcaacgccaacagccggggccccagcttctctagcggcctggtgccactgtccctgagagggagccacatgggccccatggagatctacaaaaccgtgagcgcctggaagcggcagcctgtgcgcgtgctgagcctgtttcggaatatcgataaagtcctgaaaagcctgggattcctggagagcggctctggctccggcggtggcaccctgaagtacgtggaggatgtgacaaacgtggtcagacgggatgtggagaagtggggccccttcgatctggtgtacggcagcacccaacccctgggcagctcttgtgaccggtgccctggctggtacatgtttcagttccaccggatcctgcagtacgccctgccgagacaggagtcccagcggccattcttttggattttcatggacaacttgctgctgaccgaggatgaccaggaaactaccactcggttcctgcagaccgaagccgtgaccctgcaggacgtgagaggccgggactaccagaacgccatgcgggtgtggtccaacatccctggactgaaaagcaagcacgcacctctgacccctaaagaagaggagtacctgcaggcccaggtgcggagcagaagcaagctggacgcccctaaggtggatctgctggtgaagaattgcctcctgcccctgagagagtacttcaagtatttcagccagaatagtctgcccctgggaggcagcggcggcggcgccctggtgacatttgaggacgtcgccgtgcggttcacccaggaggaatgggctctgctggatccttctcagaaaatcctgtaccgggacgtgatgagagagacataccggaatctgacctccgtgggcatcaactgggaatgttgggaccttgaagcctgcttcagaagcctgggaagaaacctgagagtgcaggtggtgaagagaaagtgcgagctgaccaacagcggcccctgcgccgagggcggcccaagcagcggcgcccctcctcccagcggcggcagcccagccggctccccaacctctaccgaggagggcacctctgagtccgccacccccgagagcggccctggcacctccaccgagcccagcgagggcagcgcacccggcagccctgccggcagccccacctccacagaggagggaaccagcaccgagcccagcgaaggcagcgccccaggcaccagcaccgagcctagtgagcaggagattaaacggatcaacaagatcagaagaagacttgtgaaagacagcaacaccaagaaggccggcaagacaggccccatgaaaaccctgctggttagagtgatgacacccgatctgagagagcggctggaaaacctgagaaagaagcctgaaaatatcccccagcccatcagcaatacatctagagccaacctgaataagctgctgaccgattacaccgaaatgaagaaggcgatcctgcatgtgtactgggaagagttccagaaggaccctgtgggcctgatgagccgggtggcccagcctgccagcaagaagatcgatcagaacaagctgaaacctgagatggacgagaagggcaacctgaccaccgccggctttgcctgctctcagtgtggccagcccctgttcgtgtacaagctggagcaggtgtctgagaagggcaaggcttacaccaactacttcggacggtgcaatgtggccgagcacgaaaagctgatcctgctggcccagctgaagcccgagaaggatagcgacgaagccgtgacatatagcctgggaaagtttgggcagagggccctggatttctacagcattcatgtgaccaaggagtccacccaccccgtgaagcccctggcccagatcgccggaaacagatacgcctccggacctgtgggaaaggccctgagcgacgcatgtatgggcacaatcgcctccttcctgtctaagtaccaggacatcatcatcgaacaccagaaggtggtgaagggcaaccagaagagactggagagcctgcgggagctggccggcaaggaaaacctggaataccctagcgtgaccctgccacctcagcctcacaccaaggagggcgttgatgcctacaacgaagtgatcgcccgggtgcgaatgtgggtgaacctgaacctgtggcagaagctgaagctaagcagagatgatgccaagcctctgctgagactgaagggattcccttcctttcctctggtcgagagacaggccaacgaagtggactggtgggacatggtgtgtaacgtgaagaagctgatcaacgagaaaaaggaggatggcaaggtgttttggcagaatctggctggctacaagagacaggaagccctgagaccatacctgagcagcgaggaagatcggaagaagggaaagaaattcgctcggtaccagctgggcgacctgctgctgcacctggaaaagaagcacggcgaggactggggaaaggtgtacgacgaggcctgggagcggattgacaagaaagtggaaggcctgagcaagcacatcaagctggaagaggaacggagaagcgaggacgcccagagcaaggccgccctgaccgactggctgcgggctaaggccagcttcgtgatcgagggcctgaaggaggccgacaaggacgagttctgcagatgcgagctgaagctgcagaagtggtacggggacctgcggggaaagcccttcgccatcgaagccgagaacagcatcctggacatcagcggcttcagcaagcagtacaactgtgccttcatctggcagaaggacggcgtgaagaagctgaacctgtacctgatcatcaactacttcaagggcggcaagctgcggttcaagaagatcaaacctgaagccttcgaagccaacagattctacaccgtgatcaacaaaaagagcggcgagatcgtgcccatggaggtgaacttcaacttcgacgaccccaacctgatcatcctgcctctggcctttggcaagagacagggcagagaattcatctggaacgacctgctgtccctggaaaccggcagcctgaagctggccaacggaagagtgatcgagaagacactgtacaacagaagaacccggcaggatgagcctgccctgttcgtggccctgaccttcgagcggcgggaggtcctggactcctccaatatcaaaccaatgaacctgatcggcgtggcaagaggcgaaaacatccccgccgtgatcgccctgaccgaccccgagggctgcccactgagccggtttaaggatagcctgggaaacccaacccacatcctgagaatcggcgagagctataaggagaagcagcggaccatccaggccaagaaggaggtggagcagcggagagccggcggctacagccggaagtacgccagcaaagccaagaatctggcagacgatatggtgagaaacaccgctagagatctgctgtactacgccgtgacccaggatgccatgctgatcttcgccaacctgagccggggcttcggccggcagggcaagcggaccttcatggccgagagacagtacacacggatggaggactggctgaccgccaagctggcctacgagggcctgagcaagacctacctgtccaagacactggcccagtacacctccaagacatgcagcaactgtgggtttaccatcaccagcgccgactacgacagggtgctggagaagctgaagaagacagcaacaggctggatgaccacaattaacggcaaggagctgaaggtggagggccagattacctactacaacagatacaagagacagaacgtagtcaaggacctgtccgtcgagctggatagactgagcgaagaatctgtgaacaacgacatctcctcctggacaaagggcagaagcggagaagctctgagcctcctgaagaaaagattctcccatagacccgtgcaggagaagttcgtgtgcctgaactgcggcttcgagacacacgcagccgagcaagccgccctgaacatcgccagatcctggctgttcctgcggagccaggagtacaagaaataccagacaaacaagacaaccggcaacaccgataagagagccttcgtcgagacctggcagtccttttaccggaagaagcttaaggaggtgtggaaacctgccgtgcggtctggcggatctggcggaggctcccaccaggaggtggtgaccttcgaggacgtggccgtgtacttcacccagaccgagtgggccggcctgagccccgcccagagggccctgtacaggagcgtgatgctggagatctacggcaacctgaccagcctgggctaccccgtgcccaagcccgccctggtgagcctgctggagaggggcgacctgccctggggcctggagaccagggacgacaggcccgcccagggcaccaaggacatctgcggcggcccaagcagcggcgcccctcctcccagcggcggcagcccagccggctccccaacctctaccgaggagggcacctctgagtccgccacccccgagagcggccctggcacctccaccgagcccagcgagggcagcgcacccggcagccctgccggcagccccacctccacagaggagggaaccagcaccgagcccagcgaaggcagcgccccaggcaccagcaccgagcctagtgagcaggagattaaacggatcaacaagatcagaagaagacttgtgaaagacagcaacaccaagaaggccggcaagacaggccccatgaaaaccctgctggttagagtgatgacacccgatctgagagagcggctggaaaacctgagaaagaagcctgaaaatatcccccagcccatcagcaatacatctagagccaacctgaataagctgctgaccgattacaccgaaatgaagaaggcgatcctgcatgtgtactgggaagagttccagaaggaccctgtgggcctgatgagccgggtggcccagcctgccagcaagaagatcgatcagaacaagctgaaacctgagatggacgagaagggcaacctgaccaccgccggctttgcctgctctcagtgtggccagcccctgttcgtgtacaagctggagcaggtgtctgagaagggcaaggcttacaccaactacttcggacggtgcaatgtggccgagcacgaaaagctgatcctgctggcccagctgaagcccgagaaggatagcgacgaagccgtgacatatagcctgggaaagtttgggcagagggccctggatttctacagcattcatgtgaccaaggagtccacccaccccgtgaagcccctggcccagatcgccggaaacagatacgcctccggacctgtgggaaaggccctgagcgacgcatgtatgggcacaatcgcctccttcctgtctaagtaccaggacatcatcatcgaacaccagaaggtggtgaagggcaaccagaagagactggagagcctgcgggagctggccggcaaggaaaacctggaataccctagcgtgaccctgccacctcagcctcacaccaaggagggcgttgatgcctacaacgaagtgatcgcccgggtgcgaatgtgggtgaacctgaacctgtggcagaagctgaagctaagcagagatgatgccaagcctctgctgagactgaagggattcccttcctttcctctggtcgagagacaggccaacgaagtggactggtgggacatggtgtgtaacgtgaagaagctgatcaacgagaaaaaggaggatggcaaggtgttttggcagaatctggctggctacaagagacaggaagccctgagaccatacctgagcagcgaggaagatcggaagaagggaaagaaattcgctcggtaccagctgggcgacctgctgctgcacctggaaaagaagcacggcgaggactggggaaaggtgtacgacgaggcctgggagcggattgacaagaaagtggaaggcctgagcaagcacatcaagctggaagaggaacggagaagcgaggacgcccagagcaaggccgccctgaccgactggctgcgggctaaggccagcttcgtgatcgagggcctgaaggaggccgacaaggacgagttctgcagatgcgagctgaagctgcagaagtggtacggggacctgcggggaaagcccttcgccatcgaagccgagaacagcatcctggacatcagcggcttcagcaagcagtacaactgtgccttcatctggcagaaggacggcgtgaagaagctgaacctgtacctgatcatcaactacttcaagggcggcaagctgcggttcaagaagatcaaacctgaagccttcgaagccaacagattctacaccgtgatcaacaaaaagagcggcgagatcgtgcccatggaggtgaacttcaacttcgacgaccccaacctgatcatcctgcctctggcctttggcaagagacagggcagagaattcatctggaacgacctgctgtccctggaaaccggcagcctgaagctggccaacggaagagtgatcgagaagacactgtacaacagaagaacccggcaggatgagcctgccctgttcgtggccctgaccttcgagcggcgggaggtcctggactcctccaatatcaaaccaatgaacctgatcggcgtggcaagaggcgaaaacatccccgccgtgatcgccctgaccgaccccgagggctgcccactgagccggtttaaggatagcctgggaaacccaacccacatcctgagaatcggcgagagctataaggagaagcagcggaccatccaggccaagaaggaggtggagcagcggagagccggcggctacagccggaagtacgccagcaaagccaagaatctggcagacgatatggtgagaaacaccgctagagatctgctgtactacgccgtgacccaggatgccatgctgatcttcgccaacctgagccggggcttcggccggcagggcaagcggaccttcatggccgagagacagtacacacggatggaggactggctgaccgccaagctggcctacgagggcctgagcaagacctacctgtccaagacactggcccagtacacctccaagacatgcagcaactgtgggtttaccatcaccagcgccgactacgacagggtgctggagaagctgaagaagacagcaacaggctggatgaccacaattaacggcaaggagctgaaggtggagggccagattacctactacaacagatacaagagacagaacgtagtcaaggacctgtccgtcgagctggatagactgagcgaagaatctgtgaacaacgacatctcctcctggacaaagggcagaagcggagaagctctgagcctcctgaagaaaagattctcccatagacccgtgcaggagaagttcgtgtgcctgaactgcggcttcgagacacacgcagccgagcaagccgccctgaacatcgccagatcctggctgttcctgcggagccaggagtacaagaaataccagacaaacaagacaaccggcaacaccgataagagagccttcgtcgagacctggcagtccttttaccggaagaagcttaaggaggtgtggaaacctgccgtgcggtctggcggatctggcggaggctcctcaccaggaggtggtgaccttcgaggacgtggccgtgtacttcacccagaccgagtgggccggcctgagccccgcccagagggccctgtacaggagcgtgatgctggagatctacggcaacctgaccagcctgggctaccccgtgcccaagcccgccctggtgagcctgctggagaggggcgacctgccctggggcctggagaccagggacgacaggcccgcccagggcaccaaggacatctgcggatctggctccggcagcggccccaagaaaaagagaaaagtctaagctgccttctgcggggcttgccttctggccatgcccttcttctctcccttgcacctgtacctcttggtctttgaataaagcctgagtaggaaggctagcaaaaaaaaaaaaaaaaaaaaaaaaaaaaaaaaaaaaaaaaaaaaaaaaaaaaaaaaaaaaaaaaaaaaaaaaaaaaaaaa

SEQ ID NO: 15372 - RNA, 9485 nt, synthetic construct
  source 1..9485: mol_type = other RNA
aggaaataagagagaaaagaagagtaagaagaaatataagagccaccatggcccctaagaagaagcgtaaagtgagccggatggaacgcctcgtctacgaggtgcggcagaagtgcagaaacatcgaggacatctgcatctcctgcggatctctgaacgtgaccctggagcacccactgttcatcggcggcatgtgccagaactgtaaaaactgttttctggagtgtgcctatcaatacgacgatgacggctaccagagctactgcaccatctgttgcggcggaagagaggtgctgatgtgtggaaataacaactgctgccggtgcttctgcgtggaatgcgtggacctgctggtgggccccggcgccgcccaggccgctattaaggaagatccttggaactgctacatgtgcggccacaagggcacatacggcctgctgagacggagagaggactggcctagcagactgcagatgttcttcgccaataaccacgaccaggagttcgacccccctaaggtgtaccctcccgtccccgccgagaagagaaagcccatccgggtcctgagcctgttcgatggcatcgccaccggtctgctggtgctgaaggacctgggcatccaggtggataggtacattgcctccgaggtgtgcgaggactccatcaccgtgggaatggtgcgtcatcagggcaagatcatgtacgtgggcgacgtgcggagcgtgacacagaagcatatccaggagtggggccctttcgacctggtgatcggcggcagcccttgcaatgacctgagcatcgtgaacccagcccggaagggcctgtacgagggaaccggcagactgttcttcgagttttacagactgctgcacgacgcccggcctaaggaaggcgacgaccggcccttcttttggctgttcgagaatgtggtggccatgggagtcagcgacaagcgggatattagccggttcctggagagcaaccccgtgatgatcgatgccaaggaagtgagcgccgcccaccgggccagatacttctggggcaatctgcctggcatgaacagacccctggccagcaccgtgaacgacaagctggagctgcaggagtgcctggagcacggccggatcgccaagttcagcaaggtgagaaccatcaccacccgaagcaacagcatcaaacaaggcaaggaccagcactttcctgtgttcatgaacgagaaggaggacatcctgtggtgtaccgagatggagagagtgttcgggttcccagtccactacacagatgtcagcaacatgtctagactggccagacagagactgctgggaagaagctggtccgtccctgtgatcagacacctgttcgcccctctgaaggagtacttcgcctgcgtgagcagcggcaacagcaacgccaacagccggggccccagcttctctagcggcctggtgccactgtccctgagagggagccacatgggccccatggagatctacaaaaccgtgagcgcctggaagcggcagcctgtgcgcgtgctgagcctgtttcggaatatcgataaagtcctgaaaagcctgggattcctggagagcggctctggctccggcggtggcaccctgaagtacgtggaggatgtgacaaacgtggtcagacgggatgtggagaagtggggccccttcgatctggtgtacggcagcacccaacccctgggcagctcttgtgaccggtgccctggctggtacatgtttcagttccaccggatcctgcagtacgccctgccgagacaggagtcccagcggccattcttttggattttcatggacaacttgctgctgaccgaggatgaccaggaaactaccactcggttcctgcagaccgaagccgtgaccctgcaggacgtgagaggccgggactaccagaacgccatgcgggtgtggtccaacatccctggactgaaaagcaagcacgcacctctgacccctaaagaagaggagtacctgcaggcccaggtgcggagcagaagcaagctggacgcccctaaggtggatctgctggtgaagaattgcctcctgcccctgagagagtacttcaagtatttcagccagaatagtctgcccctgggaggcagcggcggcggcgccctggtgacatttgaggacgtcgccgtgcggttcacccaggaggaatgggctctgctggatccttctcagaaaatcctgtaccgggacgtgatgagagagacataccggaatctgacctccgtgggcatcaactgggaatgttgggaccttgaagcctgcttcagaagcctgggaagaaacctgagagtgcaggtggtgaagagaaagtgcgagctgaccaacagcggcccctgcgccgagggcggcccaagcagcggcgcccctcctcccagcggcggcagcccagccggctccccaacctctaccgaggagggcacctctgagtccgccacccccgagagcggccctggcacctccaccgagcccagcgagggcagcgcacccggcagccctgccggcagccccacctccacagaggagggaaccagcaccgagcccagcgaaggcagcgccccaggcaccagcaccgagcctagtgagcaggagattaaacggatcaacaagatcagaagaagacttgtgaaagacagcaacaccaagaaggccggcaagacaggccccatgaaaaccctgctggttagagtgatgacacccgatctgagagagcggctggaaaacctgagaaagaagcctgaaaatatcccccagcccatcagcaatacatctagagccaacctgaataagctgctgaccgattacaccgaaatgaagaaggcgatcctgcatgtgtactgggaagagttccagaaggaccctgtgggcctgatgagccgggtggcccagcctgccagcaagaagatcgatcagaacaagctgaaacctgagatggacgagaagggcaacctgaccaccgccggctttgcctgctctcagtgtggccagcccctgttcgtgtacaagctggagcaggtgtctgagaagggcaaggcttacaccaactacttcggacggtgcaatgtggccgagcacgaaaagctgatcctgctggcccagctgaagcccgagaaggatagcgacgaagccgtgacatatagcctgggaaagtttgggcagagggccctggatttctacagcattcatgtgaccaaggagtccacccaccccgtgaagcccctggcccagatcgccggaaacagatacgcctccggacctgtgggaaaggccctgagcgacgcatgtatgggcacaatcgcctccttcctgtctaagtaccaggacatcatcatcgaacaccagaaggtggtgaagggcaaccagaagagactggagagcctgcgggagctggccggcaaggaaaacctggaataccctagcgtgaccctgccacctcagcctcacaccaaggagggcgttgatgcctacaacgaagtgatcgcccgggtgcgaatgtgggtgaacctgaacctgtggcagaagctgaagctaagcagagatgatgccaagcctctgctgagactgaagggattcccttcctttcctctggtcgagagacaggccaacgaagtggactggtgggacatggtgtgtaacgtgaagaagctgatcaacgagaaaaaggaggatggcaaggtgttttggcagaatctggctggctacaagagacaggaagccctgagaccatacctgagcagcgaggaagatcggaagaagggaaagaaattcgctcggtaccagctgggcgacctgctgctgcacctggaaaagaagcacggcgaggactggggaaaggtgtacgacgaggcctgggagcggattgacaagaaagtggaaggcctgagcaagcacatcaagctggaagaggaacggagaagcgaggacgcccagagcaaggccgccctgaccgactggctgcgggctaaggccagcttcgtgatcgagggcctgaaggaggccgacaaggacgagttctgcagatgcgagctgaagctgcagaagtggtacggggacctgcggggaaagcccttcgccatcgaagccgagaacagcatcctggacatcagcggcttcagcaagcagtacaactgtgccttcatctggcagaaggacggcgtgaagaagctgaacctgtacctgatcatcaactacttcaagggcggcaagctgcggttcaagaagatcaaacctgaagccttcgaagccaacagattctacaccgtgatcaacaaaaagagcggcgagatcgtgcccatggaggtgaacttcaacttcgacgaccccaacctgatcatcctgcctctggcctttggcaagagacagggcagagaattcatctggaacgacctgctgtccctggaaaccggcagcctgaagctggccaacggaagagtgatcgagaagacactgtacaacagaagaacccggcaggatgagcctgccctgttcgtggccctgaccttcgagcggcgggaggtcctggactcctccaatatcaaaccaatgaacctgatcggcgtggcaagaggcgaaaacatccccgccgtgatcgccctgaccgaccccgagggctgcccactgagccggtttaaggatagcctgggaaacccaacccacatcctgagaatcggcgagagctataaggagaagcagcggaccatccaggccaagaaggaggtggagcagcggagagccggcggctacagccggaagtacgccagcaaagccaagaatctggcagacgatatggtgagaaacaccgctagagatctgctgtactacgccgtgacccaggatgccatgctgatcttcgccaacctgagccggggcttcggccggcagggcaagcggaccttcatggccgagagacagtacacacggatggaggactggctgaccgccaagctggcctacgagggcctgagcaagacctacctgtccaagacactggcccagtacacctccaagacatgcagcaactgtgggtttaccatcaccagcgccgactacgacagggtgctggagaagctgaagaagacagcaacaggctggatgaccacaattaacggcaaggagctgaaggtggagggccagattacctactacaacagatacaagagacagaacgtagtcaaggacctgtccgtcgagctggatagactgagcgaagaatctgtgaacaacgacatctcctcctggacaaagggcagaagcggagaagctctgagcctcctgaagaaaagattctcccatagacccgtgcaggagaagttcgtgtgcctgaactgcggcttcgagacacacgcagccgagcaagccgccctgaacatcgccagatcctggctgttcctgcggagccaggagtacaagaaataccagacaaacaagacaaccggcaacaccgataagagagccttcgtcgagacctggcagtccttttaccggaagaagcttaaggaggtgtggaaacctgccgtgcggtctggcggatctggcggaggctccacccaggtgcccgtgaccttcgaggacgtggccgtgtacttctgcgagggcgagtgggagaccctggccgagtggcagaaggagctgtacagggagaccatgaaggagaactacgagaccctgaccagcctgggcttcagcagcaagaagcccagcctgatcagcaagatcgagagggaggaggacccctgcgtgagggacaagcaggacagcagggacaggaggaggctgaggagctgctggggcggcccaagcagcggcgcccctcctcccagcggcggcagcccagccggctccccaacctctaccgaggagggcacctctgagtccgccacccccgagagcggccctggcacctccaccgagcccagcgagggcagcgcacccggcagccctgccggcagccccacctccacagaggagggaaccagcaccgagcccagcgaaggcagcgccccaggcaccagcaccgagcctagtgagcaggagattaaacggatcaacaagatcagaagaagacttgtgaaagacagcaacaccaagaaggccggcaagacaggccccatgaaaaccctgctggttagagtgatgacacccgatctgagagagcggctggaaaacctgagaaagaagcctgaaaatatcccccagcccatcagcaatacatctagagccaacctgaataagctgctgaccgattacaccgaaatgaagaaggcgatcctgcatgtgtactgggaagagttccagaaggaccctgtgggcctgatgagccgggtggcccagcctgccagcaagaagatcgatcagaacaagctgaaacctgagatggacgagaagggcaacctgaccaccgccggctttgcctgctctcagtgtggccagcccctgttcgtgtacaagctggagcaggtgtctgagaagggcaaggcttacaccaactacttcggacggtgcaatgtggccgagcacgaaaagctgatcctgctggcccagctgaagcccgagaaggatagcgacgaagccgtgacatatagcctgggaaagtttgggcagagggccctggatttctacagcattcatgtgaccaaggagtccacccaccccgtgaagcccctggcccagatcgccggaaacagatacgcctccggacctgtgggaaaggccctgagcgacgcatgtatgggcacaatcgcctccttcctgtctaagtaccaggacatcatcatcgaacaccagaaggtggtgaagggcaaccagaagagactggagagcctgcgggagctggccggcaaggaaaacctggaataccctagcgtgaccctgccacctcagcctcacaccaaggagggcgttgatgcctacaacgaagtgatcgcccgggtgcgaatgtgggtgaacctgaacctgtggcagaagctgaagctaagcagagatgatgccaagcctctgctgagactgaagggattcccttcctttcctctggtcgagagacaggccaacgaagtggactggtgggacatggtgtgtaacgtgaagaagctgatcaacgagaaaaaggaggatggcaaggtgttttggcagaatctggctggctacaagagacaggaagccctgagaccatacctgagcagcgaggaagatcggaagaagggaaagaaattcgctcggtaccagctgggcgacctgctgctgcacctggaaaagaagcacggcgaggactggggaaaggtgtacgacgaggcctgggagcggattgacaagaaagtggaaggcctgagcaagcacatcaagctggaagaggaacggagaagcgaggacgcccagagcaaggccgccctgaccgactggctgcgggctaaggccagcttcgtgatcgagggcctgaaggaggccgacaaggacgagttctgcagatgcgagctgaagctgcagaagtggtacggggacctgcggggaaagcccttcgccatcgaagccgagaacagcatcctggacatcagcggcttcagcaagcagtacaactgtgccttcatctggcagaaggacggcgtgaagaagctgaacctgtacctgatcatcaactacttcaagggcggcaagctgcggttcaagaagatcaaacctgaagccttcgaagccaacagattctacaccgtgatcaacaaaaagagcggcgagatcgtgcccatggaggtgaacttcaacttcgacgaccccaacctgatcatcctgcctctggcctttggcaagagacagggcagagaattcatctggaacgacctgctgtccctggaaaccggcagcctgaagctggccaacggaagagtgatcgagaagacactgtacaacagaagaacccggcaggatgagcctgccctgttcgtggccctgaccttcgagcggcgggaggtcctggactcctccaatatcaaaccaatgaacctgatcggcgtggcaagaggcgaaaacatccccgccgtgatcgccctgaccgaccccgagggctgcccactgagccggtttaaggatagcctgggaaacccaacccacatcctgagaatcggcgagagctataaggagaagcagcggaccatccaggccaagaaggaggtggagcagcggagagccggcggctacagccggaagtacgccagcaaagccaagaatctggcagacgatatggtgagaaacaccgctagagatctgctgtactacgccgtgacccaggatgccatgctgatcttcgccaacctgagccggggcttcggccggcagggcaagcggaccttcatggccgagagacagtacacacggatggaggactggctgaccgccaagctggcctacgagggcctgagcaagacctacctgtccaagacactggcccagtacacctccaagacatgcagcaactgtgggtttaccatcaccagcgccgactacgacagggtgctggagaagctgaagaagacagcaacaggctggatgaccacaattaacggcaaggagctgaaggtggagggccagattacctactacaacagatacaagagacagaacgtagtcaaggacctgtccgtcgagctggatagactgagcgaagaatctgtgaacaacgacatctcctcctggacaaagggcagaagcggagaagctctgagcctcctgaagaaaagattctcccatagacccgtgcaggagaagttcgtgtgcctgaactgcggcttcgagacacacgcagccgagcaagccgccctgaacatcgccagatcctggctgttcctgcggagccaggagtacaagaaataccagacaaacaagacaaccggcaacaccgataagagagccttcgtcgagacctggcagtccttttaccggaagaagcttaaggaggtgtggaaacctgccgtgcggtctggcggatctggcggaggctcctacccaggtgcccgtgaccttcgaggacgtggccgtgtacttctgcgagggcgagtgggagaccctggccgagtggcagaaggagctgtacagggagaccatgaaggagaactacgagaccctgaccagcctgggcttcagcagcaagaagcccagcctgatcagcaagatcgagagggaggaggacccctgcgtgagggacaagcaggacagcagggacaggaggaggctgaggagctgctggggatctggctccggcagcggccccaagaaaaagagaaaagtctaagctgccttctgcggggcttgccttctggccatgcccttcttctctcccttgcacctgtacctcttggtctttgaataaagcctgagtaggaaggctagcaaaaaaaaaaaaaaaaaaaaaaaaaaaaaaaaaaaaaaaaaaaaaaaaaaaaaaaaaaaaaaaaaaaaaaaaaaaaaaaa

SEQ ID NO: 15373 - RNA, 9485 nt, synthetic construct
  source 1..9485: mol_type = other RNA
aggaaataagagagaaaagaagagtaagaagaaatataagagccaccatggcccctaagaagaagcgtaaagtgagccggatggaacgcctcgtctacgaggtgcggcagaagtgcagaaacatcgaggacatctgcatctcctgcggatctctgaacgtgaccctggagcacccactgttcatcggcggcatgtgccagaactgtaaaaactgttttctggagtgtgcctatcaatacgacgatgacggctaccagagctactgcaccatctgttgcggcggaagagaggtgctgatgtgtggaaataacaactgctgccggtgcttctgcgtggaatgcgtggacctgctggtgggccccggcgccgcccaggccgctattaaggaagatccttggaactgctacatgtgcggccacaagggcacatacggcctgctgagacggagagaggactggcctagcagactgcagatgttcttcgccaataaccacgaccaggagttcgacccccctaaggtgtaccctcccgtccccgccgagaagagaaagcccatccgggtcctgagcctgttcgatggcatcgccaccggtctgctggtgctgaaggacctgggcatccaggtggataggtacattgcctccgaggtgtgcgaggactccatcaccgtgggaatggtgcgtcatcagggcaagatcatgtacgtgggcgacgtgcggagcgtgacacagaagcatatccaggagtggggccctttcgacctggtgatcggcggcagcccttgcaatgacctgagcatcgtgaacccagcccggaagggcctgtacgagggaaccggcagactgttcttcgagttttacagactgctgcacgacgcccggcctaaggaaggcgacgaccggcccttcttttggctgttcgagaatgtggtggccatgggagtcagcgacaagcgggatattagccggttcctggagagcaaccccgtgatgatcgatgccaaggaagtgagcgccgcccaccgggccagatacttctggggcaatctgcctggcatgaacagacccctggccagcaccgtgaacgacaagctggagctgcaggagtgcctggagcacggccggatcgccaagttcagcaaggtgagaaccatcaccacccgaagcaacagcatcaaacaaggcaaggaccagcactttcctgtgttcatgaacgagaaggaggacatcctgtggtgtaccgagatggagagagtgttcgggttcccagtccactacacagatgtcagcaacatgtctagactggccagacagagactgctgggaagaagctggtccgtccctgtgatcagacacctgttcgcccctctgaaggagtacttcgcctgcgtgagcagcggcaacagcaacgccaacagccggggccccagcttctctagcggcctggtgccactgtccctgagagggagccacatgggccccatggagatctacaaaaccgtgagcgcctggaagcggcagcctgtgcgcgtgctgagcctgtttcggaatatcgataaagtcctgaaaagcctgggattcctggagagcggctctggctccggcggtggcaccctgaagtacgtggaggatgtgacaaacgtggtcagacgggatgtggagaagtggggccccttcgatctggtgtacggcagcacccaacccctgggcagctcttgtgaccggtgccctggctggtacatgtttcagttccaccggatcctgcagtacgccctgccgagacaggagtcccagcggccattcttttggattttcatggacaacttgctgctgaccgaggatgaccaggaaactaccactcggttcctgcagaccgaagccgtgaccctgcaggacgtgagaggccgggactaccagaacgccatgcgggtgtggtccaacatccctggactgaaaagcaagcacgcacctctgacccctaaagaagaggagtacctgcaggcccaggtgcggagcagaagcaagctggacgcccctaaggtggatctgctggtgaagaattgcctcctgcccctgagagagtacttcaagtatttcagccagaatagtctgcccctgggaggcagcggcggcggcgccctggtgacatttgaggacgtcgccgtgcggttcacccaggaggaatgggctctgctggatccttctcagaaaatcctgtaccgggacgtgatgagagagacataccggaatctgacctccgtgggcatcaactgggaatgttgggaccttgaagcctgcttcagaagcctgggaagaaacctgagagtgcaggtggtgaagagaaagtgcgagctgaccaacagcggcccctgcgccgagggcggcccaagcagcggcgcccctcctcccagcggcggcagcccagccggctccccaacctctaccgaggagggcacctctgagtccgccacccccgagagcggccctggcacctccaccgagcccagcgagggcagcgcacccggcagccctgccggcagccccacctccacagaggagggaaccagcaccgagcccagcgaaggcagcgccccaggcaccagcaccgagcctagtgagcaggagattaaacggatcaacaagatcagaagaagacttgtgaaagacagcaacaccaagaaggccggcaagacaggccccatgaaaaccctgctggttagagtgatgacacccgatctgagagagcggctggaaaacctgagaaagaagcctgaaaatatcccccagcccatcagcaatacatctagagccaacctgaataagctgctgaccgattacaccgaaatgaagaaggcgatcctgcatgtgtactgggaagagttccagaaggaccctgtgggcctgatgagccgggtggcccagcctgccagcaagaagatcgatcagaacaagctgaaacctgagatggacgagaagggcaacctgaccaccgccggctttgcctgctctcagtgtggccagcccctgttcgtgtacaagctggagcaggtgtctgagaagggcaaggcttacaccaactacttcggacggtgcaatgtggccgagcacgaaaagctgatcctgctggcccagctgaagcccgagaaggatagcgacgaagccgtgacatatagcctgggaaagtttgggcagagggccctggatttctacagcattcatgtgaccaaggagtccacccaccccgtgaagcccctggcccagatcgccggaaacagatacgcctccggacctgtgggaaaggccctgagcgacgcatgtatgggcacaatcgcctccttcctgtctaagtaccaggacatcatcatcgaacaccagaaggtggtgaagggcaaccagaagagactggagagcctgcgggagctggccggcaaggaaaacctggaataccctagcgtgaccctgccacctcagcctcacaccaaggagggcgttgatgcctacaacgaagtgatcgcccgggtgcgaatgtgggtgaacctgaacctgtggcagaagctgaagctaagcagagatgatgccaagcctctgctgagactgaagggattcccttcctttcctctggtcgagagacaggccaacgaagtggactggtgggacatggtgtgtaacgtgaagaagctgatcaacgagaaaaaggaggatggcaaggtgttttggcagaatctggctggctacaagagacaggaagccctgagaccatacctgagcagcgaggaagatcggaagaagggaaagaaattcgctcggtaccagctgggcgacctgctgctgcacctggaaaagaagcacggcgaggactggggaaaggtgtacgacgaggcctgggagcggattgacaagaaagtggaaggcctgagcaagcacatcaagctggaagaggaacggagaagcgaggacgcccagagcaaggccgccctgaccgactggctgcgggctaaggccagcttcgtgatcgagggcctgaaggaggccgacaaggacgagttctgcagatgcgagctgaagctgcagaagtggtacggggacctgcggggaaagcccttcgccatcgaagccgagaacagcatcctggacatcagcggcttcagcaagcagtacaactgtgccttcatctggcagaaggacggcgtgaagaagctgaacctgtacctgatcatcaactacttcaagggcggcaagctgcggttcaagaagatcaaacctgaagccttcgaagccaacagattctacaccgtgatcaacaaaaagagcggcgagatcgtgcccatggaggtgaacttcaacttcgacgaccccaacctgatcatcctgcctctggcctttggcaagagacagggcagagaattcatctggaacgacctgctgtccctggaaaccggcagcctgaagctggccaacggaagagtgatcgagaagacactgtacaacagaagaacccggcaggatgagcctgccctgttcgtggccctgaccttcgagcggcgggaggtcctggactcctccaatatcaaaccaatgaacctgatcggcgtggcaagaggcgaaaacatccccgccgtgatcgccctgaccgaccccgagggctgcccactgagccggtttaaggatagcctgggaaacccaacccacatcctgagaatcggcgagagctataaggagaagcagcggaccatccaggccaagaaggaggtggagcagcggagagccggcggctacagccggaagtacgccagcaaagccaagaatctggcagacgatatggtgagaaacaccgctagagatctgctgtactacgccgtgacccaggatgccatgctgatcttcgccaacctgagccggggcttcggccggcagggcaagcggaccttcatggccgagagacagtacacacggatggaggactggctgaccgccaagctggcctacgagggcctgagcaagacctacctgtccaagacactggcccagtacacctccaagacatgcagcaactgtgggtttaccatcaccagcgccgactacgacagggtgctggagaagctgaagaagacagcaacaggctggatgaccacaattaacggcaaggagctgaaggtggagggccagattacctactacaacagatacaagagacagaacgtagtcaaggacctgtccgtcgagctggatagactgagcgaagaatctgtgaacaacgacatctcctcctggacaaagggcagaagcggagaagctctgagcctcctgaagaaaagattctcccatagacccgtgcaggagaagttcgtgtgcctgaactgcggcttcgagacacacgcagccgagcaagccgccctgaacatcgccagatcctggctgttcctgcggagccaggagtacaagaaataccagacaaacaagacaaccggcaacaccgataagagagccttcgtcgagacctggcagtccttttaccggaagaagcttaaggaggtgtggaaacctgccgtgcggtctggcggatctggcggaggctccgcccacggcagcctgatgttcagcgacgtgagcatcgtgttcagccaggaggagtgggagtgcctggacctggagcagagggacctgtacagggacgtgatgctggagaactacaccaacctggtgagcctgggctgcttcatcagcaagcccgacgtgatcagcctgctggagcagggcaaggagccctggaaggtggtgaggaagaggaggggccagtacgccgacctggagaccaggtacggcggcccaagcagcggcgcccctcctcccagcggcggcagcccagccggctccccaacctctaccgaggagggcacctctgagtccgccacccccgagagcggccctggcacctccaccgagcccagcgagggcagcgcacccggcagccctgccggcagccccacctccacagaggagggaaccagcaccgagcccagcgaaggcagcgccccaggcaccagcaccgagcctagtgagcaggagattaaacggatcaacaagatcagaagaagacttgtgaaagacagcaacaccaagaaggccggcaagacaggccccatgaaaaccctgctggttagagtgatgacacccgatctgagagagcggctggaaaacctgagaaagaagcctgaaaatatcccccagcccatcagcaatacatctagagccaacctgaataagctgctgaccgattacaccgaaatgaagaaggcgatcctgcatgtgtactgggaagagttccagaaggaccctgtgggcctgatgagccgggtggcccagcctgccagcaagaagatcgatcagaacaagctgaaacctgagatggacgagaagggcaacctgaccaccgccggctttgcctgctctcagtgtggccagcccctgttcgtgtacaagctggagcaggtgtctgagaagggcaaggcttacaccaactacttcggacggtgcaatgtggccgagcacgaaaagctgatcctgctggcccagctgaagcccgagaaggatagcgacgaagccgtgacatatagcctgggaaagtttgggcagagggccctggatttctacagcattcatgtgaccaaggagtccacccaccccgtgaagcccctggcccagatcgccggaaacagatacgcctccggacctgtgggaaaggccctgagcgacgcatgtatgggcacaatcgcctccttcctgtctaagtaccaggacatcatcatcgaacaccagaaggtggtgaagggcaaccagaagagactggagagcctgcgggagctggccggcaaggaaaacctggaataccctagcgtgaccctgccacctcagcctcacaccaaggagggcgttgatgcctacaacgaagtgatcgcccgggtgcgaatgtgggtgaacctgaacctgtggcagaagctgaagctaagcagagatgatgccaagcctctgctgagactgaagggattcccttcctttcctctggtcgagagacaggccaacgaagtggactggtgggacatggtgtgtaacgtgaagaagctgatcaacgagaaaaaggaggatggcaaggtgttttggcagaatctggctggctacaagagacaggaagccctgagaccatacctgagcagcgaggaagatcggaagaagggaaagaaattcgctcggtaccagctgggcgacctgctgctgcacctggaaaagaagcacggcgaggactggggaaaggtgtacgacgaggcctgggagcggattgacaagaaagtggaaggcctgagcaagcacatcaagctggaagaggaacggagaagcgaggacgcccagagcaaggccgccctgaccgactggctgcgggctaaggccagcttcgtgatcgagggcctgaaggaggccgacaaggacgagttctgcagatgcgagctgaagctgcagaagtggtacggggacctgcggggaaagcccttcgccatcgaagccgagaacagcatcctggacatcagcggcttcagcaagcagtacaactgtgccttcatctggcagaaggacggcgtgaagaagctgaacctgtacctgatcatcaactacttcaagggcggcaagctgcggttcaagaagatcaaacctgaagccttcgaagccaacagattctacaccgtgatcaacaaaaagagcggcgagatcgtgcccatggaggtgaacttcaacttcgacgaccccaacctgatcatcctgcctctggcctttggcaagagacagggcagagaattcatctggaacgacctgctgtccctggaaaccggcagcctgaagctggccaacggaagagtgatcgagaagacactgtacaacagaagaacccggcaggatgagcctgccctgttcgtggccctgaccttcgagcggcgggaggtcctggactcctccaatatcaaaccaatgaacctgatcggcgtggcaagaggcgaaaacatccccgccgtgatcgccctgaccgaccccgagggctgcccactgagccggtttaaggatagcctgggaaacccaacccacatcctgagaatcggcgagagctataaggagaagcagcggaccatccaggccaagaaggaggtggagcagcggagagccggcggctacagccggaagtacgccagcaaagccaagaatctggcagacgatatggtgagaaacaccgctagagatctgctgtactacgccgtgacccaggatgccatgctgatcttcgccaacctgagccggggcttcggccggcagggcaagcggaccttcatggccgagagacagtacacacggatggaggactggctgaccgccaagctggcctacgagggcctgagcaagacctacctgtccaagacactggcccagtacacctccaagacatgcagcaactgtgggtttaccatcaccagcgccgactacgacagggtgctggagaagctgaagaagacagcaacaggctggatgaccacaattaacggcaaggagctgaaggtggagggccagattacctactacaacagatacaagagacagaacgtagtcaaggacctgtccgtcgagctggatagactgagcgaagaatctgtgaacaacgacatctcctcctggacaaagggcagaagcggagaagctctgagcctcctgaagaaaagattctcccatagacccgtgcaggagaagttcgtgtgcctgaactgcggcttcgagacacacgcagccgagcaagccgccctgaacatcgccagatcctggctgttcctgcggagccaggagtacaagaaataccagacaaacaagacaaccggcaacaccgataagagagccttcgtcgagacctggcagtccttttaccggaagaagcttaaggaggtgtggaaacctgccgtgcggtctggcggatctggcggaggctcctgcccacggcagcctgatgttcagcgacgtgagcatcgtgttcagccaggaggagtgggagtgcctggacctggagcagagggacctgtacagggacgtgatgctggagaactacaccaacctggtgagcctgggctgcttcatcagcaagcccgacgtgatcagcctgctggagcagggcaaggagccctggaaggtggtgaggaagaggaggggccagtacgccgacctggagaccaggtacggatctggctccggcagcggccccaagaaaaagagaaaagtctaagctgccttctgcggggcttgccttctggccatgcccttcttctctcccttgcacctgtacctcttggtctttgaataaagcctgagtaggaaggctagcaaaaaaaaaaaaaaaaaaaaaaaaaaaaaaaaaaaaaaaaaaaaaaaaaaaaaaaaaaaaaaaaaaaaaaaaaaaaaaaa

SEQ ID NO: 15374 - RNA, 9485 nt, synthetic construct
  source 1..9485: mol_type = other RNA
aggaaataagagagaaaagaagagtaagaagaaatataagagccaccatggcccctaagaagaagcgtaaagtgagccggatggaacgcctcgtctacgaggtgcggcagaagtgcagaaacatcgaggacatctgcatctcctgcggatctctgaacgtgaccctggagcacccactgttcatcggcggcatgtgccagaactgtaaaaactgttttctggagtgtgcctatcaatacgacgatgacggctaccagagctactgcaccatctgttgcggcggaagagaggtgctgatgtgtggaaataacaactgctgccggtgcttctgcgtggaatgcgtggacctgctggtgggccccggcgccgcccaggccgctattaaggaagatccttggaactgctacatgtgcggccacaagggcacatacggcctgctgagacggagagaggactggcctagcagactgcagatgttcttcgccaataaccacgaccaggagttcgacccccctaaggtgtaccctcccgtccccgccgagaagagaaagcccatccgggtcctgagcctgttcgatggcatcgccaccggtctgctggtgctgaaggacctgggcatccaggtggataggtacattgcctccgaggtgtgcgaggactccatcaccgtgggaatggtgcgtcatcagggcaagatcatgtacgtgggcgacgtgcggagcgtgacacagaagcatatccaggagtggggccctttcgacctggtgatcggcggcagcccttgcaatgacctgagcatcgtgaacccagcccggaagggcctgtacgagggaaccggcagactgttcttcgagttttacagactgctgcacgacgcccggcctaaggaaggcgacgaccggcccttcttttggctgttcgagaatgtggtggccatgggagtcagcgacaagcgggatattagccggttcctggagagcaaccccgtgatgatcgatgccaaggaagtgagcgccgcccaccgggccagatacttctggggcaatctgcctggcatgaacagacccctggccagcaccgtgaacgacaagctggagctgcaggagtgcctggagcacggccggatcgccaagttcagcaaggtgagaaccatcaccacccgaagcaacagcatcaaacaaggcaaggaccagcactttcctgtgttcatgaacgagaaggaggacatcctgtggtgtaccgagatggagagagtgttcgggttcccagtccactacacagatgtcagcaacatgtctagactggccagacagagactgctgggaagaagctggtccgtccctgtgatcagacacctgttcgcccctctgaaggagtacttcgcctgcgtgagcagcggcaacagcaacgccaacagccggggccccagcttctctagcggcctggtgccactgtccctgagagggagccacatgggccccatggagatctacaaaaccgtgagcgcctggaagcggcagcctgtgcgcgtgctgagcctgtttcggaatatcgataaagtcctgaaaagcctgggattcctggagagcggctctggctccggcggtggcaccctgaagtacgtggaggatgtgacaaacgtggtcagacgggatgtggagaagtggggccccttcgatctggtgtacggcagcacccaacccctgggcagctcttgtgaccggtgccctggctggtacatgtttcagttccaccggatcctgcagtacgccctgccgagacaggagtcccagcggccattcttttggattttcatggacaacttgctgctgaccgaggatgaccaggaaactaccactcggttcctgcagaccgaagccgtgaccctgcaggacgtgagaggccgggactaccagaacgccatgcgggtgtggtccaacatccctggactgaaaagcaagcacgcacctctgacccctaaagaagaggagtacctgcaggcccaggtgcggagcagaagcaagctggacgcccctaaggtggatctgctggtgaagaattgcctcctgcccctgagagagtacttcaagtatttcagccagaatagtctgcccctgggaggcagcggcggcggcgccctggtgacatttgaggacgtcgccgtgcggttcacccaggaggaatgggctctgctggatccttctcagaaaatcctgtaccgggacgtgatgagagagacataccggaatctgacctccgtgggcatcaactgggaatgttgggaccttgaagcctgcttcagaagcctgggaagaaacctgagagtgcaggtggtgaagagaaagtgcgagctgaccaacagcggcccctgcgccgagggcggcccaagcagcggcgcccctcctcccagcggcggcagcccagccggctccccaacctctaccgaggagggcacctctgagtccgccacccccgagagcggccctggcacctccaccgagcccagcgagggcagcgcacccggcagccctgccggcagccccacctccacagaggagggaaccagcaccgagcccagcgaaggcagcgccccaggcaccagcaccgagcctagtgagcaggagattaaacggatcaacaagatcagaagaagacttgtgaaagacagcaacaccaagaaggccggcaagacaggccccatgaaaaccctgctggttagagtgatgacacccgatctgagagagcggctggaaaacctgagaaagaagcctgaaaatatcccccagcccatcagcaatacatctagagccaacctgaataagctgctgaccgattacaccgaaatgaagaaggcgatcctgcatgtgtactgggaagagttccagaaggaccctgtgggcctgatgagccgggtggcccagcctgccagcaagaagatcgatcagaacaagctgaaacctgagatggacgagaagggcaacctgaccaccgccggctttgcctgctctcagtgtggccagcccctgttcgtgtacaagctggagcaggtgtctgagaagggcaaggcttacaccaactacttcggacggtgcaatgtggccgagcacgaaaagctgatcctgctggcccagctgaagcccgagaaggatagcgacgaagccgtgacatatagcctgggaaagtttgggcagagggccctggatttctacagcattcatgtgaccaaggagtccacccaccccgtgaagcccctggcccagatcgccggaaacagatacgcctccggacctgtgggaaaggccctgagcgacgcatgtatgggcacaatcgcctccttcctgtctaagtaccaggacatcatcatcgaacaccagaaggtggtgaagggcaaccagaagagactggagagcctgcgggagctggccggcaaggaaaacctggaataccctagcgtgaccctgccacctcagcctcacaccaaggagggcgttgatgcctacaacgaagtgatcgcccgggtgcgaatgtgggtgaacctgaacctgtggcagaagctgaagctaagcagagatgatgccaagcctctgctgagactgaagggattcccttcctttcctctggtcgagagacaggccaacgaagtggactggtgggacatggtgtgtaacgtgaagaagctgatcaacgagaaaaaggaggatggcaaggtgttttggcagaatctggctggctacaagagacaggaagccctgagaccatacctgagcagcgaggaagatcggaagaagggaaagaaattcgctcggtaccagctgggcgacctgctgctgcacctggaaaagaagcacggcgaggactggggaaaggtgtacgacgaggcctgggagcggattgacaagaaagtggaaggcctgagcaagcacatcaagctggaagaggaacggagaagcgaggacgcccagagcaaggccgccctgaccgactggctgcgggctaaggccagcttcgtgatcgagggcctgaaggaggccgacaaggacgagttctgcagatgcgagctgaagctgcagaagtggtacggggacctgcggggaaagcccttcgccatcgaagccgagaacagcatcctggacatcagcggcttcagcaagcagtacaactgtgccttcatctggcagaaggacggcgtgaagaagctgaacctgtacctgatcatcaactacttcaagggcggcaagctgcggttcaagaagatcaaacctgaagccttcgaagccaacagattctacaccgtgatcaacaaaaagagcggcgagatcgtgcccatggaggtgaacttcaacttcgacgaccccaacctgatcatcctgcctctggcctttggcaagagacagggcagagaattcatctggaacgacctgctgtccctggaaaccggcagcctgaagctggccaacggaagagtgatcgagaagacactgtacaacagaagaacccggcaggatgagcctgccctgttcgtggccctgaccttcgagcggcgggaggtcctggactcctccaatatcaaaccaatgaacctgatcggcgtggcaagaggcgaaaacatccccgccgtgatcgccctgaccgaccccgagggctgcccactgagccggtttaaggatagcctgggaaacccaacccacatcctgagaatcggcgagagctataaggagaagcagcggaccatccaggccaagaaggaggtggagcagcggagagccggcggctacagccggaagtacgccagcaaagccaagaatctggcagacgatatggtgagaaacaccgctagagatctgctgtactacgccgtgacccaggatgccatgctgatcttcgccaacctgagccggggcttcggccggcagggcaagcggaccttcatggccgagagacagtacacacggatggaggactggctgaccgccaagctggcctacgagggcctgagcaagacctacctgtccaagacactggcccagtacacctccaagacatgcagcaactgtgggtttaccatcaccagcgccgactacgacagggtgctggagaagctgaagaagacagcaacaggctggatgaccacaattaacggcaaggagctgaaggtggagggccagattacctactacaacagatacaagagacagaacgtagtcaaggacctgtccgtcgagctggatagactgagcgaagaatctgtgaacaacgacatctcctcctggacaaagggcagaagcggagaagctctgagcctcctgaagaaaagattctcccatagacccgtgcaggagaagttcgtgtgcctgaactgcggcttcgagacacacgcagccgagcaagccgccctgaacatcgccagatcctggctgttcctgcggagccaggagtacaagaaataccagacaaacaagacaaccggcaacaccgataagagagccttcgtcgagacctggcagtccttttaccggaagaagcttaaggaggtgtggaaacctgccgtgcggtctggcggatctggcggaggctccagcaaggcccccgtgaccttcggcgacctggccatctacttcagccaggaggagtgggagtggctgagccccatccagaaggacctgtacgaggacgtgatgctggagaactacaggaacctggtgagcctgggcctgagcttcaggaggcccaacgtgatcaccctgctggagaagggcaaggccccctggatggtggagcccgtgaggaggaggagggcccccggctggaccaccatgatgggcggcccaagcagcggcgcccctcctcccagcggcggcagcccagccggctccccaacctctaccgaggagggcacctctgagtccgccacccccgagagcggccctggcacctccaccgagcccagcgagggcagcgcacccggcagccctgccggcagccccacctccacagaggagggaaccagcaccgagcccagcgaaggcagcgccccaggcaccagcaccgagcctagtgagcaggagattaaacggatcaacaagatcagaagaagacttgtgaaagacagcaacaccaagaaggccggcaagacaggccccatgaaaaccctgctggttagagtgatgacacccgatctgagagagcggctggaaaacctgagaaagaagcctgaaaatatcccccagcccatcagcaatacatctagagccaacctgaataagctgctgaccgattacaccgaaatgaagaaggcgatcctgcatgtgtactgggaagagttccagaaggaccctgtgggcctgatgagccgggtggcccagcctgccagcaagaagatcgatcagaacaagctgaaacctgagatggacgagaagggcaacctgaccaccgccggctttgcctgctctcagtgtggccagcccctgttcgtgtacaagctggagcaggtgtctgagaagggcaaggcttacaccaactacttcggacggtgcaatgtggccgagcacgaaaagctgatcctgctggcccagctgaagcccgagaaggatagcgacgaagccgtgacatatagcctgggaaagtttgggcagagggccctggatttctacagcattcatgtgaccaaggagtccacccaccccgtgaagcccctggcccagatcgccggaaacagatacgcctccggacctgtgggaaaggccctgagcgacgcatgtatgggcacaatcgcctccttcctgtctaagtaccaggacatcatcatcgaacaccagaaggtggtgaagggcaaccagaagagactggagagcctgcgggagctggccggcaaggaaaacctggaataccctagcgtgaccctgccacctcagcctcacaccaaggagggcgttgatgcctacaacgaagtgatcgcccgggtgcgaatgtgggtgaacctgaacctgtggcagaagctgaagctaagcagagatgatgccaagcctctgctgagactgaagggattcccttcctttcctctggtcgagagacaggccaacgaagtggactggtgggacatggtgtgtaacgtgaagaagctgatcaacgagaaaaaggaggatggcaaggtgttttggcagaatctggctggctacaagagacaggaagccctgagaccatacctgagcagcgaggaagatcggaagaagggaaagaaattcgctcggtaccagctgggcgacctgctgctgcacctggaaaagaagcacggcgaggactggggaaaggtgtacgacgaggcctgggagcggattgacaagaaagtggaaggcctgagcaagcacatcaagctggaagaggaacggagaagcgaggacgcccagagcaaggccgccctgaccgactggctgcgggctaaggccagcttcgtgatcgagggcctgaaggaggccgacaaggacgagttctgcagatgcgagctgaagctgcagaagtggtacggggacctgcggggaaagcccttcgccatcgaagccgagaacagcatcctggacatcagcggcttcagcaagcagtacaactgtgccttcatctggcagaaggacggcgtgaagaagctgaacctgtacctgatcatcaactacttcaagggcggcaagctgcggttcaagaagatcaaacctgaagccttcgaagccaacagattctacaccgtgatcaacaaaaagagcggcgagatcgtgcccatggaggtgaacttcaacttcgacgaccccaacctgatcatcctgcctctggcctttggcaagagacagggcagagaattcatctggaacgacctgctgtccctggaaaccggcagcctgaagctggccaacggaagagtgatcgagaagacactgtacaacagaagaacccggcaggatgagcctgccctgttcgtggccctgaccttcgagcggcgggaggtcctggactcctccaatatcaaaccaatgaacctgatcggcgtggcaagaggcgaaaacatccccgccgtgatcgccctgaccgaccccgagggctgcccactgagccggtttaaggatagcctgggaaacccaacccacatcctgagaatcggcgagagctataaggagaagcagcggaccatccaggccaagaaggaggtggagcagcggagagccggcggctacagccggaagtacgccagcaaagccaagaatctggcagacgatatggtgagaaacaccgctagagatctgctgtactacgccgtgacccaggatgccatgctgatcttcgccaacctgagccggggcttcggccggcagggcaagcggaccttcatggccgagagacagtacacacggatggaggactggctgaccgccaagctggcctacgagggcctgagcaagacctacctgtccaagacactggcccagtacacctccaagacatgcagcaactgtgggtttaccatcaccagcgccgactacgacagggtgctggagaagctgaagaagacagcaacaggctggatgaccacaattaacggcaaggagctgaaggtggagggccagattacctactacaacagatacaagagacagaacgtagtcaaggacctgtccgtcgagctggatagactgagcgaagaatctgtgaacaacgacatctcctcctggacaaagggcagaagcggagaagctctgagcctcctgaagaaaagattctcccatagacccgtgcaggagaagttcgtgtgcctgaactgcggcttcgagacacacgcagccgagcaagccgccctgaacatcgccagatcctggctgttcctgcggagccaggagtacaagaaataccagacaaacaagacaaccggcaacaccgataagagagccttcgtcgagacctggcagtccttttaccggaagaagcttaaggaggtgtggaaacctgccgtgcggtctggcggatctggcggaggctcctagcaaggcccccgtgaccttcggcgacctggccatctacttcagccaggaggagtgggagtggctgagccccatccagaaggacctgtacgaggacgtgatgctggagaactacaggaacctggtgagcctgggcctgagcttcaggaggcccaacgtgatcaccctgctggagaagggcaaggccccctggatggtggagcccgtgaggaggaggagggcccccggctggaccaccatgatgggatctggctccggcagcggccccaagaaaaagagaaaagtctaagctgccttctgcggggcttgccttctggccatgcccttcttctctcccttgcacctgtacctcttggtctttgaataaagcctgagtaggaaggctagcaaaaaaaaaaaaaaaaaaaaaaaaaaaaaaaaaaaaaaaaaaaaaaaaaaaaaaaaaaaaaaaaaaaaaaaaaaaaaaaa

SEQ ID NO: 15375 - RNA, 9485 nt, synthetic construct
  source 1..9485: mol_type = other RNA
aggaaataagagagaaaagaagagtaagaagaaatataagagccaccatggcccctaagaagaagcgtaaagtgagccggatggaacgcctcgtctacgaggtgcggcagaagtgcagaaacatcgaggacatctgcatctcctgcggatctctgaacgtgaccctggagcacccactgttcatcggcggcatgtgccagaactgtaaaaactgttttctggagtgtgcctatcaatacgacgatgacggctaccagagctactgcaccatctgttgcggcggaagagaggtgctgatgtgtggaaataacaactgctgccggtgcttctgcgtggaatgcgtggacctgctggtgggccccggcgccgcccaggccgctattaaggaagatccttggaactgctacatgtgcggccacaagggcacatacggcctgctgagacggagagaggactggcctagcagactgcagatgttcttcgccaataaccacgaccaggagttcgacccccctaaggtgtaccctcccgtccccgccgagaagagaaagcccatccgggtcctgagcctgttcgatggcatcgccaccggtctgctggtgctgaaggacctgggcatccaggtggataggtacattgcctccgaggtgtgcgaggactccatcaccgtgggaatggtgcgtcatcagggcaagatcatgtacgtgggcgacgtgcggagcgtgacacagaagcatatccaggagtggggccctttcgacctggtgatcggcggcagcccttgcaatgacctgagcatcgtgaacccagcccggaagggcctgtacgagggaaccggcagactgttcttcgagttttacagactgctgcacgacgcccggcctaaggaaggcgacgaccggcccttcttttggctgttcgagaatgtggtggccatgggagtcagcgacaagcgggatattagccggttcctggagagcaaccccgtgatgatcgatgccaaggaagtgagcgccgcccaccgggccagatacttctggggcaatctgcctggcatgaacagacccctggccagcaccgtgaacgacaagctggagctgcaggagtgcctggagcacggccggatcgccaagttcagcaaggtgagaaccatcaccacccgaagcaacagcatcaaacaaggcaaggaccagcactttcctgtgttcatgaacgagaaggaggacatcctgtggtgtaccgagatggagagagtgttcgggttcccagtccactacacagatgtcagcaacatgtctagactggccagacagagactgctgggaagaagctggtccgtccctgtgatcagacacctgttcgcccctctgaaggagtacttcgcctgcgtgagcagcggcaacagcaacgccaacagccggggccccagcttctctagcggcctggtgccactgtccctgagagggagccacatgggccccatggagatctacaaaaccgtgagcgcctggaagcggcagcctgtgcgcgtgctgagcctgtttcggaatatcgataaagtcctgaaaagcctgggattcctggagagcggctctggctccggcggtggcaccctgaagtacgtggaggatgtgacaaacgtggtcagacgggatgtggagaagtggggccccttcgatctggtgtacggcagcacccaacccctgggcagctcttgtgaccggtgccctggctggtacatgtttcagttccaccggatcctgcagtacgccctgccgagacaggagtcccagcggccattcttttggattttcatggacaacttgctgctgaccgaggatgaccaggaaactaccactcggttcctgcagaccgaagccgtgaccctgcaggacgtgagaggccgggactaccagaacgccatgcgggtgtggtccaacatccctggactgaaaagcaagcacgcacctctgacccctaaagaagaggagtacctgcaggcccaggtgcggagcagaagcaagctggacgcccctaaggtggatctgctggtgaagaattgcctcctgcccctgagagagtacttcaagtatttcagccagaatagtctgcccctgggaggcagcggcggcggcgccctggtgacatttgaggacgtcgccgtgcggttcacccaggaggaatgggctctgctggatccttctcagaaaatcctgtaccgggacgtgatgagagagacataccggaatctgacctccgtgggcatcaactgggaatgttgggaccttgaagcctgcttcagaagcctgggaagaaacctgagagtgcaggtggtgaagagaaagtgcgagctgaccaacagcggcccctgcgccgagggcggcccaagcagcggcgcccctcctcccagcggcggcagcccagccggctccccaacctctaccgaggagggcacctctgagtccgccacccccgagagcggccctggcacctccaccgagcccagcgagggcagcgcacccggcagccctgccggcagccccacctccacagaggagggaaccagcaccgagcccagcgaaggcagcgccccaggcaccagcaccgagcctagtgagcaggagattaaacggatcaacaagatcagaagaagacttgtgaaagacagcaacaccaagaaggccggcaagacaggccccatgaaaaccctgctggttagagtgatgacacccgatctgagagagcggctggaaaacctgagaaagaagcctgaaaatatcccccagcccatcagcaatacatctagagccaacctgaataagctgctgaccgattacaccgaaatgaagaaggcgatcctgcatgtgtactgggaagagttccagaaggaccctgtgggcctgatgagccgggtggcccagcctgccagcaagaagatcgatcagaacaagctgaaacctgagatggacgagaagggcaacctgaccaccgccggctttgcctgctctcagtgtggccagcccctgttcgtgtacaagctggagcaggtgtctgagaagggcaaggcttacaccaactacttcggacggtgcaatgtggccgagcacgaaaagctgatcctgctggcccagctgaagcccgagaaggatagcgacgaagccgtgacatatagcctgggaaagtttgggcagagggccctggatttctacagcattcatgtgaccaaggagtccacccaccccgtgaagcccctggcccagatcgccggaaacagatacgcctccggacctgtgggaaaggccctgagcgacgcatgtatgggcacaatcgcctccttcctgtctaagtaccaggacatcatcatcgaacaccagaaggtggtgaagggcaaccagaagagactggagagcctgcgggagctggccggcaaggaaaacctggaataccctagcgtgaccctgccacctcagcctcacaccaaggagggcgttgatgcctacaacgaagtgatcgcccgggtgcgaatgtgggtgaacctgaacctgtggcagaagctgaagctaagcagagatgatgccaagcctctgctgagactgaagggattcccttcctttcctctggtcgagagacaggccaacgaagtggactggtgggacatggtgtgtaacgtgaagaagctgatcaacgagaaaaaggaggatggcaaggtgttttggcagaatctggctggctacaagagacaggaagccctgagaccatacctgagcagcgaggaagatcggaagaagggaaagaaattcgctcggtaccagctgggcgacctgctgctgcacctggaaaagaagcacggcgaggactggggaaaggtgtacgacgaggcctgggagcggattgacaagaaagtggaaggcctgagcaagcacatcaagctggaagaggaacggagaagcgaggacgcccagagcaaggccgccctgaccgactggctgcgggctaaggccagcttcgtgatcgagggcctgaaggaggccgacaaggacgagttctgcagatgcgagctgaagctgcagaagtggtacggggacctgcggggaaagcccttcgccatcgaagccgagaacagcatcctggacatcagcggcttcagcaagcagtacaactgtgccttcatctggcagaaggacggcgtgaagaagctgaacctgtacctgatcatcaactacttcaagggcggcaagctgcggttcaagaagatcaaacctgaagccttcgaagccaacagattctacaccgtgatcaacaaaaagagcggcgagatcgtgcccatggaggtgaacttcaacttcgacgaccccaacctgatcatcctgcctctggcctttggcaagagacagggcagagaattcatctggaacgacctgctgtccctggaaaccggcagcctgaagctggccaacggaagagtgatcgagaagacactgtacaacagaagaacccggcaggatgagcctgccctgttcgtggccctgaccttcgagcggcgggaggtcctggactcctccaatatcaaaccaatgaacctgatcggcgtggcaagaggcgaaaacatccccgccgtgatcgccctgaccgaccccgagggctgcccactgagccggtttaaggatagcctgggaaacccaacccacatcctgagaatcggcgagagctataaggagaagcagcggaccatccaggccaagaaggaggtggagcagcggagagccggcggctacagccggaagtacgccagcaaagccaagaatctggcagacgatatggtgagaaacaccgctagagatctgctgtactacgccgtgacccaggatgccatgctgatcttcgccaacctgagccggggcttcggccggcagggcaagcggaccttcatggccgagagacagtacacacggatggaggactggctgaccgccaagctggcctacgagggcctgagcaagacctacctgtccaagacactggcccagtacacctccaagacatgcagcaactgtgggtttaccatcaccagcgccgactacgacagggtgctggagaagctgaagaagacagcaacaggctggatgaccacaattaacggcaaggagctgaaggtggagggccagattacctactacaacagatacaagagacagaacgtagtcaaggacctgtccgtcgagctggatagactgagcgaagaatctgtgaacaacgacatctcctcctggacaaagggcagaagcggagaagctctgagcctcctgaagaaaagattctcccatagacccgtgcaggagaagttcgtgtgcctgaactgcggcttcgagacacacgcagccgagcaagccgccctgaacatcgccagatcctggctgttcctgcggagccaggagtacaagaaataccagacaaacaagacaaccggcaacaccgataagagagccttcgtcgagacctggcagtccttttaccggaagaagcttaaggaggtgtggaaacctgccgtgcggtctggcggatctggcggaggctccttccaggaggccgtgaccttcaaggacgtggccgtggtgttcaccgaggaggagctgggcctgctggaccccccccagaggaagctgtacagggaggtgatgctggagaacttcaggaacctggtgagcgtgggccacagcagcagcaagcccgacgtgatcagccagctggagagggaggagaagctgtgcgtgaaggagatccacacccagaggggcaggcacagcggcggcaggaaccagggcggcccaagcagcggcgcccctcctcccagcggcggcagcccagccggctccccaacctctaccgaggagggcacctctgagtccgccacccccgagagcggccctggcacctccaccgagcccagcgagggcagcgcacccggcagccctgccggcagccccacctccacagaggagggaaccagcaccgagcccagcgaaggcagcgccccaggcaccagcaccgagcctagtgagcaggagattaaacggatcaacaagatcagaagaagacttgtgaaagacagcaacaccaagaaggccggcaagacaggccccatgaaaaccctgctggttagagtgatgacacccgatctgagagagcggctggaaaacctgagaaagaagcctgaaaatatcccccagcccatcagcaatacatctagagccaacctgaataagctgctgaccgattacaccgaaatgaagaaggcgatcctgcatgtgtactgggaagagttccagaaggaccctgtgggcctgatgagccgggtggcccagcctgccagcaagaagatcgatcagaacaagctgaaacctgagatggacgagaagggcaacctgaccaccgccggctttgcctgctctcagtgtggccagcccctgttcgtgtacaagctggagcaggtgtctgagaagggcaaggcttacaccaactacttcggacggtgcaatgtggccgagcacgaaaagctgatcctgctggcccagctgaagcccgagaaggatagcgacgaagccgtgacatatagcctgggaaagtttgggcagagggccctggatttctacagcattcatgtgaccaaggagtccacccaccccgtgaagcccctggcccagatcgccggaaacagatacgcctccggacctgtgggaaaggccctgagcgacgcatgtatgggcacaatcgcctccttcctgtctaagtaccaggacatcatcatcgaacaccagaaggtggtgaagggcaaccagaagagactggagagcctgcgggagctggccggcaaggaaaacctggaataccctagcgtgaccctgccacctcagcctcacaccaaggagggcgttgatgcctacaacgaagtgatcgcccgggtgcgaatgtgggtgaacctgaacctgtggcagaagctgaagctaagcagagatgatgccaagcctctgctgagactgaagggattcccttcctttcctctggtcgagagacaggccaacgaagtggactggtgggacatggtgtgtaacgtgaagaagctgatcaacgagaaaaaggaggatggcaaggtgttttggcagaatctggctggctacaagagacaggaagccctgagaccatacctgagcagcgaggaagatcggaagaagggaaagaaattcgctcggtaccagctgggcgacctgctgctgcacctggaaaagaagcacggcgaggactggggaaaggtgtacgacgaggcctgggagcggattgacaagaaagtggaaggcctgagcaagcacatcaagctggaagaggaacggagaagcgaggacgcccagagcaaggccgccctgaccgactggctgcgggctaaggccagcttcgtgatcgagggcctgaaggaggccgacaaggacgagttctgcagatgcgagctgaagctgcagaagtggtacggggacctgcggggaaagcccttcgccatcgaagccgagaacagcatcctggacatcagcggcttcagcaagcagtacaactgtgccttcatctggcagaaggacggcgtgaagaagctgaacctgtacctgatcatcaactacttcaagggcggcaagctgcggttcaagaagatcaaacctgaagccttcgaagccaacagattctacaccgtgatcaacaaaaagagcggcgagatcgtgcccatggaggtgaacttcaacttcgacgaccccaacctgatcatcctgcctctggcctttggcaagagacagggcagagaattcatctggaacgacctgctgtccctggaaaccggcagcctgaagctggccaacggaagagtgatcgagaagacactgtacaacagaagaacccggcaggatgagcctgccctgttcgtggccctgaccttcgagcggcgggaggtcctggactcctccaatatcaaaccaatgaacctgatcggcgtggcaagaggcgaaaacatccccgccgtgatcgccctgaccgaccccgagggctgcccactgagccggtttaaggatagcctgggaaacccaacccacatcctgagaatcggcgagagctataaggagaagcagcggaccatccaggccaagaaggaggtggagcagcggagagccggcggctacagccggaagtacgccagcaaagccaagaatctggcagacgatatggtgagaaacaccgctagagatctgctgtactacgccgtgacccaggatgccatgctgatcttcgccaacctgagccggggcttcggccggcagggcaagcggaccttcatggccgagagacagtacacacggatggaggactggctgaccgccaagctggcctacgagggcctgagcaagacctacctgtccaagacactggcccagtacacctccaagacatgcagcaactgtgggtttaccatcaccagcgccgactacgacagggtgctggagaagctgaagaagacagcaacaggctggatgaccacaattaacggcaaggagctgaaggtggagggccagattacctactacaacagatacaagagacagaacgtagtcaaggacctgtccgtcgagctggatagactgagcgaagaatctgtgaacaacgacatctcctcctggacaaagggcagaagcggagaagctctgagcctcctgaagaaaagattctcccatagacccgtgcaggagaagttcgtgtgcctgaactgcggcttcgagacacacgcagccgagcaagccgccctgaacatcgccagatcctggctgttcctgcggagccaggagtacaagaaataccagacaaacaagacaaccggcaacaccgataagagagccttcgtcgagacctggcagtccttttaccggaagaagcttaaggaggtgtggaaacctgccgtgcggtctggcggatctggcggaggctcctttccaggaggccgtgaccttcaaggacgtggccgtggtgttcaccgaggaggagctgggcctgctggaccccccccagaggaagctgtacagggaggtgatgctggagaacttcaggaacctggtgagcgtgggccacagcagcagcaagcccgacgtgatcagccagctggagagggaggagaagctgtgcgtgaaggagatccacacccagaggggcaggcacagcggcggcaggaaccagggatctggctccggcagcggccccaagaaaaagagaaaagtctaagctgccttctgcggggcttgccttctggccatgcccttcttctctcccttgcacctgtacctcttggtctttgaataaagcctgagtaggaaggctagcaaaaaaaaaaaaaaaaaaaaaaaaaaaaaaaaaaaaaaaaaaaaaaaaaaaaaaaaaaaaaaaaaaaaaaaaaaaaaaaa

SEQ ID NO: 15376 - RNA, 9485 nt, synthetic construct
  source 1..9485: mol_type = other RNA
aggaaataagagagaaaagaagagtaagaagaaatataagagccaccatggcccctaagaagaagcgtaaagtgagccggatggaacgcctcgtctacgaggtgcggcagaagtgcagaaacatcgaggacatctgcatctcctgcggatctctgaacgtgaccctggagcacccactgttcatcggcggcatgtgccagaactgtaaaaactgttttctggagtgtgcctatcaatacgacgatgacggctaccagagctactgcaccatctgttgcggcggaagagaggtgctgatgtgtggaaataacaactgctgccggtgcttctgcgtggaatgcgtggacctgctggtgggccccggcgccgcccaggccgctattaaggaagatccttggaactgctacatgtgcggccacaagggcacatacggcctgctgagacggagagaggactggcctagcagactgcagatgttcttcgccaataaccacgaccaggagttcgacccccctaaggtgtaccctcccgtccccgccgagaagagaaagcccatccgggtcctgagcctgttcgatggcatcgccaccggtctgctggtgctgaaggacctgggcatccaggtggataggtacattgcctccgaggtgtgcgaggactccatcaccgtgggaatggtgcgtcatcagggcaagatcatgtacgtgggcgacgtgcggagcgtgacacagaagcatatccaggagtggggccctttcgacctggtgatcggcggcagcccttgcaatgacctgagcatcgtgaacccagcccggaagggcctgtacgagggaaccggcagactgttcttcgagttttacagactgctgcacgacgcccggcctaaggaaggcgacgaccggcccttcttttggctgttcgagaatgtggtggccatgggagtcagcgacaagcgggatattagccggttcctggagagcaaccccgtgatgatcgatgccaaggaagtgagcgccgcccaccgggccagatacttctggggcaatctgcctggcatgaacagacccctggccagcaccgtgaacgacaagctggagctgcaggagtgcctggagcacggccggatcgccaagttcagcaaggtgagaaccatcaccacccgaagcaacagcatcaaacaaggcaaggaccagcactttcctgtgttcatgaacgagaaggaggacatcctgtggtgtaccgagatggagagagtgttcgggttcccagtccactacacagatgtcagcaacatgtctagactggccagacagagactgctgggaagaagctggtccgtccctgtgatcagacacctgttcgcccctctgaaggagtacttcgcctgcgtgagcagcggcaacagcaacgccaacagccggggccccagcttctctagcggcctggtgccactgtccctgagagggagccacatgggccccatggagatctacaaaaccgtgagcgcctggaagcggcagcctgtgcgcgtgctgagcctgtttcggaatatcgataaagtcctgaaaagcctgggattcctggagagcggctctggctccggcggtggcaccctgaagtacgtggaggatgtgacaaacgtggtcagacgggatgtggagaagtggggccccttcgatctggtgtacggcagcacccaacccctgggcagctcttgtgaccggtgccctggctggtacatgtttcagttccaccggatcctgcagtacgccctgccgagacaggagtcccagcggccattcttttggattttcatggacaacttgctgctgaccgaggatgaccaggaaactaccactcggttcctgcagaccgaagccgtgaccctgcaggacgtgagaggccgggactaccagaacgccatgcgggtgtggtccaacatccctggactgaaaagcaagcacgcacctctgacccctaaagaagaggagtacctgcaggcccaggtgcggagcagaagcaagctggacgcccctaaggtggatctgctggtgaagaattgcctcctgcccctgagagagtacttcaagtatttcagccagaatagtctgcccctgggaggcagcggcggcggcgccctggtgacatttgaggacgtcgccgtgcggttcacccaggaggaatgggctctgctggatccttctcagaaaatcctgtaccgggacgtgatgagagagacataccggaatctgacctccgtgggcatcaactgggaatgttgggaccttgaagcctgcttcagaagcctgggaagaaacctgagagtgcaggtggtgaagagaaagtgcgagctgaccaacagcggcccctgcgccgagggcggcccaagcagcggcgcccctcctcccagcggcggcagcccagccggctccccaacctctaccgaggagggcacctctgagtccgccacccccgagagcggccctggcacctccaccgagcccagcgagggcagcgcacccggcagccctgccggcagccccacctccacagaggagggaaccagcaccgagcccagcgaaggcagcgccccaggcaccagcaccgagcctagtgagcaggagattaaacggatcaacaagatcagaagaagacttgtgaaagacagcaacaccaagaaggccggcaagacaggccccatgaaaaccctgctggttagagtgatgacacccgatctgagagagcggctggaaaacctgagaaagaagcctgaaaatatcccccagcccatcagcaatacatctagagccaacctgaataagctgctgaccgattacaccgaaatgaagaaggcgatcctgcatgtgtactgggaagagttccagaaggaccctgtgggcctgatgagccgggtggcccagcctgccagcaagaagatcgatcagaacaagctgaaacctgagatggacgagaagggcaacctgaccaccgccggctttgcctgctctcagtgtggccagcccctgttcgtgtacaagctggagcaggtgtctgagaagggcaaggcttacaccaactacttcggacggtgcaatgtggccgagcacgaaaagctgatcctgctggcccagctgaagcccgagaaggatagcgacgaagccgtgacatatagcctgggaaagtttgggcagagggccctggatttctacagcattcatgtgaccaaggagtccacccaccccgtgaagcccctggcccagatcgccggaaacagatacgcctccggacctgtgggaaaggccctgagcgacgcatgtatgggcacaatcgcctccttcctgtctaagtaccaggacatcatcatcgaacaccagaaggtggtgaagggcaaccagaagagactggagagcctgcgggagctggccggcaaggaaaacctggaataccctagcgtgaccctgccacctcagcctcacaccaaggagggcgttgatgcctacaacgaagtgatcgcccgggtgcgaatgtgggtgaacctgaacctgtggcagaagctgaagctaagcagagatgatgccaagcctctgctgagactgaagggattcccttcctttcctctggtcgagagacaggccaacgaagtggactggtgggacatggtgtgtaacgtgaagaagctgatcaacgagaaaaaggaggatggcaaggtgttttggcagaatctggctggctacaagagacaggaagccctgagaccatacctgagcagcgaggaagatcggaagaagggaaagaaattcgctcggtaccagctgggcgacctgctgctgcacctggaaaagaagcacggcgaggactggggaaaggtgtacgacgaggcctgggagcggattgacaagaaagtggaaggcctgagcaagcacatcaagctggaagaggaacggagaagcgaggacgcccagagcaaggccgccctgaccgactggctgcgggctaaggccagcttcgtgatcgagggcctgaaggaggccgacaaggacgagttctgcagatgcgagctgaagctgcagaagtggtacggggacctgcggggaaagcccttcgccatcgaagccgagaacagcatcctggacatcagcggcttcagcaagcagtacaactgtgccttcatctggcagaaggacggcgtgaagaagctgaacctgtacctgatcatcaactacttcaagggcggcaagctgcggttcaagaagatcaaacctgaagccttcgaagccaacagattctacaccgtgatcaacaaaaagagcggcgagatcgtgcccatggaggtgaacttcaacttcgacgaccccaacctgatcatcctgcctctggcctttggcaagagacagggcagagaattcatctggaacgacctgctgtccctggaaaccggcagcctgaagctggccaacggaagagtgatcgagaagacactgtacaacagaagaacccggcaggatgagcctgccctgttcgtggccctgaccttcgagcggcgggaggtcctggactcctccaatatcaaaccaatgaacctgatcggcgtggcaagaggcgaaaacatccccgccgtgatcgccctgaccgaccccgagggctgcccactgagccggtttaaggatagcctgggaaacccaacccacatcctgagaatcggcgagagctataaggagaagcagcggaccatccaggccaagaaggaggtggagcagcggagagccggcggctacagccggaagtacgccagcaaagccaagaatctggcagacgatatggtgagaaacaccgctagagatctgctgtactacgccgtgacccaggatgccatgctgatcttcgccaacctgagccggggcttcggccggcagggcaagcggaccttcatggccgagagacagtacacacggatggaggactggctgaccgccaagctggcctacgagggcctgagcaagacctacctgtccaagacactggcccagtacacctccaagacatgcagcaactgtgggtttaccatcaccagcgccgactacgacagggtgctggagaagctgaagaagacagcaacaggctggatgaccacaattaacggcaaggagctgaaggtggagggccagattacctactacaacagatacaagagacagaacgtagtcaaggacctgtccgtcgagctggatagactgagcgaagaatctgtgaacaacgacatctcctcctggacaaagggcagaagcggagaagctctgagcctcctgaagaaaagattctcccatagacccgtgcaggagaagttcgtgtgcctgaactgcggcttcgagacacacgcagccgagcaagccgccctgaacatcgccagatcctggctgttcctgcggagccaggagtacaagaaataccagacaaacaagacaaccggcaacaccgataagagagccttcgtcgagacctggcagtccttttaccggaagaagcttaaggaggtgtggaaacctgccgtgcggtctggcggatctggcggaggctccaggcaggccttcctggccttcggcgacgtgaccgtggacttcacccagaaggagtggaggctgctgagccccgcccagagggccctgtacagggaggtgaccctggagaactacagccacctggtgagcctgggcatcctgcacagcaagcccgagctgatcaggaggctggagcagggcgaggtgccctggggcgaggagaggaggaggaggcccggcccctgcgccggcatctacgccgagggcggcccaagcagcggcgcccctcctcccagcggcggcagcccagccggctccccaacctctaccgaggagggcacctctgagtccgccacccccgagagcggccctggcacctccaccgagcccagcgagggcagcgcacccggcagccctgccggcagccccacctccacagaggagggaaccagcaccgagcccagcgaaggcagcgccccaggcaccagcaccgagcctagtgagcaggagattaaacggatcaacaagatcagaagaagacttgtgaaagacagcaacaccaagaaggccggcaagacaggccccatgaaaaccctgctggttagagtgatgacacccgatctgagagagcggctggaaaacctgagaaagaagcctgaaaatatcccccagcccatcagcaatacatctagagccaacctgaataagctgctgaccgattacaccgaaatgaagaaggcgatcctgcatgtgtactgggaagagttccagaaggaccctgtgggcctgatgagccgggtggcccagcctgccagcaagaagatcgatcagaacaagctgaaacctgagatggacgagaagggcaacctgaccaccgccggctttgcctgctctcagtgtggccagcccctgttcgtgtacaagctggagcaggtgtctgagaagggcaaggcttacaccaactacttcggacggtgcaatgtggccgagcacgaaaagctgatcctgctggcccagctgaagcccgagaaggatagcgacgaagccgtgacatatagcctgggaaagtttgggcagagggccctggatttctacagcattcatgtgaccaaggagtccacccaccccgtgaagcccctggcccagatcgccggaaacagatacgcctccggacctgtgggaaaggccctgagcgacgcatgtatgggcacaatcgcctccttcctgtctaagtaccaggacatcatcatcgaacaccagaaggtggtgaagggcaaccagaagagactggagagcctgcgggagctggccggcaaggaaaacctggaataccctagcgtgaccctgccacctcagcctcacaccaaggagggcgttgatgcctacaacgaagtgatcgcccgggtgcgaatgtgggtgaacctgaacctgtggcagaagctgaagctaagcagagatgatgccaagcctctgctgagactgaagggattcccttcctttcctctggtcgagagacaggccaacgaagtggactggtgggacatggtgtgtaacgtgaagaagctgatcaacgagaaaaaggaggatggcaaggtgttttggcagaatctggctggctacaagagacaggaagccctgagaccatacctgagcagcgaggaagatcggaagaagggaaagaaattcgctcggtaccagctgggcgacctgctgctgcacctggaaaagaagcacggcgaggactggggaaaggtgtacgacgaggcctgggagcggattgacaagaaagtggaaggcctgagcaagcacatcaagctggaagaggaacggagaagcgaggacgcccagagcaaggccgccctgaccgactggctgcgggctaaggccagcttcgtgatcgagggcctgaaggaggccgacaaggacgagttctgcagatgcgagctgaagctgcagaagtggtacggggacctgcggggaaagcccttcgccatcgaagccgagaacagcatcctggacatcagcggcttcagcaagcagtacaactgtgccttcatctggcagaaggacggcgtgaagaagctgaacctgtacctgatcatcaactacttcaagggcggcaagctgcggttcaagaagatcaaacctgaagccttcgaagccaacagattctacaccgtgatcaacaaaaagagcggcgagatcgtgcccatggaggtgaacttcaacttcgacgaccccaacctgatcatcctgcctctggcctttggcaagagacagggcagagaattcatctggaacgacctgctgtccctggaaaccggcagcctgaagctggccaacggaagagtgatcgagaagacactgtacaacagaagaacccggcaggatgagcctgccctgttcgtggccctgaccttcgagcggcgggaggtcctggactcctccaatatcaaaccaatgaacctgatcggcgtggcaagaggcgaaaacatccccgccgtgatcgccctgaccgaccccgagggctgcccactgagccggtttaaggatagcctgggaaacccaacccacatcctgagaatcggcgagagctataaggagaagcagcggaccatccaggccaagaaggaggtggagcagcggagagccggcggctacagccggaagtacgccagcaaagccaagaatctggcagacgatatggtgagaaacaccgctagagatctgctgtactacgccgtgacccaggatgccatgctgatcttcgccaacctgagccggggcttcggccggcagggcaagcggaccttcatggccgagagacagtacacacggatggaggactggctgaccgccaagctggcctacgagggcctgagcaagacctacctgtccaagacactggcccagtacacctccaagacatgcagcaactgtgggtttaccatcaccagcgccgactacgacagggtgctggagaagctgaagaagacagcaacaggctggatgaccacaattaacggcaaggagctgaaggtggagggccagattacctactacaacagatacaagagacagaacgtagtcaaggacctgtccgtcgagctggatagactgagcgaagaatctgtgaacaacgacatctcctcctggacaaagggcagaagcggagaagctctgagcctcctgaagaaaagattctcccatagacccgtgcaggagaagttcgtgtgcctgaactgcggcttcgagacacacgcagccgagcaagccgccctgaacatcgccagatcctggctgttcctgcggagccaggagtacaagaaataccagacaaacaagacaaccggcaacaccgataagagagccttcgtcgagacctggcagtccttttaccggaagaagcttaaggaggtgtggaaacctgccgtgcggtctggcggatctggcggaggctcctaggcaggccttcctggccttcggcgacgtgaccgtggacttcacccagaaggagtggaggctgctgagccccgcccagagggccctgtacagggaggtgaccctggagaactacagccacctggtgagcctgggcatcctgcacagcaagcccgagctgatcaggaggctggagcagggcgaggtgccctggggcgaggagaggaggaggaggcccggcccctgcgccggcatctacgccgagggatctggctccggcagcggccccaagaaaaagagaaaagtctaagctgccttctgcggggcttgccttctggccatgcccttcttctctcccttgcacctgtacctcttggtctttgaataaagcctgagtaggaaggctagcaaaaaaaaaaaaaaaaaaaaaaaaaaaaaaaaaaaaaaaaaaaaaaaaaaaaaaaaaaaaaaaaaaaaaaaaaaaaaaaa

SEQ ID NO: 15377 - RNA, 9485 nt, synthetic construct
  source 1..9485: mol_type = other RNA
aggaaataagagagaaaagaagagtaagaagaaatataagagccaccatggcccctaagaagaagcgtaaagtgagccggatggaacgcctcgtctacgaggtgcggcagaagtgcagaaacatcgaggacatctgcatctcctgcggatctctgaacgtgaccctggagcacccactgttcatcggcggcatgtgccagaactgtaaaaactgttttctggagtgtgcctatcaatacgacgatgacggctaccagagctactgcaccatctgttgcggcggaagagaggtgctgatgtgtggaaataacaactgctgccggtgcttctgcgtggaatgcgtggacctgctggtgggccccggcgccgcccaggccgctattaaggaagatccttggaactgctacatgtgcggccacaagggcacatacggcctgctgagacggagagaggactggcctagcagactgcagatgttcttcgccaataaccacgaccaggagttcgacccccctaaggtgtaccctcccgtccccgccgagaagagaaagcccatccgggtcctgagcctgttcgatggcatcgccaccggtctgctggtgctgaaggacctgggcatccaggtggataggtacattgcctccgaggtgtgcgaggactccatcaccgtgggaatggtgcgtcatcagggcaagatcatgtacgtgggcgacgtgcggagcgtgacacagaagcatatccaggagtggggccctttcgacctggtgatcggcggcagcccttgcaatgacctgagcatcgtgaacccagcccggaagggcctgtacgagggaaccggcagactgttcttcgagttttacagactgctgcacgacgcccggcctaaggaaggcgacgaccggcccttcttttggctgttcgagaatgtggtggccatgggagtcagcgacaagcgggatattagccggttcctggagagcaaccccgtgatgatcgatgccaaggaagtgagcgccgcccaccgggccagatacttctggggcaatctgcctggcatgaacagacccctggccagcaccgtgaacgacaagctggagctgcaggagtgcctggagcacggccggatcgccaagttcagcaaggtgagaaccatcaccacccgaagcaacagcatcaaacaaggcaaggaccagcactttcctgtgttcatgaacgagaaggaggacatcctgtggtgtaccgagatggagagagtgttcgggttcccagtccactacacagatgtcagcaacatgtctagactggccagacagagactgctgggaagaagctggtccgtccctgtgatcagacacctgttcgcccctctgaaggagtacttcgcctgcgtgagcagcggcaacagcaacgccaacagccggggccccagcttctctagcggcctggtgccactgtccctgagagggagccacatgggccccatggagatctacaaaaccgtgagcgcctggaagcggcagcctgtgcgcgtgctgagcctgtttcggaatatcgataaagtcctgaaaagcctgggattcctggagagcggctctggctccggcggtggcaccctgaagtacgtggaggatgtgacaaacgtggtcagacgggatgtggagaagtggggccccttcgatctggtgtacggcagcacccaacccctgggcagctcttgtgaccggtgccctggctggtacatgtttcagttccaccggatcctgcagtacgccctgccgagacaggagtcccagcggccattcttttggattttcatggacaacttgctgctgaccgaggatgaccaggaaactaccactcggttcctgcagaccgaagccgtgaccctgcaggacgtgagaggccgggactaccagaacgccatgcgggtgtggtccaacatccctggactgaaaagcaagcacgcacctctgacccctaaagaagaggagtacctgcaggcccaggtgcggagcagaagcaagctggacgcccctaaggtggatctgctggtgaagaattgcctcctgcccctgagagagtacttcaagtatttcagccagaatagtctgcccctgggaggcagcggcggcggcgccctggtgacatttgaggacgtcgccgtgcggttcacccaggaggaatgggctctgctggatccttctcagaaaatcctgtaccgggacgtgatgagagagacataccggaatctgacctccgtgggcatcaactgggaatgttgggaccttgaagcctgcttcagaagcctgggaagaaacctgagagtgcaggtggtgaagagaaagtgcgagctgaccaacagcggcccctgcgccgagggcggcccaagcagcggcgcccctcctcccagcggcggcagcccagccggctccccaacctctaccgaggagggcacctctgagtccgccacccccgagagcggccctggcacctccaccgagcccagcgagggcagcgcacccggcagccctgccggcagccccacctccacagaggagggaaccagcaccgagcccagcgaaggcagcgccccaggcaccagcaccgagcctagtgagcaggagattaaacggatcaacaagatcagaagaagacttgtgaaagacagcaacaccaagaaggccggcaagacaggccccatgaaaaccctgctggttagagtgatgacacccgatctgagagagcggctggaaaacctgagaaagaagcctgaaaatatcccccagcccatcagcaatacatctagagccaacctgaataagctgctgaccgattacaccgaaatgaagaaggcgatcctgcatgtgtactgggaagagttccagaaggaccctgtgggcctgatgagccgggtggcccagcctgccagcaagaagatcgatcagaacaagctgaaacctgagatggacgagaagggcaacctgaccaccgccggctttgcctgctctcagtgtggccagcccctgttcgtgtacaagctggagcaggtgtctgagaagggcaaggcttacaccaactacttcggacggtgcaatgtggccgagcacgaaaagctgatcctgctggcccagctgaagcccgagaaggatagcgacgaagccgtgacatatagcctgggaaagtttgggcagagggccctggatttctacagcattcatgtgaccaaggagtccacccaccccgtgaagcccctggcccagatcgccggaaacagatacgcctccggacctgtgggaaaggccctgagcgacgcatgtatgggcacaatcgcctccttcctgtctaagtaccaggacatcatcatcgaacaccagaaggtggtgaagggcaaccagaagagactggagagcctgcgggagctggccggcaaggaaaacctggaataccctagcgtgaccctgccacctcagcctcacaccaaggagggcgttgatgcctacaacgaagtgatcgcccgggtgcgaatgtgggtgaacctgaacctgtggcagaagctgaagctaagcagagatgatgccaagcctctgctgagactgaagggattcccttcctttcctctggtcgagagacaggccaacgaagtggactggtgggacatggtgtgtaacgtgaagaagctgatcaacgagaaaaaggaggatggcaaggtgttttggcagaatctggctggctacaagagacaggaagccctgagaccatacctgagcagcgaggaagatcggaagaagggaaagaaattcgctcggtaccagctgggcgacctgctgctgcacctggaaaagaagcacggcgaggactggggaaaggtgtacgacgaggcctgggagcggattgacaagaaagtggaaggcctgagcaagcacatcaagctggaagaggaacggagaagcgaggacgcccagagcaaggccgccctgaccgactggctgcgggctaaggccagcttcgtgatcgagggcctgaaggaggccgacaaggacgagttctgcagatgcgagctgaagctgcagaagtggtacggggacctgcggggaaagcccttcgccatcgaagccgagaacagcatcctggacatcagcggcttcagcaagcagtacaactgtgccttcatctggcagaaggacggcgtgaagaagctgaacctgtacctgatcatcaactacttcaagggcggcaagctgcggttcaagaagatcaaacctgaagccttcgaagccaacagattctacaccgtgatcaacaaaaagagcggcgagatcgtgcccatggaggtgaacttcaacttcgacgaccccaacctgatcatcctgcctctggcctttggcaagagacagggcagagaattcatctggaacgacctgctgtccctggaaaccggcagcctgaagctggccaacggaagagtgatcgagaagacactgtacaacagaagaacccggcaggatgagcctgccctgttcgtggccctgaccttcgagcggcgggaggtcctggactcctccaatatcaaaccaatgaacctgatcggcgtggcaagaggcgaaaacatccccgccgtgatcgccctgaccgaccccgagggctgcccactgagccggtttaaggatagcctgggaaacccaacccacatcctgagaatcggcgagagctataaggagaagcagcggaccatccaggccaagaaggaggtggagcagcggagagccggcggctacagccggaagtacgccagcaaagccaagaatctggcagacgatatggtgagaaacaccgctagagatctgctgtactacgccgtgacccaggatgccatgctgatcttcgccaacctgagccggggcttcggccggcagggcaagcggaccttcatggccgagagacagtacacacggatggaggactggctgaccgccaagctggcctacgagggcctgagcaagacctacctgtccaagacactggcccagtacacctccaagacatgcagcaactgtgggtttaccatcaccagcgccgactacgacagggtgctggagaagctgaagaagacagcaacaggctggatgaccacaattaacggcaaggagctgaaggtggagggccagattacctactacaacagatacaagagacagaacgtagtcaaggacctgtccgtcgagctggatagactgagcgaagaatctgtgaacaacgacatctcctcctggacaaagggcagaagcggagaagctctgagcctcctgaagaaaagattctcccatagacccgtgcaggagaagttcgtgtgcctgaactgcggcttcgagacacacgcagccgagcaagccgccctgaacatcgccagatcctggctgttcctgcggagccaggagtacaagaaataccagacaaacaagacaaccggcaacaccgataagagagccttcgtcgagacctggcagtccttttaccggaagaagcttaaggaggtgtggaaacctgccgtgcggtctggcggatctggcggaggctccccccaggagagcgtgaccttcaaggacgtggccgtggacttcacctgggaggagtggggctacctggacaccagccagaaggagctgtaccaggaggtgatgctggagaactacaggaacctggtgagcctgggcttcgtggtggccaagcccgacgtgatcagccagctggagcagggcgaggccccctggaggcccgagggcaggttccccaggagcaggcaccccgacagcgacaccaggggcggcccaagcagcggcgcccctcctcccagcggcggcagcccagccggctccccaacctctaccgaggagggcacctctgagtccgccacccccgagagcggccctggcacctccaccgagcccagcgagggcagcgcacccggcagccctgccggcagccccacctccacagaggagggaaccagcaccgagcccagcgaaggcagcgccccaggcaccagcaccgagcctagtgagcaggagattaaacggatcaacaagatcagaagaagacttgtgaaagacagcaacaccaagaaggccggcaagacaggccccatgaaaaccctgctggttagagtgatgacacccgatctgagagagcggctggaaaacctgagaaagaagcctgaaaatatcccccagcccatcagcaatacatctagagccaacctgaataagctgctgaccgattacaccgaaatgaagaaggcgatcctgcatgtgtactgggaagagttccagaaggaccctgtgggcctgatgagccgggtggcccagcctgccagcaagaagatcgatcagaacaagctgaaacctgagatggacgagaagggcaacctgaccaccgccggctttgcctgctctcagtgtggccagcccctgttcgtgtacaagctggagcaggtgtctgagaagggcaaggcttacaccaactacttcggacggtgcaatgtggccgagcacgaaaagctgatcctgctggcccagctgaagcccgagaaggatagcgacgaagccgtgacatatagcctgggaaagtttgggcagagggccctggatttctacagcattcatgtgaccaaggagtccacccaccccgtgaagcccctggcccagatcgccggaaacagatacgcctccggacctgtgggaaaggccctgagcgacgcatgtatgggcacaatcgcctccttcctgtctaagtaccaggacatcatcatcgaacaccagaaggtggtgaagggcaaccagaagagactggagagcctgcgggagctggccggcaaggaaaacctggaataccctagcgtgaccctgccacctcagcctcacaccaaggagggcgttgatgcctacaacgaagtgatcgcccgggtgcgaatgtgggtgaacctgaacctgtggcagaagctgaagctaagcagagatgatgccaagcctctgctgagactgaagggattcccttcctttcctctggtcgagagacaggccaacgaagtggactggtgggacatggtgtgtaacgtgaagaagctgatcaacgagaaaaaggaggatggcaaggtgttttggcagaatctggctggctacaagagacaggaagccctgagaccatacctgagcagcgaggaagatcggaagaagggaaagaaattcgctcggtaccagctgggcgacctgctgctgcacctggaaaagaagcacggcgaggactggggaaaggtgtacgacgaggcctgggagcggattgacaagaaagtggaaggcctgagcaagcacatcaagctggaagaggaacggagaagcgaggacgcccagagcaaggccgccctgaccgactggctgcgggctaaggccagcttcgtgatcgagggcctgaaggaggccgacaaggacgagttctgcagatgcgagctgaagctgcagaagtggtacggggacctgcggggaaagcccttcgccatcgaagccgagaacagcatcctggacatcagcggcttcagcaagcagtacaactgtgccttcatctggcagaaggacggcgtgaagaagctgaacctgtacctgatcatcaactacttcaagggcggcaagctgcggttcaagaagatcaaacctgaagccttcgaagccaacagattctacaccgtgatcaacaaaaagagcggcgagatcgtgcccatggaggtgaacttcaacttcgacgaccccaacctgatcatcctgcctctggcctttggcaagagacagggcagagaattcatctggaacgacctgctgtccctggaaaccggcagcctgaagctggccaacggaagagtgatcgagaagacactgtacaacagaagaacccggcaggatgagcctgccctgttcgtggccctgaccttcgagcggcgggaggtcctggactcctccaatatcaaaccaatgaacctgatcggcgtggcaagaggcgaaaacatccccgccgtgatcgccctgaccgaccccgagggctgcccactgagccggtttaaggatagcctgggaaacccaacccacatcctgagaatcggcgagagctataaggagaagcagcggaccatccaggccaagaaggaggtggagcagcggagagccggcggctacagccggaagtacgccagcaaagccaagaatctggcagacgatatggtgagaaacaccgctagagatctgctgtactacgccgtgacccaggatgccatgctgatcttcgccaacctgagccggggcttcggccggcagggcaagcggaccttcatggccgagagacagtacacacggatggaggactggctgaccgccaagctggcctacgagggcctgagcaagacctacctgtccaagacactggcccagtacacctccaagacatgcagcaactgtgggtttaccatcaccagcgccgactacgacagggtgctggagaagctgaagaagacagcaacaggctggatgaccacaattaacggcaaggagctgaaggtggagggccagattacctactacaacagatacaagagacagaacgtagtcaaggacctgtccgtcgagctggatagactgagcgaagaatctgtgaacaacgacatctcctcctggacaaagggcagaagcggagaagctctgagcctcctgaagaaaagattctcccatagacccgtgcaggagaagttcgtgtgcctgaactgcggcttcgagacacacgcagccgagcaagccgccctgaacatcgccagatcctggctgttcctgcggagccaggagtacaagaaataccagacaaacaagacaaccggcaacaccgataagagagccttcgtcgagacctggcagtccttttaccggaagaagcttaaggaggtgtggaaacctgccgtgcggtctggcggatctggcggaggctcctccccaggagagcgtgaccttcaaggacgtggccgtggacttcacctgggaggagtggggctacctggacaccagccagaaggagctgtaccaggaggtgatgctggagaactacaggaacctggtgagcctgggcttcgtggtggccaagcccgacgtgatcagccagctggagcagggcgaggccccctggaggcccgagggcaggttccccaggagcaggcaccccgacagcgacaccaggggatctggctccggcagcggccccaagaaaaagagaaaagtctaagctgccttctgcggggcttgccttctggccatgcccttcttctctcccttgcacctgtacctcttggtctttgaataaagcctgagtaggaaggctagcaaaaaaaaaaaaaaaaaaaaaaaaaaaaaaaaaaaaaaaaaaaaaaaaaaaaaaaaaaaaaaaaaaaaaaaaaaaaaaaa

SEQ ID NO: 15378 - RNA, 9485 nt, synthetic construct
  source 1..9485: mol_type = other RNA
aggaaataagagagaaaagaagagtaagaagaaatataagagccaccatggcccctaagaagaagcgtaaagtgagccggatggaacgcctcgtctacgaggtgcggcagaagtgcagaaacatcgaggacatctgcatctcctgcggatctctgaacgtgaccctggagcacccactgttcatcggcggcatgtgccagaactgtaaaaactgttttctggagtgtgcctatcaatacgacgatgacggctaccagagctactgcaccatctgttgcggcggaagagaggtgctgatgtgtggaaataacaactgctgccggtgcttctgcgtggaatgcgtggacctgctggtgggccccggcgccgcccaggccgctattaaggaagatccttggaactgctacatgtgcggccacaagggcacatacggcctgctgagacggagagaggactggcctagcagactgcagatgttcttcgccaataaccacgaccaggagttcgacccccctaaggtgtaccctcccgtccccgccgagaagagaaagcccatccgggtcctgagcctgttcgatggcatcgccaccggtctgctggtgctgaaggacctgggcatccaggtggataggtacattgcctccgaggtgtgcgaggactccatcaccgtgggaatggtgcgtcatcagggcaagatcatgtacgtgggcgacgtgcggagcgtgacacagaagcatatccaggagtggggccctttcgacctggtgatcggcggcagcccttgcaatgacctgagcatcgtgaacccagcccggaagggcctgtacgagggaaccggcagactgttcttcgagttttacagactgctgcacgacgcccggcctaaggaaggcgacgaccggcccttcttttggctgttcgagaatgtggtggccatgggagtcagcgacaagcgggatattagccggttcctggagagcaaccccgtgatgatcgatgccaaggaagtgagcgccgcccaccgggccagatacttctggggcaatctgcctggcatgaacagacccctggccagcaccgtgaacgacaagctggagctgcaggagtgcctggagcacggccggatcgccaagttcagcaaggtgagaaccatcaccacccgaagcaacagcatcaaacaaggcaaggaccagcactttcctgtgttcatgaacgagaaggaggacatcctgtggtgtaccgagatggagagagtgttcgggttcccagtccactacacagatgtcagcaacatgtctagactggccagacagagactgctgggaagaagctggtccgtccctgtgatcagacacctgttcgcccctctgaaggagtacttcgcctgcgtgagcagcggcaacagcaacgccaacagccggggccccagcttctctagcggcctggtgccactgtccctgagagggagccacatgggccccatggagatctacaaaaccgtgagcgcctggaagcggcagcctgtgcgcgtgctgagcctgtttcggaatatcgataaagtcctgaaaagcctgggattcctggagagcggctctggctccggcggtggcaccctgaagtacgtggaggatgtgacaaacgtggtcagacgggatgtggagaagtggggccccttcgatctggtgtacggcagcacccaacccctgggcagctcttgtgaccggtgccctggctggtacatgtttcagttccaccggatcctgcagtacgccctgccgagacaggagtcccagcggccattcttttggattttcatggacaacttgctgctgaccgaggatgaccaggaaactaccactcggttcctgcagaccgaagccgtgaccctgcaggacgtgagaggccgggactaccagaacgccatgcgggtgtggtccaacatccctggactgaaaagcaagcacgcacctctgacccctaaagaagaggagtacctgcaggcccaggtgcggagcagaagcaagctggacgcccctaaggtggatctgctggtgaagaattgcctcctgcccctgagagagtacttcaagtatttcagccagaatagtctgcccctgggaggcagcggcggcggcgccctggtgacatttgaggacgtcgccgtgcggttcacccaggaggaatgggctctgctggatccttctcagaaaatcctgtaccgggacgtgatgagagagacataccggaatctgacctccgtgggcatcaactgggaatgttgggaccttgaagcctgcttcagaagcctgggaagaaacctgagagtgcaggtggtgaagagaaagtgcgagctgaccaacagcggcccctgcgccgagggcggcccaagcagcggcgcccctcctcccagcggcggcagcccagccggctccccaacctctaccgaggagggcacctctgagtccgccacccccgagagcggccctggcacctccaccgagcccagcgagggcagcgcacccggcagccctgccggcagccccacctccacagaggagggaaccagcaccgagcccagcgaaggcagcgccccaggcaccagcaccgagcctagtgagcaggagattaaacggatcaacaagatcagaagaagacttgtgaaagacagcaacaccaagaaggccggcaagacaggccccatgaaaaccctgctggttagagtgatgacacccgatctgagagagcggctggaaaacctgagaaagaagcctgaaaatatcccccagcccatcagcaatacatctagagccaacctgaataagctgctgaccgattacaccgaaatgaagaaggcgatcctgcatgtgtactgggaagagttccagaaggaccctgtgggcctgatgagccgggtggcccagcctgccagcaagaagatcgatcagaacaagctgaaacctgagatggacgagaagggcaacctgaccaccgccggctttgcctgctctcagtgtggccagcccctgttcgtgtacaagctggagcaggtgtctgagaagggcaaggcttacaccaactacttcggacggtgcaatgtggccgagcacgaaaagctgatcctgctggcccagctgaagcccgagaaggatagcgacgaagccgtgacatatagcctgggaaagtttgggcagagggccctggatttctacagcattcatgtgaccaaggagtccacccaccccgtgaagcccctggcccagatcgccggaaacagatacgcctccggacctgtgggaaaggccctgagcgacgcatgtatgggcacaatcgcctccttcctgtctaagtaccaggacatcatcatcgaacaccagaaggtggtgaagggcaaccagaagagactggagagcctgcgggagctggccggcaaggaaaacctggaataccctagcgtgaccctgccacctcagcctcacaccaaggagggcgttgatgcctacaacgaagtgatcgcccgggtgcgaatgtgggtgaacctgaacctgtggcagaagctgaagctaagcagagatgatgccaagcctctgctgagactgaagggattcccttcctttcctctggtcgagagacaggccaacgaagtggactggtgggacatggtgtgtaacgtgaagaagctgatcaacgagaaaaaggaggatggcaaggtgttttggcagaatctggctggctacaagagacaggaagccctgagaccatacctgagcagcgaggaagatcggaagaagggaaagaaattcgctcggtaccagctgggcgacctgctgctgcacctggaaaagaagcacggcgaggactggggaaaggtgtacgacgaggcctgggagcggattgacaagaaagtggaaggcctgagcaagcacatcaagctggaagaggaacggagaagcgaggacgcccagagcaaggccgccctgaccgactggctgcgggctaaggccagcttcgtgatcgagggcctgaaggaggccgacaaggacgagttctgcagatgcgagctgaagctgcagaagtggtacggggacctgcggggaaagcccttcgccatcgaagccgagaacagcatcctggacatcagcggcttcagcaagcagtacaactgtgccttcatctggcagaaggacggcgtgaagaagctgaacctgtacctgatcatcaactacttcaagggcggcaagctgcggttcaagaagatcaaacctgaagccttcgaagccaacagattctacaccgtgatcaacaaaaagagcggcgagatcgtgcccatggaggtgaacttcaacttcgacgaccccaacctgatcatcctgcctctggcctttggcaagagacagggcagagaattcatctggaacgacctgctgtccctggaaaccggcagcctgaagctggccaacggaagagtgatcgagaagacactgtacaacagaagaacccggcaggatgagcctgccctgttcgtggccctgaccttcgagcggcgggaggtcctggactcctccaatatcaaaccaatgaacctgatcggcgtggcaagaggcgaaaacatccccgccgtgatcgccctgaccgaccccgagggctgcccactgagccggtttaaggatagcctgggaaacccaacccacatcctgagaatcggcgagagctataaggagaagcagcggaccatccaggccaagaaggaggtggagcagcggagagccggcggctacagccggaagtacgccagcaaagccaagaatctggcagacgatatggtgagaaacaccgctagagatctgctgtactacgccgtgacccaggatgccatgctgatcttcgccaacctgagccggggcttcggccggcagggcaagcggaccttcatggccgagagacagtacacacggatggaggactggctgaccgccaagctggcctacgagggcctgagcaagacctacctgtccaagacactggcccagtacacctccaagacatgcagcaactgtgggtttaccatcaccagcgccgactacgacagggtgctggagaagctgaagaagacagcaacaggctggatgaccacaattaacggcaaggagctgaaggtggagggccagattacctactacaacagatacaagagacagaacgtagtcaaggacctgtccgtcgagctggatagactgagcgaagaatctgtgaacaacgacatctcctcctggacaaagggcagaagcggagaagctctgagcctcctgaagaaaagattctcccatagacccgtgcaggagaagttcgtgtgcctgaactgcggcttcgagacacacgcagccgagcaagccgccctgaacatcgccagatcctggctgttcctgcggagccaggagtacaagaaataccagacaaacaagacaaccggcaacaccgataagagagccttcgtcgagacctggcagtccttttaccggaagaagcttaaggaggtgtggaaacctgccgtgcggtctggcggatctggcggaggctccccccagaagctggtgaccttcgaggacgtggccgtgtacttcacccccaccgagtgggacggcctgagccccgcccagagggccctgtacagggacgtgatgctggagaactacggcaacgtggccagcctgggcttccccatcctgaagcccgccgtgatcagccagctggagggcggcggcgagctgggcatccccagcctgctggccgccggcgtgggcagcgacccccccggcctgtggggcggcccaagcagcggcgcccctcctcccagcggcggcagcccagccggctccccaacctctaccgaggagggcacctctgagtccgccacccccgagagcggccctggcacctccaccgagcccagcgagggcagcgcacccggcagccctgccggcagccccacctccacagaggagggaaccagcaccgagcccagcgaaggcagcgccccaggcaccagcaccgagcctagtgagcaggagattaaacggatcaacaagatcagaagaagacttgtgaaagacagcaacaccaagaaggccggcaagacaggccccatgaaaaccctgctggttagagtgatgacacccgatctgagagagcggctggaaaacctgagaaagaagcctgaaaatatcccccagcccatcagcaatacatctagagccaacctgaataagctgctgaccgattacaccgaaatgaagaaggcgatcctgcatgtgtactgggaagagttccagaaggaccctgtgggcctgatgagccgggtggcccagcctgccagcaagaagatcgatcagaacaagctgaaacctgagatggacgagaagggcaacctgaccaccgccggctttgcctgctctcagtgtggccagcccctgttcgtgtacaagctggagcaggtgtctgagaagggcaaggcttacaccaactacttcggacggtgcaatgtggccgagcacgaaaagctgatcctgctggcccagctgaagcccgagaaggatagcgacgaagccgtgacatatagcctgggaaagtttgggcagagggccctggatttctacagcattcatgtgaccaaggagtccacccaccccgtgaagcccctggcccagatcgccggaaacagatacgcctccggacctgtgggaaaggccctgagcgacgcatgtatgggcacaatcgcctccttcctgtctaagtaccaggacatcatcatcgaacaccagaaggtggtgaagggcaaccagaagagactggagagcctgcgggagctggccggcaaggaaaacctggaataccctagcgtgaccctgccacctcagcctcacaccaaggagggcgttgatgcctacaacgaagtgatcgcccgggtgcgaatgtgggtgaacctgaacctgtggcagaagctgaagctaagcagagatgatgccaagcctctgctgagactgaagggattcccttcctttcctctggtcgagagacaggccaacgaagtggactggtgggacatggtgtgtaacgtgaagaagctgatcaacgagaaaaaggaggatggcaaggtgttttggcagaatctggctggctacaagagacaggaagccctgagaccatacctgagcagcgaggaagatcggaagaagggaaagaaattcgctcggtaccagctgggcgacctgctgctgcacctggaaaagaagcacggcgaggactggggaaaggtgtacgacgaggcctgggagcggattgacaagaaagtggaaggcctgagcaagcacatcaagctggaagaggaacggagaagcgaggacgcccagagcaaggccgccctgaccgactggctgcgggctaaggccagcttcgtgatcgagggcctgaaggaggccgacaaggacgagttctgcagatgcgagctgaagctgcagaagtggtacggggacctgcggggaaagcccttcgccatcgaagccgagaacagcatcctggacatcagcggcttcagcaagcagtacaactgtgccttcatctggcagaaggacggcgtgaagaagctgaacctgtacctgatcatcaactacttcaagggcggcaagctgcggttcaagaagatcaaacctgaagccttcgaagccaacagattctacaccgtgatcaacaaaaagagcggcgagatcgtgcccatggaggtgaacttcaacttcgacgaccccaacctgatcatcctgcctctggcctttggcaagagacagggcagagaattcatctggaacgacctgctgtccctggaaaccggcagcctgaagctggccaacggaagagtgatcgagaagacactgtacaacagaagaacccggcaggatgagcctgccctgttcgtggccctgaccttcgagcggcgggaggtcctggactcctccaatatcaaaccaatgaacctgatcggcgtggcaagaggcgaaaacatccccgccgtgatcgccctgaccgaccccgagggctgcccactgagccggtttaaggatagcctgggaaacccaacccacatcctgagaatcggcgagagctataaggagaagcagcggaccatccaggccaagaaggaggtggagcagcggagagccggcggctacagccggaagtacgccagcaaagccaagaatctggcagacgatatggtgagaaacaccgctagagatctgctgtactacgccgtgacccaggatgccatgctgatcttcgccaacctgagccggggcttcggccggcagggcaagcggaccttcatggccgagagacagtacacacggatggaggactggctgaccgccaagctggcctacgagggcctgagcaagacctacctgtccaagacactggcccagtacacctccaagacatgcagcaactgtgggtttaccatcaccagcgccgactacgacagggtgctggagaagctgaagaagacagcaacaggctggatgaccacaattaacggcaaggagctgaaggtggagggccagattacctactacaacagatacaagagacagaacgtagtcaaggacctgtccgtcgagctggatagactgagcgaagaatctgtgaacaacgacatctcctcctggacaaagggcagaagcggagaagctctgagcctcctgaagaaaagattctcccatagacccgtgcaggagaagttcgtgtgcctgaactgcggcttcgagacacacgcagccgagcaagccgccctgaacatcgccagatcctggctgttcctgcggagccaggagtacaagaaataccagacaaacaagacaaccggcaacaccgataagagagccttcgtcgagacctggcagtccttttaccggaagaagcttaaggaggtgtggaaacctgccgtgcggtctggcggatctggcggaggctcctccccagaagctggtgaccttcgaggacgtggccgtgtacttcacccccaccgagtgggacggcctgagccccgcccagagggccctgtacagggacgtgatgctggagaactacggcaacgtggccagcctgggcttccccatcctgaagcccgccgtgatcagccagctggagggcggcggcgagctgggcatccccagcctgctggccgccggcgtgggcagcgacccccccggcctgtggggatctggctccggcagcggccccaagaaaaagagaaaagtctaagctgccttctgcggggcttgccttctggccatgcccttcttctctcccttgcacctgtacctcttggtctttgaataaagcctgagtaggaaggctagcaaaaaaaaaaaaaaaaaaaaaaaaaaaaaaaaaaaaaaaaaaaaaaaaaaaaaaaaaaaaaaaaaaaaaaaaaaaaaaaa

SEQ ID NO: 15379 - RNA, 9485 nt, synthetic construct
  source 1..9485: mol_type = other RNA
aggaaataagagagaaaagaagagtaagaagaaatataagagccaccatggcccctaagaagaagcgtaaagtgagccggatggaacgcctcgtctacgaggtgcggcagaagtgcagaaacatcgaggacatctgcatctcctgcggatctctgaacgtgaccctggagcacccactgttcatcggcggcatgtgccagaactgtaaaaactgttttctggagtgtgcctatcaatacgacgatgacggctaccagagctactgcaccatctgttgcggcggaagagaggtgctgatgtgtggaaataacaactgctgccggtgcttctgcgtggaatgcgtggacctgctggtgggccccggcgccgcccaggccgctattaaggaagatccttggaactgctacatgtgcggccacaagggcacatacggcctgctgagacggagagaggactggcctagcagactgcagatgttcttcgccaataaccacgaccaggagttcgacccccctaaggtgtaccctcccgtccccgccgagaagagaaagcccatccgggtcctgagcctgttcgatggcatcgccaccggtctgctggtgctgaaggacctgggcatccaggtggataggtacattgcctccgaggtgtgcgaggactccatcaccgtgggaatggtgcgtcatcagggcaagatcatgtacgtgggcgacgtgcggagcgtgacacagaagcatatccaggagtggggccctttcgacctggtgatcggcggcagcccttgcaatgacctgagcatcgtgaacccagcccggaagggcctgtacgagggaaccggcagactgttcttcgagttttacagactgctgcacgacgcccggcctaaggaaggcgacgaccggcccttcttttggctgttcgagaatgtggtggccatgggagtcagcgacaagcgggatattagccggttcctggagagcaaccccgtgatgatcgatgccaaggaagtgagcgccgcccaccgggccagatacttctggggcaatctgcctggcatgaacagacccctggccagcaccgtgaacgacaagctggagctgcaggagtgcctggagcacggccggatcgccaagttcagcaaggtgagaaccatcaccacccgaagcaacagcatcaaacaaggcaaggaccagcactttcctgtgttcatgaacgagaaggaggacatcctgtggtgtaccgagatggagagagtgttcgggttcccagtccactacacagatgtcagcaacatgtctagactggccagacagagactgctgggaagaagctggtccgtccctgtgatcagacacctgttcgcccctctgaaggagtacttcgcctgcgtgagcagcggcaacagcaacgccaacagccggggccccagcttctctagcggcctggtgccactgtccctgagagggagccacatgggccccatggagatctacaaaaccgtgagcgcctggaagcggcagcctgtgcgcgtgctgagcctgtttcggaatatcgataaagtcctgaaaagcctgggattcctggagagcggctctggctccggcggtggcaccctgaagtacgtggaggatgtgacaaacgtggtcagacgggatgtggagaagtggggccccttcgatctggtgtacggcagcacccaacccctgggcagctcttgtgaccggtgccctggctggtacatgtttcagttccaccggatcctgcagtacgccctgccgagacaggagtcccagcggccattcttttggattttcatggacaacttgctgctgaccgaggatgaccaggaaactaccactcggttcctgcagaccgaagccgtgaccctgcaggacgtgagaggccgggactaccagaacgccatgcgggtgtggtccaacatccctggactgaaaagcaagcacgcacctctgacccctaaagaagaggagtacctgcaggcccaggtgcggagcagaagcaagctggacgcccctaaggtggatctgctggtgaagaattgcctcctgcccctgagagagtacttcaagtatttcagccagaatagtctgcccctgggaggcagcggcggcggcgccctggtgacatttgaggacgtcgccgtgcggttcacccaggaggaatgggctctgctggatccttctcagaaaatcctgtaccgggacgtgatgagagagacataccggaatctgacctccgtgggcatcaactgggaatgttgggaccttgaagcctgcttcagaagcctgggaagaaacctgagagtgcaggtggtgaagagaaagtgcgagctgaccaacagcggcccctgcgccgagggcggcccaagcagcggcgcccctcctcccagcggcggcagcccagccggctccccaacctctaccgaggagggcacctctgagtccgccacccccgagagcggccctggcacctccaccgagcccagcgagggcagcgcacccggcagccctgccggcagccccacctccacagaggagggaaccagcaccgagcccagcgaaggcagcgccccaggcaccagcaccgagcctagtgagcaggagattaaacggatcaacaagatcagaagaagacttgtgaaagacagcaacaccaagaaggccggcaagacaggccccatgaaaaccctgctggttagagtgatgacacccgatctgagagagcggctggaaaacctgagaaagaagcctgaaaatatcccccagcccatcagcaatacatctagagccaacctgaataagctgctgaccgattacaccgaaatgaagaaggcgatcctgcatgtgtactgggaagagttccagaaggaccctgtgggcctgatgagccgggtggcccagcctgccagcaagaagatcgatcagaacaagctgaaacctgagatggacgagaagggcaacctgaccaccgccggctttgcctgctctcagtgtggccagcccctgttcgtgtacaagctggagcaggtgtctgagaagggcaaggcttacaccaactacttcggacggtgcaatgtggccgagcacgaaaagctgatcctgctggcccagctgaagcccgagaaggatagcgacgaagccgtgacatatagcctgggaaagtttgggcagagggccctggatttctacagcattcatgtgaccaaggagtccacccaccccgtgaagcccctggcccagatcgccggaaacagatacgcctccggacctgtgggaaaggccctgagcgacgcatgtatgggcacaatcgcctccttcctgtctaagtaccaggacatcatcatcgaacaccagaaggtggtgaagggcaaccagaagagactggagagcctgcgggagctggccggcaaggaaaacctggaataccctagcgtgaccctgccacctcagcctcacaccaaggagggcgttgatgcctacaacgaagtgatcgcccgggtgcgaatgtgggtgaacctgaacctgtggcagaagctgaagctaagcagagatgatgccaagcctctgctgagactgaagggattcccttcctttcctctggtcgagagacaggccaacgaagtggactggtgggacatggtgtgtaacgtgaagaagctgatcaacgagaaaaaggaggatggcaaggtgttttggcagaatctggctggctacaagagacaggaagccctgagaccatacctgagcagcgaggaagatcggaagaagggaaagaaattcgctcggtaccagctgggcgacctgctgctgcacctggaaaagaagcacggcgaggactggggaaaggtgtacgacgaggcctgggagcggattgacaagaaagtggaaggcctgagcaagcacatcaagctggaagaggaacggagaagcgaggacgcccagagcaaggccgccctgaccgactggctgcgggctaaggccagcttcgtgatcgagggcctgaaggaggccgacaaggacgagttctgcagatgcgagctgaagctgcagaagtggtacggggacctgcggggaaagcccttcgccatcgaagccgagaacagcatcctggacatcagcggcttcagcaagcagtacaactgtgccttcatctggcagaaggacggcgtgaagaagctgaacctgtacctgatcatcaactacttcaagggcggcaagctgcggttcaagaagatcaaacctgaagccttcgaagccaacagattctacaccgtgatcaacaaaaagagcggcgagatcgtgcccatggaggtgaacttcaacttcgacgaccccaacctgatcatcctgcctctggcctttggcaagagacagggcagagaattcatctggaacgacctgctgtccctggaaaccggcagcctgaagctggccaacggaagagtgatcgagaagacactgtacaacagaagaacccggcaggatgagcctgccctgttcgtggccctgaccttcgagcggcgggaggtcctggactcctccaatatcaaaccaatgaacctgatcggcgtggcaagaggcgaaaacatccccgccgtgatcgccctgaccgaccccgagggctgcccactgagccggtttaaggatagcctgggaaacccaacccacatcctgagaatcggcgagagctataaggagaagcagcggaccatccaggccaagaaggaggtggagcagcggagagccggcggctacagccggaagtacgccagcaaagccaagaatctggcagacgatatggtgagaaacaccgctagagatctgctgtactacgccgtgacccaggatgccatgctgatcttcgccaacctgagccggggcttcggccggcagggcaagcggaccttcatggccgagagacagtacacacggatggaggactggctgaccgccaagctggcctacgagggcctgagcaagacctacctgtccaagacactggcccagtacacctccaagacatgcagcaactgtgggtttaccatcaccagcgccgactacgacagggtgctggagaagctgaagaagacagcaacaggctggatgaccacaattaacggcaaggagctgaaggtggagggccagattacctactacaacagatacaagagacagaacgtagtcaaggacctgtccgtcgagctggatagactgagcgaagaatctgtgaacaacgacatctcctcctggacaaagggcagaagcggagaagctctgagcctcctgaagaaaagattctcccatagacccgtgcaggagaagttcgtgtgcctgaactgcggcttcgagacacacgcagccgagcaagccgccctgaacatcgccagatcctggctgttcctgcggagccaggagtacaagaaataccagacaaacaagacaaccggcaacaccgataagagagccttcgtcgagacctggcagtccttttaccggaagaagcttaaggaggtgtggaaacctgccgtgcggtctggcggatctggcggaggctccatggacagcgtggccttcgaggacgtggccgtgaacttcacccaggaggagtgggccctgctggaccccagccagaagaacctgtacagggaggtgatgcaggagaccgtgaggaacctggccagcatcggcaagaagtggaacaaccagtacatcgaggacgagcaccagaaccccaggaagaacctgaggaggctgatcggcgagaggctgagcgagagcaaggagagccaccagcacggcggcggcccaagcagcggcgcccctcctcccagcggcggcagcccagccggctccccaacctctaccgaggagggcacctctgagtccgccacccccgagagcggccctggcacctccaccgagcccagcgagggcagcgcacccggcagccctgccggcagccccacctccacagaggagggaaccagcaccgagcccagcgaaggcagcgccccaggcaccagcaccgagcctagtgagcaggagattaaacggatcaacaagatcagaagaagacttgtgaaagacagcaacaccaagaaggccggcaagacaggccccatgaaaaccctgctggttagagtgatgacacccgatctgagagagcggctggaaaacctgagaaagaagcctgaaaatatcccccagcccatcagcaatacatctagagccaacctgaataagctgctgaccgattacaccgaaatgaagaaggcgatcctgcatgtgtactgggaagagttccagaaggaccctgtgggcctgatgagccgggtggcccagcctgccagcaagaagatcgatcagaacaagctgaaacctgagatggacgagaagggcaacctgaccaccgccggctttgcctgctctcagtgtggccagcccctgttcgtgtacaagctggagcaggtgtctgagaagggcaaggcttacaccaactacttcggacggtgcaatgtggccgagcacgaaaagctgatcctgctggcccagctgaagcccgagaaggatagcgacgaagccgtgacatatagcctgggaaagtttgggcagagggccctggatttctacagcattcatgtgaccaaggagtccacccaccccgtgaagcccctggcccagatcgccggaaacagatacgcctccggacctgtgggaaaggccctgagcgacgcatgtatgggcacaatcgcctccttcctgtctaagtaccaggacatcatcatcgaacaccagaaggtggtgaagggcaaccagaagagactggagagcctgcgggagctggccggcaaggaaaacctggaataccctagcgtgaccctgccacctcagcctcacaccaaggagggcgttgatgcctacaacgaagtgatcgcccgggtgcgaatgtgggtgaacctgaacctgtggcagaagctgaagctaagcagagatgatgccaagcctctgctgagactgaagggattcccttcctttcctctggtcgagagacaggccaacgaagtggactggtgggacatggtgtgtaacgtgaagaagctgatcaacgagaaaaaggaggatggcaaggtgttttggcagaatctggctggctacaagagacaggaagccctgagaccatacctgagcagcgaggaagatcggaagaagggaaagaaattcgctcggtaccagctgggcgacctgctgctgcacctggaaaagaagcacggcgaggactggggaaaggtgtacgacgaggcctgggagcggattgacaagaaagtggaaggcctgagcaagcacatcaagctggaagaggaacggagaagcgaggacgcccagagcaaggccgccctgaccgactggctgcgggctaaggccagcttcgtgatcgagggcctgaaggaggccgacaaggacgagttctgcagatgcgagctgaagctgcagaagtggtacggggacctgcggggaaagcccttcgccatcgaagccgagaacagcatcctggacatcagcggcttcagcaagcagtacaactgtgccttcatctggcagaaggacggcgtgaagaagctgaacctgtacctgatcatcaactacttcaagggcggcaagctgcggttcaagaagatcaaacctgaagccttcgaagccaacagattctacaccgtgatcaacaaaaagagcggcgagatcgtgcccatggaggtgaacttcaacttcgacgaccccaacctgatcatcctgcctctggcctttggcaagagacagggcagagaattcatctggaacgacctgctgtccctggaaaccggcagcctgaagctggccaacggaagagtgatcgagaagacactgtacaacagaagaacccggcaggatgagcctgccctgttcgtggccctgaccttcgagcggcgggaggtcctggactcctccaatatcaaaccaatgaacctgatcggcgtggcaagaggcgaaaacatccccgccgtgatcgccctgaccgaccccgagggctgcccactgagccggtttaaggatagcctgggaaacccaacccacatcctgagaatcggcgagagctataaggagaagcagcggaccatccaggccaagaaggaggtggagcagcggagagccggcggctacagccggaagtacgccagcaaagccaagaatctggcagacgatatggtgagaaacaccgctagagatctgctgtactacgccgtgacccaggatgccatgctgatcttcgccaacctgagccggggcttcggccggcagggcaagcggaccttcatggccgagagacagtacacacggatggaggactggctgaccgccaagctggcctacgagggcctgagcaagacctacctgtccaagacactggcccagtacacctccaagacatgcagcaactgtgggtttaccatcaccagcgccgactacgacagggtgctggagaagctgaagaagacagcaacaggctggatgaccacaattaacggcaaggagctgaaggtggagggccagattacctactacaacagatacaagagacagaacgtagtcaaggacctgtccgtcgagctggatagactgagcgaagaatctgtgaacaacgacatctcctcctggacaaagggcagaagcggagaagctctgagcctcctgaagaaaagattctcccatagacccgtgcaggagaagttcgtgtgcctgaactgcggcttcgagacacacgcagccgagcaagccgccctgaacatcgccagatcctggctgttcctgcggagccaggagtacaagaaataccagacaaacaagacaaccggcaacaccgataagagagccttcgtcgagacctggcagtccttttaccggaagaagcttaaggaggtgtggaaacctgccgtgcggtctggcggatctggcggaggctcctatggacagcgtggccttcgaggacgtggccgtgaacttcacccaggaggagtgggccctgctggaccccagccagaagaacctgtacagggaggtgatgcaggagaccgtgaggaacctggccagcatcggcaagaagtggaacaaccagtacatcgaggacgagcaccagaaccccaggaagaacctgaggaggctgatcggcgagaggctgagcgagagcaaggagagccaccagcacggcggatctggctccggcagcggccccaagaaaaagagaaaagtctaagctgccttctgcggggcttgccttctggccatgcccttcttctctcccttgcacctgtacctcttggtctttgaataaagcctgagtaggaaggctagcaaaaaaaaaaaaaaaaaaaaaaaaaaaaaaaaaaaaaaaaaaaaaaaaaaaaaaaaaaaaaaaaaaaaaaaaaaaaaaaa

SEQ ID NO: 15380 - RNA, 9485 nt, synthetic construct
  source 1..9485: mol_type = other RNA
aggaaataagagagaaaagaagagtaagaagaaatataagagccaccatggcccctaagaagaagcgtaaagtgagccggatggaacgcctcgtctacgaggtgcggcagaagtgcagaaacatcgaggacatctgcatctcctgcggatctctgaacgtgaccctggagcacccactgttcatcggcggcatgtgccagaactgtaaaaactgttttctggagtgtgcctatcaatacgacgatgacggctaccagagctactgcaccatctgttgcggcggaagagaggtgctgatgtgtggaaataacaactgctgccggtgcttctgcgtggaatgcgtggacctgctggtgggccccggcgccgcccaggccgctattaaggaagatccttggaactgctacatgtgcggccacaagggcacatacggcctgctgagacggagagaggactggcctagcagactgcagatgttcttcgccaataaccacgaccaggagttcgacccccctaaggtgtaccctcccgtccccgccgagaagagaaagcccatccgggtcctgagcctgttcgatggcatcgccaccggtctgctggtgctgaaggacctgggcatccaggtggataggtacattgcctccgaggtgtgcgaggactccatcaccgtgggaatggtgcgtcatcagggcaagatcatgtacgtgggcgacgtgcggagcgtgacacagaagcatatccaggagtggggccctttcgacctggtgatcggcggcagcccttgcaatgacctgagcatcgtgaacccagcccggaagggcctgtacgagggaaccggcagactgttcttcgagttttacagactgctgcacgacgcccggcctaaggaaggcgacgaccggcccttcttttggctgttcgagaatgtggtggccatgggagtcagcgacaagcgggatattagccggttcctggagagcaaccccgtgatgatcgatgccaaggaagtgagcgccgcccaccgggccagatacttctggggcaatctgcctggcatgaacagacccctggccagcaccgtgaacgacaagctggagctgcaggagtgcctggagcacggccggatcgccaagttcagcaaggtgagaaccatcaccacccgaagcaacagcatcaaacaaggcaaggaccagcactttcctgtgttcatgaacgagaaggaggacatcctgtggtgtaccgagatggagagagtgttcgggttcccagtccactacacagatgtcagcaacatgtctagactggccagacagagactgctgggaagaagctggtccgtccctgtgatcagacacctgttcgcccctctgaaggagtacttcgcctgcgtgagcagcggcaacagcaacgccaacagccggggccccagcttctctagcggcctggtgccactgtccctgagagggagccacatgggccccatggagatctacaaaaccgtgagcgcctggaagcggcagcctgtgcgcgtgctgagcctgtttcggaatatcgataaagtcctgaaaagcctgggattcctggagagcggctctggctccggcggtggcaccctgaagtacgtggaggatgtgacaaacgtggtcagacgggatgtggagaagtggggccccttcgatctggtgtacggcagcacccaacccctgggcagctcttgtgaccggtgccctggctggtacatgtttcagttccaccggatcctgcagtacgccctgccgagacaggagtcccagcggccattcttttggattttcatggacaacttgctgctgaccgaggatgaccaggaaactaccactcggttcctgcagaccgaagccgtgaccctgcaggacgtgagaggccgggactaccagaacgccatgcgggtgtggtccaacatccctggactgaaaagcaagcacgcacctctgacccctaaagaagaggagtacctgcaggcccaggtgcggagcagaagcaagctggacgcccctaaggtggatctgctggtgaagaattgcctcctgcccctgagagagtacttcaagtatttcagccagaatagtctgcccctgggaggcagcggcggcggcgccctggtgacatttgaggacgtcgccgtgcggttcacccaggaggaatgggctctgctggatccttctcagaaaatcctgtaccgggacgtgatgagagagacataccggaatctgacctccgtgggcatcaactgggaatgttgggaccttgaagcctgcttcagaagcctgggaagaaacctgagagtgcaggtggtgaagagaaagtgcgagctgaccaacagcggcccctgcgccgagggcggcccaagcagcggcgcccctcctcccagcggcggcagcccagccggctccccaacctctaccgaggagggcacctctgagtccgccacccccgagagcggccctggcacctccaccgagcccagcgagggcagcgcacccggcagccctgccggcagccccacctccacagaggagggaaccagcaccgagcccagcgaaggcagcgccccaggcaccagcaccgagcctagtgagcaggagattaaacggatcaacaagatcagaagaagacttgtgaaagacagcaacaccaagaaggccggcaagacaggccccatgaaaaccctgctggttagagtgatgacacccgatctgagagagcggctggaaaacctgagaaagaagcctgaaaatatcccccagcccatcagcaatacatctagagccaacctgaataagctgctgaccgattacaccgaaatgaagaaggcgatcctgcatgtgtactgggaagagttccagaaggaccctgtgggcctgatgagccgggtggcccagcctgccagcaagaagatcgatcagaacaagctgaaacctgagatggacgagaagggcaacctgaccaccgccggctttgcctgctctcagtgtggccagcccctgttcgtgtacaagctggagcaggtgtctgagaagggcaaggcttacaccaactacttcggacggtgcaatgtggccgagcacgaaaagctgatcctgctggcccagctgaagcccgagaaggatagcgacgaagccgtgacatatagcctgggaaagtttgggcagagggccctggatttctacagcattcatgtgaccaaggagtccacccaccccgtgaagcccctggcccagatcgccggaaacagatacgcctccggacctgtgggaaaggccctgagcgacgcatgtatgggcacaatcgcctccttcctgtctaagtaccaggacatcatcatcgaacaccagaaggtggtgaagggcaaccagaagagactggagagcctgcgggagctggccggcaaggaaaacctggaataccctagcgtgaccctgccacctcagcctcacaccaaggagggcgttgatgcctacaacgaagtgatcgcccgggtgcgaatgtgggtgaacctgaacctgtggcagaagctgaagctaagcagagatgatgccaagcctctgctgagactgaagggattcccttcctttcctctggtcgagagacaggccaacgaagtggactggtgggacatggtgtgtaacgtgaagaagctgatcaacgagaaaaaggaggatggcaaggtgttttggcagaatctggctggctacaagagacaggaagccctgagaccatacctgagcagcgaggaagatcggaagaagggaaagaaattcgctcggtaccagctgggcgacctgctgctgcacctggaaaagaagcacggcgaggactggggaaaggtgtacgacgaggcctgggagcggattgacaagaaagtggaaggcctgagcaagcacatcaagctggaagaggaacggagaagcgaggacgcccagagcaaggccgccctgaccgactggctgcgggctaaggccagcttcgtgatcgagggcctgaaggaggccgacaaggacgagttctgcagatgcgagctgaagctgcagaagtggtacggggacctgcggggaaagcccttcgccatcgaagccgagaacagcatcctggacatcagcggcttcagcaagcagtacaactgtgccttcatctggcagaaggacggcgtgaagaagctgaacctgtacctgatcatcaactacttcaagggcggcaagctgcggttcaagaagatcaaacctgaagccttcgaagccaacagattctacaccgtgatcaacaaaaagagcggcgagatcgtgcccatggaggtgaacttcaacttcgacgaccccaacctgatcatcctgcctctggcctttggcaagagacagggcagagaattcatctggaacgacctgctgtccctggaaaccggcagcctgaagctggccaacggaagagtgatcgagaagacactgtacaacagaagaacccggcaggatgagcctgccctgttcgtggccctgaccttcgagcggcgggaggtcctggactcctccaatatcaaaccaatgaacctgatcggcgtggcaagaggcgaaaacatccccgccgtgatcgccctgaccgaccccgagggctgcccactgagccggtttaaggatagcctgggaaacccaacccacatcctgagaatcggcgagagctataaggagaagcagcggaccatccaggccaagaaggaggtggagcagcggagagccggcggctacagccggaagtacgccagcaaagccaagaatctggcagacgatatggtgagaaacaccgctagagatctgctgtactacgccgtgacccaggatgccatgctgatcttcgccaacctgagccggggcttcggccggcagggcaagcggaccttcatggccgagagacagtacacacggatggaggactggctgaccgccaagctggcctacgagggcctgagcaagacctacctgtccaagacactggcccagtacacctccaagacatgcagcaactgtgggtttaccatcaccagcgccgactacgacagggtgctggagaagctgaagaagacagcaacaggctggatgaccacaattaacggcaaggagctgaaggtggagggccagattacctactacaacagatacaagagacagaacgtagtcaaggacctgtccgtcgagctggatagactgagcgaagaatctgtgaacaacgacatctcctcctggacaaagggcagaagcggagaagctctgagcctcctgaagaaaagattctcccatagacccgtgcaggagaagttcgtgtgcctgaactgcggcttcgagacacacgcagccgagcaagccgccctgaacatcgccagatcctggctgttcctgcggagccaggagtacaagaaataccagacaaacaagacaaccggcaacaccgataagagagccttcgtcgagacctggcagtccttttaccggaagaagcttaaggaggtgtggaaacctgccgtgcggtctggcggatctggcggaggctccatgcacctgaccgcctggccccagaagagcgtgaccttcgaggacgtggccgtgtacttcacccaggccgagtgggacggcctgagccccgcccagaggaccctgtacagggacgtgatgctggagaactacggcaacgtggccagcctgggcttccccctgctgaagcccgccgtgatcagccagctggagggcggcggcgagctgggcggccccagccccctggccgccggcaggggcctgggcggcccaagcagcggcgcccctcctcccagcggcggcagcccagccggctccccaacctctaccgaggagggcacctctgagtccgccacccccgagagcggccctggcacctccaccgagcccagcgagggcagcgcacccggcagccctgccggcagccccacctccacagaggagggaaccagcaccgagcccagcgaaggcagcgccccaggcaccagcaccgagcctagtgagcaggagattaaacggatcaacaagatcagaagaagacttgtgaaagacagcaacaccaagaaggccggcaagacaggccccatgaaaaccctgctggttagagtgatgacacccgatctgagagagcggctggaaaacctgagaaagaagcctgaaaatatcccccagcccatcagcaatacatctagagccaacctgaataagctgctgaccgattacaccgaaatgaagaaggcgatcctgcatgtgtactgggaagagttccagaaggaccctgtgggcctgatgagccgggtggcccagcctgccagcaagaagatcgatcagaacaagctgaaacctgagatggacgagaagggcaacctgaccaccgccggctttgcctgctctcagtgtggccagcccctgttcgtgtacaagctggagcaggtgtctgagaagggcaaggcttacaccaactacttcggacggtgcaatgtggccgagcacgaaaagctgatcctgctggcccagctgaagcccgagaaggatagcgacgaagccgtgacatatagcctgggaaagtttgggcagagggccctggatttctacagcattcatgtgaccaaggagtccacccaccccgtgaagcccctggcccagatcgccggaaacagatacgcctccggacctgtgggaaaggccctgagcgacgcatgtatgggcacaatcgcctccttcctgtctaagtaccaggacatcatcatcgaacaccagaaggtggtgaagggcaaccagaagagactggagagcctgcgggagctggccggcaaggaaaacctggaataccctagcgtgaccctgccacctcagcctcacaccaaggagggcgttgatgcctacaacgaagtgatcgcccgggtgcgaatgtgggtgaacctgaacctgtggcagaagctgaagctaagcagagatgatgccaagcctctgctgagactgaagggattcccttcctttcctctggtcgagagacaggccaacgaagtggactggtgggacatggtgtgtaacgtgaagaagctgatcaacgagaaaaaggaggatggcaaggtgttttggcagaatctggctggctacaagagacaggaagccctgagaccatacctgagcagcgaggaagatcggaagaagggaaagaaattcgctcggtaccagctgggcgacctgctgctgcacctggaaaagaagcacggcgaggactggggaaaggtgtacgacgaggcctgggagcggattgacaagaaagtggaaggcctgagcaagcacatcaagctggaagaggaacggagaagcgaggacgcccagagcaaggccgccctgaccgactggctgcgggctaaggccagcttcgtgatcgagggcctgaaggaggccgacaaggacgagttctgcagatgcgagctgaagctgcagaagtggtacggggacctgcggggaaagcccttcgccatcgaagccgagaacagcatcctggacatcagcggcttcagcaagcagtacaactgtgccttcatctggcagaaggacggcgtgaagaagctgaacctgtacctgatcatcaactacttcaagggcggcaagctgcggttcaagaagatcaaacctgaagccttcgaagccaacagattctacaccgtgatcaacaaaaagagcggcgagatcgtgcccatggaggtgaacttcaacttcgacgaccccaacctgatcatcctgcctctggcctttggcaagagacagggcagagaattcatctggaacgacctgctgtccctggaaaccggcagcctgaagctggccaacggaagagtgatcgagaagacactgtacaacagaagaacccggcaggatgagcctgccctgttcgtggccctgaccttcgagcggcgggaggtcctggactcctccaatatcaaaccaatgaacctgatcggcgtggcaagaggcgaaaacatccccgccgtgatcgccctgaccgaccccgagggctgcccactgagccggtttaaggatagcctgggaaacccaacccacatcctgagaatcggcgagagctataaggagaagcagcggaccatccaggccaagaaggaggtggagcagcggagagccggcggctacagccggaagtacgccagcaaagccaagaatctggcagacgatatggtgagaaacaccgctagagatctgctgtactacgccgtgacccaggatgccatgctgatcttcgccaacctgagccggggcttcggccggcagggcaagcggaccttcatggccgagagacagtacacacggatggaggactggctgaccgccaagctggcctacgagggcctgagcaagacctacctgtccaagacactggcccagtacacctccaagacatgcagcaactgtgggtttaccatcaccagcgccgactacgacagggtgctggagaagctgaagaagacagcaacaggctggatgaccacaattaacggcaaggagctgaaggtggagggccagattacctactacaacagatacaagagacagaacgtagtcaaggacctgtccgtcgagctggatagactgagcgaagaatctgtgaacaacgacatctcctcctggacaaagggcagaagcggagaagctctgagcctcctgaagaaaagattctcccatagacccgtgcaggagaagttcgtgtgcctgaactgcggcttcgagacacacgcagccgagcaagccgccctgaacatcgccagatcctggctgttcctgcggagccaggagtacaagaaataccagacaaacaagacaaccggcaacaccgataagagagccttcgtcgagacctggcagtccttttaccggaagaagcttaaggaggtgtggaaacctgccgtgcggtctggcggatctggcggaggctcctatgcacctgaccgcctggccccagaagagcgtgaccttcgaggacgtggccgtgtacttcacccaggccgagtgggacggcctgagccccgcccagaggaccctgtacagggacgtgatgctggagaactacggcaacgtggccagcctgggcttccccctgctgaagcccgccgtgatcagccagctggagggcggcggcgagctgggcggccccagccccctggccgccggcaggggcctgggatctggctccggcagcggccccaagaaaaagagaaaagtctaagctgccttctgcggggcttgccttctggccatgcccttcttctctcccttgcacctgtacctcttggtctttgaataaagcctgagtaggaaggctagcaaaaaaaaaaaaaaaaaaaaaaaaaaaaaaaaaaaaaaaaaaaaaaaaaaaaaaaaaaaaaaaaaaaaaaaaaaaaaaaa

SEQ ID NO: 15381 - RNA, 9485 nt, synthetic construct
  source 1..9485: mol_type = other RNA
aggaaataagagagaaaagaagagtaagaagaaatataagagccaccatggcccctaagaagaagcgtaaagtgagccggatggaacgcctcgtctacgaggtgcggcagaagtgcagaaacatcgaggacatctgcatctcctgcggatctctgaacgtgaccctggagcacccactgttcatcggcggcatgtgccagaactgtaaaaactgttttctggagtgtgcctatcaatacgacgatgacggctaccagagctactgcaccatctgttgcggcggaagagaggtgctgatgtgtggaaataacaactgctgccggtgcttctgcgtggaatgcgtggacctgctggtgggccccggcgccgcccaggccgctattaaggaagatccttggaactgctacatgtgcggccacaagggcacatacggcctgctgagacggagagaggactggcctagcagactgcagatgttcttcgccaataaccacgaccaggagttcgacccccctaaggtgtaccctcccgtccccgccgagaagagaaagcccatccgggtcctgagcctgttcgatggcatcgccaccggtctgctggtgctgaaggacctgggcatccaggtggataggtacattgcctccgaggtgtgcgaggactccatcaccgtgggaatggtgcgtcatcagggcaagatcatgtacgtgggcgacgtgcggagcgtgacacagaagcatatccaggagtggggccctttcgacctggtgatcggcggcagcccttgcaatgacctgagcatcgtgaacccagcccggaagggcctgtacgagggaaccggcagactgttcttcgagttttacagactgctgcacgacgcccggcctaaggaaggcgacgaccggcccttcttttggctgttcgagaatgtggtggccatgggagtcagcgacaagcgggatattagccggttcctggagagcaaccccgtgatgatcgatgccaaggaagtgagcgccgcccaccgggccagatacttctggggcaatctgcctggcatgaacagacccctggccagcaccgtgaacgacaagctggagctgcaggagtgcctggagcacggccggatcgccaagttcagcaaggtgagaaccatcaccacccgaagcaacagcatcaaacaaggcaaggaccagcactttcctgtgttcatgaacgagaaggaggacatcctgtggtgtaccgagatggagagagtgttcgggttcccagtccactacacagatgtcagcaacatgtctagactggccagacagagactgctgggaagaagctggtccgtccctgtgatcagacacctgttcgcccctctgaaggagtacttcgcctgcgtgagcagcggcaacagcaacgccaacagccggggccccagcttctctagcggcctggtgccactgtccctgagagggagccacatgggccccatggagatctacaaaaccgtgagcgcctggaagcggcagcctgtgcgcgtgctgagcctgtttcggaatatcgataaagtcctgaaaagcctgggattcctggagagcggctctggctccggcggtggcaccctgaagtacgtggaggatgtgacaaacgtggtcagacgggatgtggagaagtggggccccttcgatctggtgtacggcagcacccaacccctgggcagctcttgtgaccggtgccctggctggtacatgtttcagttccaccggatcctgcagtacgccctgccgagacaggagtcccagcggccattcttttggattttcatggacaacttgctgctgaccgaggatgaccaggaaactaccactcggttcctgcagaccgaagccgtgaccctgcaggacgtgagaggccgggactaccagaacgccatgcgggtgtggtccaacatccctggactgaaaagcaagcacgcacctctgacccctaaagaagaggagtacctgcaggcccaggtgcggagcagaagcaagctggacgcccctaaggtggatctgctggtgaagaattgcctcctgcccctgagagagtacttcaagtatttcagccagaatagtctgcccctgggaggcagcggcggcggcgccctggtgacatttgaggacgtcgccgtgcggttcacccaggaggaatgggctctgctggatccttctcagaaaatcctgtaccgggacgtgatgagagagacataccggaatctgacctccgtgggcatcaactgggaatgttgggaccttgaagcctgcttcagaagcctgggaagaaacctgagagtgcaggtggtgaagagaaagtgcgagctgaccaacagcggcccctgcgccgagggcggcccaagcagcggcgcccctcctcccagcggcggcagcccagccggctccccaacctctaccgaggagggcacctctgagtccgccacccccgagagcggccctggcacctccaccgagcccagcgagggcagcgcacccggcagccctgccggcagccccacctccacagaggagggaaccagcaccgagcccagcgaaggcagcgccccaggcaccagcaccgagcctagtgagcaggagattaaacggatcaacaagatcagaagaagacttgtgaaagacagcaacaccaagaaggccggcaagacaggccccatgaaaaccctgctggttagagtgatgacacccgatctgagagagcggctggaaaacctgagaaagaagcctgaaaatatcccccagcccatcagcaatacatctagagccaacctgaataagctgctgaccgattacaccgaaatgaagaaggcgatcctgcatgtgtactgggaagagttccagaaggaccctgtgggcctgatgagccgggtggcccagcctgccagcaagaagatcgatcagaacaagctgaaacctgagatggacgagaagggcaacctgaccaccgccggctttgcctgctctcagtgtggccagcccctgttcgtgtacaagctggagcaggtgtctgagaagggcaaggcttacaccaactacttcggacggtgcaatgtggccgagcacgaaaagctgatcctgctggcccagctgaagcccgagaaggatagcgacgaagccgtgacatatagcctgggaaagtttgggcagagggccctggatttctacagcattcatgtgaccaaggagtccacccaccccgtgaagcccctggcccagatcgccggaaacagatacgcctccggacctgtgggaaaggccctgagcgacgcatgtatgggcacaatcgcctccttcctgtctaagtaccaggacatcatcatcgaacaccagaaggtggtgaagggcaaccagaagagactggagagcctgcgggagctggccggcaaggaaaacctggaataccctagcgtgaccctgccacctcagcctcacaccaaggagggcgttgatgcctacaacgaagtgatcgcccgggtgcgaatgtgggtgaacctgaacctgtggcagaagctgaagctaagcagagatgatgccaagcctctgctgagactgaagggattcccttcctttcctctggtcgagagacaggccaacgaagtggactggtgggacatggtgtgtaacgtgaagaagctgatcaacgagaaaaaggaggatggcaaggtgttttggcagaatctggctggctacaagagacaggaagccctgagaccatacctgagcagcgaggaagatcggaagaagggaaagaaattcgctcggtaccagctgggcgacctgctgctgcacctggaaaagaagcacggcgaggactggggaaaggtgtacgacgaggcctgggagcggattgacaagaaagtggaaggcctgagcaagcacatcaagctggaagaggaacggagaagcgaggacgcccagagcaaggccgccctgaccgactggctgcgggctaaggccagcttcgtgatcgagggcctgaaggaggccgacaaggacgagttctgcagatgcgagctgaagctgcagaagtggtacggggacctgcggggaaagcccttcgccatcgaagccgagaacagcatcctggacatcagcggcttcagcaagcagtacaactgtgccttcatctggcagaaggacggcgtgaagaagctgaacctgtacctgatcatcaactacttcaagggcggcaagctgcggttcaagaagatcaaacctgaagccttcgaagccaacagattctacaccgtgatcaacaaaaagagcggcgagatcgtgcccatggaggtgaacttcaacttcgacgaccccaacctgatcatcctgcctctggcctttggcaagagacagggcagagaattcatctggaacgacctgctgtccctggaaaccggcagcctgaagctggccaacggaagagtgatcgagaagacactgtacaacagaagaacccggcaggatgagcctgccctgttcgtggccctgaccttcgagcggcgggaggtcctggactcctccaatatcaaaccaatgaacctgatcggcgtggcaagaggcgaaaacatccccgccgtgatcgccctgaccgaccccgagggctgcccactgagccggtttaaggatagcctgggaaacccaacccacatcctgagaatcggcgagagctataaggagaagcagcggaccatccaggccaagaaggaggtggagcagcggagagccggcggctacagccggaagtacgccagcaaagccaagaatctggcagacgatatggtgagaaacaccgctagagatctgctgtactacgccgtgacccaggatgccatgctgatcttcgccaacctgagccggggcttcggccggcagggcaagcggaccttcatggccgagagacagtacacacggatggaggactggctgaccgccaagctggcctacgagggcctgagcaagacctacctgtccaagacactggcccagtacacctccaagacatgcagcaactgtgggtttaccatcaccagcgccgactacgacagggtgctggagaagctgaagaagacagcaacaggctggatgaccacaattaacggcaaggagctgaaggtggagggccagattacctactacaacagatacaagagacagaacgtagtcaaggacctgtccgtcgagctggatagactgagcgaagaatctgtgaacaacgacatctcctcctggacaaagggcagaagcggagaagctctgagcctcctgaagaaaagattctcccatagacccgtgcaggagaagttcgtgtgcctgaactgcggcttcgagacacacgcagccgagcaagccgccctgaacatcgccagatcctggctgttcctgcggagccaggagtacaagaaataccagacaaacaagacaaccggcaacaccgataagagagccttcgtcgagacctggcagtccttttaccggaagaagcttaaggaggtgtggaaacctgccgtgcggtctggcggatctggcggaggctccaccgagaacgccgtgacctacgacgacgtgcacgtgggcttcacctgggaggagtgggccctgctggaccccagccagaagaacctgtacaaggacgtgatgctggacacctacaggaacctgaccaccatcggctacagctgggagggccacaacatcgaggagcacttccagagcagcaggaggcacgagaggcacaagaggagcgacaccggcgagaacagcagcgtgtacacccagtgcggcggcccaagcagcggcgcccctcctcccagcggcggcagcccagccggctccccaacctctaccgaggagggcacctctgagtccgccacccccgagagcggccctggcacctccaccgagcccagcgagggcagcgcacccggcagccctgccggcagccccacctccacagaggagggaaccagcaccgagcccagcgaaggcagcgccccaggcaccagcaccgagcctagtgagcaggagattaaacggatcaacaagatcagaagaagacttgtgaaagacagcaacaccaagaaggccggcaagacaggccccatgaaaaccctgctggttagagtgatgacacccgatctgagagagcggctggaaaacctgagaaagaagcctgaaaatatcccccagcccatcagcaatacatctagagccaacctgaataagctgctgaccgattacaccgaaatgaagaaggcgatcctgcatgtgtactgggaagagttccagaaggaccctgtgggcctgatgagccgggtggcccagcctgccagcaagaagatcgatcagaacaagctgaaacctgagatggacgagaagggcaacctgaccaccgccggctttgcctgctctcagtgtggccagcccctgttcgtgtacaagctggagcaggtgtctgagaagggcaaggcttacaccaactacttcggacggtgcaatgtggccgagcacgaaaagctgatcctgctggcccagctgaagcccgagaaggatagcgacgaagccgtgacatatagcctgggaaagtttgggcagagggccctggatttctacagcattcatgtgaccaaggagtccacccaccccgtgaagcccctggcccagatcgccggaaacagatacgcctccggacctgtgggaaaggccctgagcgacgcatgtatgggcacaatcgcctccttcctgtctaagtaccaggacatcatcatcgaacaccagaaggtggtgaagggcaaccagaagagactggagagcctgcgggagctggccggcaaggaaaacctggaataccctagcgtgaccctgccacctcagcctcacaccaaggagggcgttgatgcctacaacgaagtgatcgcccgggtgcgaatgtgggtgaacctgaacctgtggcagaagctgaagctaagcagagatgatgccaagcctctgctgagactgaagggattcccttcctttcctctggtcgagagacaggccaacgaagtggactggtgggacatggtgtgtaacgtgaagaagctgatcaacgagaaaaaggaggatggcaaggtgttttggcagaatctggctggctacaagagacaggaagccctgagaccatacctgagcagcgaggaagatcggaagaagggaaagaaattcgctcggtaccagctgggcgacctgctgctgcacctggaaaagaagcacggcgaggactggggaaaggtgtacgacgaggcctgggagcggattgacaagaaagtggaaggcctgagcaagcacatcaagctggaagaggaacggagaagcgaggacgcccagagcaaggccgccctgaccgactggctgcgggctaaggccagcttcgtgatcgagggcctgaaggaggccgacaaggacgagttctgcagatgcgagctgaagctgcagaagtggtacggggacctgcggggaaagcccttcgccatcgaagccgagaacagcatcctggacatcagcggcttcagcaagcagtacaactgtgccttcatctggcagaaggacggcgtgaagaagctgaacctgtacctgatcatcaactacttcaagggcggcaagctgcggttcaagaagatcaaacctgaagccttcgaagccaacagattctacaccgtgatcaacaaaaagagcggcgagatcgtgcccatggaggtgaacttcaacttcgacgaccccaacctgatcatcctgcctctggcctttggcaagagacagggcagagaattcatctggaacgacctgctgtccctggaaaccggcagcctgaagctggccaacggaagagtgatcgagaagacactgtacaacagaagaacccggcaggatgagcctgccctgttcgtggccctgaccttcgagcggcgggaggtcctggactcctccaatatcaaaccaatgaacctgatcggcgtggcaagaggcgaaaacatccccgccgtgatcgccctgaccgaccccgagggctgcccactgagccggtttaaggatagcctgggaaacccaacccacatcctgagaatcggcgagagctataaggagaagcagcggaccatccaggccaagaaggaggtggagcagcggagagccggcggctacagccggaagtacgccagcaaagccaagaatctggcagacgatatggtgagaaacaccgctagagatctgctgtactacgccgtgacccaggatgccatgctgatcttcgccaacctgagccggggcttcggccggcagggcaagcggaccttcatggccgagagacagtacacacggatggaggactggctgaccgccaagctggcctacgagggcctgagcaagacctacctgtccaagacactggcccagtacacctccaagacatgcagcaactgtgggtttaccatcaccagcgccgactacgacagggtgctggagaagctgaagaagacagcaacaggctggatgaccacaattaacggcaaggagctgaaggtggagggccagattacctactacaacagatacaagagacagaacgtagtcaaggacctgtccgtcgagctggatagactgagcgaagaatctgtgaacaacgacatctcctcctggacaaagggcagaagcggagaagctctgagcctcctgaagaaaagattctcccatagacccgtgcaggagaagttcgtgtgcctgaactgcggcttcgagacacacgcagccgagcaagccgccctgaacatcgccagatcctggctgttcctgcggagccaggagtacaagaaataccagacaaacaagacaaccggcaacaccgataagagagccttcgtcgagacctggcagtccttttaccggaagaagcttaaggaggtgtggaaacctgccgtgcggtctggcggatctggcggaggctcctaccgagaacgccgtgacctacgacgacgtgcacgtgggcttcacctgggaggagtgggccctgctggaccccagccagaagaacctgtacaaggacgtgatgctggacacctacaggaacctgaccaccatcggctacagctgggagggccacaacatcgaggagcacttccagagcagcaggaggcacgagaggcacaagaggagcgacaccggcgagaacagcagcgtgtacacccagtgcggatctggctccggcagcggccccaagaaaaagagaaaagtctaagctgccttctgcggggcttgccttctggccatgcccttcttctctcccttgcacctgtacctcttggtctttgaataaagcctgagtaggaaggctagcaaaaaaaaaaaaaaaaaaaaaaaaaaaaaaaaaaaaaaaaaaaaaaaaaaaaaaaaaaaaaaaaaaaaaaaaaaaaaaaa

SEQ ID NO: 15382 - RNA, 9485 nt, synthetic construct
  source 1..9485: mol_type = other RNA
aggaaataagagagaaaagaagagtaagaagaaatataagagccaccatggcccctaagaagaagcgtaaagtgagccggatggaacgcctcgtctacgaggtgcggcagaagtgcagaaacatcgaggacatctgcatctcctgcggatctctgaacgtgaccctggagcacccactgttcatcggcggcatgtgccagaactgtaaaaactgttttctggagtgtgcctatcaatacgacgatgacggctaccagagctactgcaccatctgttgcggcggaagagaggtgctgatgtgtggaaataacaactgctgccggtgcttctgcgtggaatgcgtggacctgctggtgggccccggcgccgcccaggccgctattaaggaagatccttggaactgctacatgtgcggccacaagggcacatacggcctgctgagacggagagaggactggcctagcagactgcagatgttcttcgccaataaccacgaccaggagttcgacccccctaaggtgtaccctcccgtccccgccgagaagagaaagcccatccgggtcctgagcctgttcgatggcatcgccaccggtctgctggtgctgaaggacctgggcatccaggtggataggtacattgcctccgaggtgtgcgaggactccatcaccgtgggaatggtgcgtcatcagggcaagatcatgtacgtgggcgacgtgcggagcgtgacacagaagcatatccaggagtggggccctttcgacctggtgatcggcggcagcccttgcaatgacctgagcatcgtgaacccagcccggaagggcctgtacgagggaaccggcagactgttcttcgagttttacagactgctgcacgacgcccggcctaaggaaggcgacgaccggcccttcttttggctgttcgagaatgtggtggccatgggagtcagcgacaagcgggatattagccggttcctggagagcaaccccgtgatgatcgatgccaaggaagtgagcgccgcccaccgggccagatacttctggggcaatctgcctggcatgaacagacccctggccagcaccgtgaacgacaagctggagctgcaggagtgcctggagcacggccggatcgccaagttcagcaaggtgagaaccatcaccacccgaagcaacagcatcaaacaaggcaaggaccagcactttcctgtgttcatgaacgagaaggaggacatcctgtggtgtaccgagatggagagagtgttcgggttcccagtccactacacagatgtcagcaacatgtctagactggccagacagagactgctgggaagaagctggtccgtccctgtgatcagacacctgttcgcccctctgaaggagtacttcgcctgcgtgagcagcggcaacagcaacgccaacagccggggccccagcttctctagcggcctggtgccactgtccctgagagggagccacatgggccccatggagatctacaaaaccgtgagcgcctggaagcggcagcctgtgcgcgtgctgagcctgtttcggaatatcgataaagtcctgaaaagcctgggattcctggagagcggctctggctccggcggtggcaccctgaagtacgtggaggatgtgacaaacgtggtcagacgggatgtggagaagtggggccccttcgatctggtgtacggcagcacccaacccctgggcagctcttgtgaccggtgccctggctggtacatgtttcagttccaccggatcctgcagtacgccctgccgagacaggagtcccagcggccattcttttggattttcatggacaacttgctgctgaccgaggatgaccaggaaactaccactcggttcctgcagaccgaagccgtgaccctgcaggacgtgagaggccgggactaccagaacgccatgcgggtgtggtccaacatccctggactgaaaagcaagcacgcacctctgacccctaaagaagaggagtacctgcaggcccaggtgcggagcagaagcaagctggacgcccctaaggtggatctgctggtgaagaattgcctcctgcccctgagagagtacttcaagtatttcagccagaatagtctgcccctgggaggcagcggcggcggcgccctggtgacatttgaggacgtcgccgtgcggttcacccaggaggaatgggctctgctggatccttctcagaaaatcctgtaccgggacgtgatgagagagacataccggaatctgacctccgtgggcatcaactgggaatgttgggaccttgaagcctgcttcagaagcctgggaagaaacctgagagtgcaggtggtgaagagaaagtgcgagctgaccaacagcggcccctgcgccgagggcggcccaagcagcggcgcccctcctcccagcggcggcagcccagccggctccccaacctctaccgaggagggcacctctgagtccgccacccccgagagcggccctggcacctccaccgagcccagcgagggcagcgcacccggcagccctgccggcagccccacctccacagaggagggaaccagcaccgagcccagcgaaggcagcgccccaggcaccagcaccgagcctagtgagcaggagattaaacggatcaacaagatcagaagaagacttgtgaaagacagcaacaccaagaaggccggcaagacaggccccatgaaaaccctgctggttagagtgatgacacccgatctgagagagcggctggaaaacctgagaaagaagcctgaaaatatcccccagcccatcagcaatacatctagagccaacctgaataagctgctgaccgattacaccgaaatgaagaaggcgatcctgcatgtgtactgggaagagttccagaaggaccctgtgggcctgatgagccgggtggcccagcctgccagcaagaagatcgatcagaacaagctgaaacctgagatggacgagaagggcaacctgaccaccgccggctttgcctgctctcagtgtggccagcccctgttcgtgtacaagctggagcaggtgtctgagaagggcaaggcttacaccaactacttcggacggtgcaatgtggccgagcacgaaaagctgatcctgctggcccagctgaagcccgagaaggatagcgacgaagccgtgacatatagcctgggaaagtttgggcagagggccctggatttctacagcattcatgtgaccaaggagtccacccaccccgtgaagcccctggcccagatcgccggaaacagatacgcctccggacctgtgggaaaggccctgagcgacgcatgtatgggcacaatcgcctccttcctgtctaagtaccaggacatcatcatcgaacaccagaaggtggtgaagggcaaccagaagagactggagagcctgcgggagctggccggcaaggaaaacctggaataccctagcgtgaccctgccacctcagcctcacaccaaggagggcgttgatgcctacaacgaagtgatcgcccgggtgcgaatgtgggtgaacctgaacctgtggcagaagctgaagctaagcagagatgatgccaagcctctgctgagactgaagggattcccttcctttcctctggtcgagagacaggccaacgaagtggactggtgggacatggtgtgtaacgtgaagaagctgatcaacgagaaaaaggaggatggcaaggtgttttggcagaatctggctggctacaagagacaggaagccctgagaccatacctgagcagcgaggaagatcggaagaagggaaagaaattcgctcggtaccagctgggcgacctgctgctgcacctggaaaagaagcacggcgaggactggggaaaggtgtacgacgaggcctgggagcggattgacaagaaagtggaaggcctgagcaagcacatcaagctggaagaggaacggagaagcgaggacgcccagagcaaggccgccctgaccgactggctgcgggctaaggccagcttcgtgatcgagggcctgaaggaggccgacaaggacgagttctgcagatgcgagctgaagctgcagaagtggtacggggacctgcggggaaagcccttcgccatcgaagccgagaacagcatcctggacatcagcggcttcagcaagcagtacaactgtgccttcatctggcagaaggacggcgtgaagaagctgaacctgtacctgatcatcaactacttcaagggcggcaagctgcggttcaagaagatcaaacctgaagccttcgaagccaacagattctacaccgtgatcaacaaaaagagcggcgagatcgtgcccatggaggtgaacttcaacttcgacgaccccaacctgatcatcctgcctctggcctttggcaagagacagggcagagaattcatctggaacgacctgctgtccctggaaaccggcagcctgaagctggccaacggaagagtgatcgagaagacactgtacaacagaagaacccggcaggatgagcctgccctgttcgtggccctgaccttcgagcggcgggaggtcctggactcctccaatatcaaaccaatgaacctgatcggcgtggcaagaggcgaaaacatccccgccgtgatcgccctgaccgaccccgagggctgcccactgagccggtttaaggatagcctgggaaacccaacccacatcctgagaatcggcgagagctataaggagaagcagcggaccatccaggccaagaaggaggtggagcagcggagagccggcggctacagccggaagtacgccagcaaagccaagaatctggcagacgatatggtgagaaacaccgctagagatctgctgtactacgccgtgacccaggatgccatgctgatcttcgccaacctgagccggggcttcggccggcagggcaagcggaccttcatggccgagagacagtacacacggatggaggactggctgaccgccaagctggcctacgagggcctgagcaagacctacctgtccaagacactggcccagtacacctccaagacatgcagcaactgtgggtttaccatcaccagcgccgactacgacagggtgctggagaagctgaagaagacagcaacaggctggatgaccacaattaacggcaaggagctgaaggtggagggccagattacctactacaacagatacaagagacagaacgtagtcaaggacctgtccgtcgagctggatagactgagcgaagaatctgtgaacaacgacatctcctcctggacaaagggcagaagcggagaagctctgagcctcctgaagaaaagattctcccatagacccgtgcaggagaagttcgtgtgcctgaactgcggcttcgagacacacgcagccgagcaagccgccctgaacatcgccagatcctggctgttcctgcggagccaggagtacaagaaataccagacaaacaagacaaccggcaacaccgataagagagccttcgtcgagacctggcagtccttttaccggaagaagcttaaggaggtgtggaaacctgccgtgcggtctggcggatctggcggaggctccagccagggcctggtgaccttcggcgacgtggccgtggacttcagccaggaggagtgggagtggctgaaccccatccagaggaacctgtacaggaaggtgatgctggagaactacaggaacctggcctggctgggcctgtgcgtgagcaagcccgacgtgatcagcagcctggagcagggcaaggagccctggaccgtgaagaggaagatgaccagggcctggtgccccgacctgaaggccgtgggcggcccaagcagcggcgcccctcctcccagcggcggcagcccagccggctccccaacctctaccgaggagggcacctctgagtccgccacccccgagagcggccctggcacctccaccgagcccagcgagggcagcgcacccggcagccctgccggcagccccacctccacagaggagggaaccagcaccgagcccagcgaaggcagcgccccaggcaccagcaccgagcctagtgagcaggagattaaacggatcaacaagatcagaagaagacttgtgaaagacagcaacaccaagaaggccggcaagacaggccccatgaaaaccctgctggttagagtgatgacacccgatctgagagagcggctggaaaacctgagaaagaagcctgaaaatatcccccagcccatcagcaatacatctagagccaacctgaataagctgctgaccgattacaccgaaatgaagaaggcgatcctgcatgtgtactgggaagagttccagaaggaccctgtgggcctgatgagccgggtggcccagcctgccagcaagaagatcgatcagaacaagctgaaacctgagatggacgagaagggcaacctgaccaccgccggctttgcctgctctcagtgtggccagcccctgttcgtgtacaagctggagcaggtgtctgagaagggcaaggcttacaccaactacttcggacggtgcaatgtggccgagcacgaaaagctgatcctgctggcccagctgaagcccgagaaggatagcgacgaagccgtgacatatagcctgggaaagtttgggcagagggccctggatttctacagcattcatgtgaccaaggagtccacccaccccgtgaagcccctggcccagatcgccggaaacagatacgcctccggacctgtgggaaaggccctgagcgacgcatgtatgggcacaatcgcctccttcctgtctaagtaccaggacatcatcatcgaacaccagaaggtggtgaagggcaaccagaagagactggagagcctgcgggagctggccggcaaggaaaacctggaataccctagcgtgaccctgccacctcagcctcacaccaaggagggcgttgatgcctacaacgaagtgatcgcccgggtgcgaatgtgggtgaacctgaacctgtggcagaagctgaagctaagcagagatgatgccaagcctctgctgagactgaagggattcccttcctttcctctggtcgagagacaggccaacgaagtggactggtgggacatggtgtgtaacgtgaagaagctgatcaacgagaaaaaggaggatggcaaggtgttttggcagaatctggctggctacaagagacaggaagccctgagaccatacctgagcagcgaggaagatcggaagaagggaaagaaattcgctcggtaccagctgggcgacctgctgctgcacctggaaaagaagcacggcgaggactggggaaaggtgtacgacgaggcctgggagcggattgacaagaaagtggaaggcctgagcaagcacatcaagctggaagaggaacggagaagcgaggacgcccagagcaaggccgccctgaccgactggctgcgggctaaggccagcttcgtgatcgagggcctgaaggaggccgacaaggacgagttctgcagatgcgagctgaagctgcagaagtggtacggggacctgcggggaaagcccttcgccatcgaagccgagaacagcatcctggacatcagcggcttcagcaagcagtacaactgtgccttcatctggcagaaggacggcgtgaagaagctgaacctgtacctgatcatcaactacttcaagggcggcaagctgcggttcaagaagatcaaacctgaagccttcgaagccaacagattctacaccgtgatcaacaaaaagagcggcgagatcgtgcccatggaggtgaacttcaacttcgacgaccccaacctgatcatcctgcctctggcctttggcaagagacagggcagagaattcatctggaacgacctgctgtccctggaaaccggcagcctgaagctggccaacggaagagtgatcgagaagacactgtacaacagaagaacccggcaggatgagcctgccctgttcgtggccctgaccttcgagcggcgggaggtcctggactcctccaatatcaaaccaatgaacctgatcggcgtggcaagaggcgaaaacatccccgccgtgatcgccctgaccgaccccgagggctgcccactgagccggtttaaggatagcctgggaaacccaacccacatcctgagaatcggcgagagctataaggagaagcagcggaccatccaggccaagaaggaggtggagcagcggagagccggcggctacagccggaagtacgccagcaaagccaagaatctggcagacgatatggtgagaaacaccgctagagatctgctgtactacgccgtgacccaggatgccatgctgatcttcgccaacctgagccggggcttcggccggcagggcaagcggaccttcatggccgagagacagtacacacggatggaggactggctgaccgccaagctggcctacgagggcctgagcaagacctacctgtccaagacactggcccagtacacctccaagacatgcagcaactgtgggtttaccatcaccagcgccgactacgacagggtgctggagaagctgaagaagacagcaacaggctggatgaccacaattaacggcaaggagctgaaggtggagggccagattacctactacaacagatacaagagacagaacgtagtcaaggacctgtccgtcgagctggatagactgagcgaagaatctgtgaacaacgacatctcctcctggacaaagggcagaagcggagaagctctgagcctcctgaagaaaagattctcccatagacccgtgcaggagaagttcgtgtgcctgaactgcggcttcgagacacacgcagccgagcaagccgccctgaacatcgccagatcctggctgttcctgcggagccaggagtacaagaaataccagacaaacaagacaaccggcaacaccgataagagagccttcgtcgagacctggcagtccttttaccggaagaagcttaaggaggtgtggaaacctgccgtgcggtctggcggatctggcggaggctcctagccagggcctggtgaccttcggcgacgtggccgtggacttcagccaggaggagtgggagtggctgaaccccatccagaggaacctgtacaggaaggtgatgctggagaactacaggaacctggcctggctgggcctgtgcgtgagcaagcccgacgtgatcagcagcctggagcagggcaaggagccctggaccgtgaagaggaagatgaccagggcctggtgccccgacctgaaggccgtgggatctggctccggcagcggccccaagaaaaagagaaaagtctaagctgccttctgcggggcttgccttctggccatgcccttcttctctcccttgcacctgtacctcttggtctttgaataaagcctgagtaggaaggctagcaaaaaaaaaaaaaaaaaaaaaaaaaaaaaaaaaaaaaaaaaaaaaaaaaaaaaaaaaaaaaaaaaaaaaaaaaaaaaaaa

SEQ ID NO: 15383 - RNA, 9485 nt, synthetic construct
  source 1..9485: mol_type = other RNA
aggaaataagagagaaaagaagagtaagaagaaatataagagccaccatggcccctaagaagaagcgtaaagtgagccggatggaacgcctcgtctacgaggtgcggcagaagtgcagaaacatcgaggacatctgcatctcctgcggatctctgaacgtgaccctggagcacccactgttcatcggcggcatgtgccagaactgtaaaaactgttttctggagtgtgcctatcaatacgacgatgacggctaccagagctactgcaccatctgttgcggcggaagagaggtgctgatgtgtggaaataacaactgctgccggtgcttctgcgtggaatgcgtggacctgctggtgggccccggcgccgcccaggccgctattaaggaagatccttggaactgctacatgtgcggccacaagggcacatacggcctgctgagacggagagaggactggcctagcagactgcagatgttcttcgccaataaccacgaccaggagttcgacccccctaaggtgtaccctcccgtccccgccgagaagagaaagcccatccgggtcctgagcctgttcgatggcatcgccaccggtctgctggtgctgaaggacctgggcatccaggtggataggtacattgcctccgaggtgtgcgaggactccatcaccgtgggaatggtgcgtcatcagggcaagatcatgtacgtgggcgacgtgcggagcgtgacacagaagcatatccaggagtggggccctttcgacctggtgatcggcggcagcccttgcaatgacctgagcatcgtgaacccagcccggaagggcctgtacgagggaaccggcagactgttcttcgagttttacagactgctgcacgacgcccggcctaaggaaggcgacgaccggcccttcttttggctgttcgagaatgtggtggccatgggagtcagcgacaagcgggatattagccggttcctggagagcaaccccgtgatgatcgatgccaaggaagtgagcgccgcccaccgggccagatacttctggggcaatctgcctggcatgaacagacccctggccagcaccgtgaacgacaagctggagctgcaggagtgcctggagcacggccggatcgccaagttcagcaaggtgagaaccatcaccacccgaagcaacagcatcaaacaaggcaaggaccagcactttcctgtgttcatgaacgagaaggaggacatcctgtggtgtaccgagatggagagagtgttcgggttcccagtccactacacagatgtcagcaacatgtctagactggccagacagagactgctgggaagaagctggtccgtccctgtgatcagacacctgttcgcccctctgaaggagtacttcgcctgcgtgagcagcggcaacagcaacgccaacagccggggccccagcttctctagcggcctggtgccactgtccctgagagggagccacatgggccccatggagatctacaaaaccgtgagcgcctggaagcggcagcctgtgcgcgtgctgagcctgtttcggaatatcgataaagtcctgaaaagcctgggattcctggagagcggctctggctccggcggtggcaccctgaagtacgtggaggatgtgacaaacgtggtcagacgggatgtggagaagtggggccccttcgatctggtgtacggcagcacccaacccctgggcagctcttgtgaccggtgccctggctggtacatgtttcagttccaccggatcctgcagtacgccctgccgagacaggagtcccagcggccattcttttggattttcatggacaacttgctgctgaccgaggatgaccaggaaactaccactcggttcctgcagaccgaagccgtgaccctgcaggacgtgagaggccgggactaccagaacgccatgcgggtgtggtccaacatccctggactgaaaagcaagcacgcacctctgacccctaaagaagaggagtacctgcaggcccaggtgcggagcagaagcaagctggacgcccctaaggtggatctgctggtgaagaattgcctcctgcccctgagagagtacttcaagtatttcagccagaatagtctgcccctgggaggcagcggcggcggcgccctggtgacatttgaggacgtcgccgtgcggttcacccaggaggaatgggctctgctggatccttctcagaaaatcctgtaccgggacgtgatgagagagacataccggaatctgacctccgtgggcatcaactgggaatgttgggaccttgaagcctgcttcagaagcctgggaagaaacctgagagtgcaggtggtgaagagaaagtgcgagctgaccaacagcggcccctgcgccgagggcggcccaagcagcggcgcccctcctcccagcggcggcagcccagccggctccccaacctctaccgaggagggcacctctgagtccgccacccccgagagcggccctggcacctccaccgagcccagcgagggcagcgcacccggcagccctgccggcagccccacctccacagaggagggaaccagcaccgagcccagcgaaggcagcgccccaggcaccagcaccgagcctagtgagcaggagattaaacggatcaacaagatcagaagaagacttgtgaaagacagcaacaccaagaaggccggcaagacaggccccatgaaaaccctgctggttagagtgatgacacccgatctgagagagcggctggaaaacctgagaaagaagcctgaaaatatcccccagcccatcagcaatacatctagagccaacctgaataagctgctgaccgattacaccgaaatgaagaaggcgatcctgcatgtgtactgggaagagttccagaaggaccctgtgggcctgatgagccgggtggcccagcctgccagcaagaagatcgatcagaacaagctgaaacctgagatggacgagaagggcaacctgaccaccgccggctttgcctgctctcagtgtggccagcccctgttcgtgtacaagctggagcaggtgtctgagaagggcaaggcttacaccaactacttcggacggtgcaatgtggccgagcacgaaaagctgatcctgctggcccagctgaagcccgagaaggatagcgacgaagccgtgacatatagcctgggaaagtttgggcagagggccctggatttctacagcattcatgtgaccaaggagtccacccaccccgtgaagcccctggcccagatcgccggaaacagatacgcctccggacctgtgggaaaggccctgagcgacgcatgtatgggcacaatcgcctccttcctgtctaagtaccaggacatcatcatcgaacaccagaaggtggtgaagggcaaccagaagagactggagagcctgcgggagctggccggcaaggaaaacctggaataccctagcgtgaccctgccacctcagcctcacaccaaggagggcgttgatgcctacaacgaagtgatcgcccgggtgcgaatgtgggtgaacctgaacctgtggcagaagctgaagctaagcagagatgatgccaagcctctgctgagactgaagggattcccttcctttcctctggtcgagagacaggccaacgaagtggactggtgggacatggtgtgtaacgtgaagaagctgatcaacgagaaaaaggaggatggcaaggtgttttggcagaatctggctggctacaagagacaggaagccctgagaccatacctgagcagcgaggaagatcggaagaagggaaagaaattcgctcggtaccagctgggcgacctgctgctgcacctggaaaagaagcacggcgaggactggggaaaggtgtacgacgaggcctgggagcggattgacaagaaagtggaaggcctgagcaagcacatcaagctggaagaggaacggagaagcgaggacgcccagagcaaggccgccctgaccgactggctgcgggctaaggccagcttcgtgatcgagggcctgaaggaggccgacaaggacgagttctgcagatgcgagctgaagctgcagaagtggtacggggacctgcggggaaagcccttcgccatcgaagccgagaacagcatcctggacatcagcggcttcagcaagcagtacaactgtgccttcatctggcagaaggacggcgtgaagaagctgaacctgtacctgatcatcaactacttcaagggcggcaagctgcggttcaagaagatcaaacctgaagccttcgaagccaacagattctacaccgtgatcaacaaaaagagcggcgagatcgtgcccatggaggtgaacttcaacttcgacgaccccaacctgatcatcctgcctctggcctttggcaagagacagggcagagaattcatctggaacgacctgctgtccctggaaaccggcagcctgaagctggccaacggaagagtgatcgagaagacactgtacaacagaagaacccggcaggatgagcctgccctgttcgtggccctgaccttcgagcggcgggaggtcctggactcctccaatatcaaaccaatgaacctgatcggcgtggcaagaggcgaaaacatccccgccgtgatcgccctgaccgaccccgagggctgcccactgagccggtttaaggatagcctgggaaacccaacccacatcctgagaatcggcgagagctataaggagaagcagcggaccatccaggccaagaaggaggtggagcagcggagagccggcggctacagccggaagtacgccagcaaagccaagaatctggcagacgatatggtgagaaacaccgctagagatctgctgtactacgccgtgacccaggatgccatgctgatcttcgccaacctgagccggggcttcggccggcagggcaagcggaccttcatggccgagagacagtacacacggatggaggactggctgaccgccaagctggcctacgagggcctgagcaagacctacctgtccaagacactggcccagtacacctccaagacatgcagcaactgtgggtttaccatcaccagcgccgactacgacagggtgctggagaagctgaagaagacagcaacaggctggatgaccacaattaacggcaaggagctgaaggtggagggccagattacctactacaacagatacaagagacagaacgtagtcaaggacctgtccgtcgagctggatagactgagcgaagaatctgtgaacaacgacatctcctcctggacaaagggcagaagcggagaagctctgagcctcctgaagaaaagattctcccatagacccgtgcaggagaagttcgtgtgcctgaactgcggcttcgagacacacgcagccgagcaagccgccctgaacatcgccagatcctggctgttcctgcggagccaggagtacaagaaataccagacaaacaagacaaccggcaacaccgataagagagccttcgtcgagacctggcagtccttttaccggaagaagcttaaggaggtgtggaaacctgccgtgcggtctggcggatctggcggaggctccagccaggagagcgtggccttcgaggacgtggccgtgtacttcaccaccaaggagtgggccatcatggtgcccgccgagagggccctgtacagggacgtgatgctggagaactacgaggccgtggccttcgtggtgccccccaccagcaagcccgccctggtgagccacctggagcagggcaaggagagctgcttcatcaggccccaggtggtgctgagcaggagcgactggagggccggcctgggcggcccaagcagcggcgcccctcctcccagcggcggcagcccagccggctccccaacctctaccgaggagggcacctctgagtccgccacccccgagagcggccctggcacctccaccgagcccagcgagggcagcgcacccggcagccctgccggcagccccacctccacagaggagggaaccagcaccgagcccagcgaaggcagcgccccaggcaccagcaccgagcctagtgagcaggagattaaacggatcaacaagatcagaagaagacttgtgaaagacagcaacaccaagaaggccggcaagacaggccccatgaaaaccctgctggttagagtgatgacacccgatctgagagagcggctggaaaacctgagaaagaagcctgaaaatatcccccagcccatcagcaatacatctagagccaacctgaataagctgctgaccgattacaccgaaatgaagaaggcgatcctgcatgtgtactgggaagagttccagaaggaccctgtgggcctgatgagccgggtggcccagcctgccagcaagaagatcgatcagaacaagctgaaacctgagatggacgagaagggcaacctgaccaccgccggctttgcctgctctcagtgtggccagcccctgttcgtgtacaagctggagcaggtgtctgagaagggcaaggcttacaccaactacttcggacggtgcaatgtggccgagcacgaaaagctgatcctgctggcccagctgaagcccgagaaggatagcgacgaagccgtgacatatagcctgggaaagtttgggcagagggccctggatttctacagcattcatgtgaccaaggagtccacccaccccgtgaagcccctggcccagatcgccggaaacagatacgcctccggacctgtgggaaaggccctgagcgacgcatgtatgggcacaatcgcctccttcctgtctaagtaccaggacatcatcatcgaacaccagaaggtggtgaagggcaaccagaagagactggagagcctgcgggagctggccggcaaggaaaacctggaataccctagcgtgaccctgccacctcagcctcacaccaaggagggcgttgatgcctacaacgaagtgatcgcccgggtgcgaatgtgggtgaacctgaacctgtggcagaagctgaagctaagcagagatgatgccaagcctctgctgagactgaagggattcccttcctttcctctggtcgagagacaggccaacgaagtggactggtgggacatggtgtgtaacgtgaagaagctgatcaacgagaaaaaggaggatggcaaggtgttttggcagaatctggctggctacaagagacaggaagccctgagaccatacctgagcagcgaggaagatcggaagaagggaaagaaattcgctcggtaccagctgggcgacctgctgctgcacctggaaaagaagcacggcgaggactggggaaaggtgtacgacgaggcctgggagcggattgacaagaaagtggaaggcctgagcaagcacatcaagctggaagaggaacggagaagcgaggacgcccagagcaaggccgccctgaccgactggctgcgggctaaggccagcttcgtgatcgagggcctgaaggaggccgacaaggacgagttctgcagatgcgagctgaagctgcagaagtggtacggggacctgcggggaaagcccttcgccatcgaagccgagaacagcatcctggacatcagcggcttcagcaagcagtacaactgtgccttcatctggcagaaggacggcgtgaagaagctgaacctgtacctgatcatcaactacttcaagggcggcaagctgcggttcaagaagatcaaacctgaagccttcgaagccaacagattctacaccgtgatcaacaaaaagagcggcgagatcgtgcccatggaggtgaacttcaacttcgacgaccccaacctgatcatcctgcctctggcctttggcaagagacagggcagagaattcatctggaacgacctgctgtccctggaaaccggcagcctgaagctggccaacggaagagtgatcgagaagacactgtacaacagaagaacccggcaggatgagcctgccctgttcgtggccctgaccttcgagcggcgggaggtcctggactcctccaatatcaaaccaatgaacctgatcggcgtggcaagaggcgaaaacatccccgccgtgatcgccctgaccgaccccgagggctgcccactgagccggtttaaggatagcctgggaaacccaacccacatcctgagaatcggcgagagctataaggagaagcagcggaccatccaggccaagaaggaggtggagcagcggagagccggcggctacagccggaagtacgccagcaaagccaagaatctggcagacgatatggtgagaaacaccgctagagatctgctgtactacgccgtgacccaggatgccatgctgatcttcgccaacctgagccggggcttcggccggcagggcaagcggaccttcatggccgagagacagtacacacggatggaggactggctgaccgccaagctggcctacgagggcctgagcaagacctacctgtccaagacactggcccagtacacctccaagacatgcagcaactgtgggtttaccatcaccagcgccgactacgacagggtgctggagaagctgaagaagacagcaacaggctggatgaccacaattaacggcaaggagctgaaggtggagggccagattacctactacaacagatacaagagacagaacgtagtcaaggacctgtccgtcgagctggatagactgagcgaagaatctgtgaacaacgacatctcctcctggacaaagggcagaagcggagaagctctgagcctcctgaagaaaagattctcccatagacccgtgcaggagaagttcgtgtgcctgaactgcggcttcgagacacacgcagccgagcaagccgccctgaacatcgccagatcctggctgttcctgcggagccaggagtacaagaaataccagacaaacaagacaaccggcaacaccgataagagagccttcgtcgagacctggcagtccttttaccggaagaagcttaaggaggtgtggaaacctgccgtgcggtctggcggatctggcggaggctcctagccaggagagcgtggccttcgaggacgtggccgtgtacttcaccaccaaggagtgggccatcatggtgcccgccgagagggccctgtacagggacgtgatgctggagaactacgaggccgtggccttcgtggtgccccccaccagcaagcccgccctggtgagccacctggagcagggcaaggagagctgcttcatcaggccccaggtggtgctgagcaggagcgactggagggccggcctgggatctggctccggcagcggccccaagaaaaagagaaaagtctaagctgccttctgcggggcttgccttctggccatgcccttcttctctcccttgcacctgtacctcttggtctttgaataaagcctgagtaggaaggctagcaaaaaaaaaaaaaaaaaaaaaaaaaaaaaaaaaaaaaaaaaaaaaaaaaaaaaaaaaaaaaaaaaaaaaaaaaaaaaaaa

SEQ ID NO: 15384 - RNA, 9485 nt, synthetic construct
  source 1..9485: mol_type = other RNA
aggaaataagagagaaaagaagagtaagaagaaatataagagccaccatggcccctaagaagaagcgtaaagtgagccggatggaacgcctcgtctacgaggtgcggcagaagtgcagaaacatcgaggacatctgcatctcctgcggatctctgaacgtgaccctggagcacccactgttcatcggcggcatgtgccagaactgtaaaaactgttttctggagtgtgcctatcaatacgacgatgacggctaccagagctactgcaccatctgttgcggcggaagagaggtgctgatgtgtggaaataacaactgctgccggtgcttctgcgtggaatgcgtggacctgctggtgggccccggcgccgcccaggccgctattaaggaagatccttggaactgctacatgtgcggccacaagggcacatacggcctgctgagacggagagaggactggcctagcagactgcagatgttcttcgccaataaccacgaccaggagttcgacccccctaaggtgtaccctcccgtccccgccgagaagagaaagcccatccgggtcctgagcctgttcgatggcatcgccaccggtctgctggtgctgaaggacctgggcatccaggtggataggtacattgcctccgaggtgtgcgaggactccatcaccgtgggaatggtgcgtcatcagggcaagatcatgtacgtgggcgacgtgcggagcgtgacacagaagcatatccaggagtggggccctttcgacctggtgatcggcggcagcccttgcaatgacctgagcatcgtgaacccagcccggaagggcctgtacgagggaaccggcagactgttcttcgagttttacagactgctgcacgacgcccggcctaaggaaggcgacgaccggcccttcttttggctgttcgagaatgtggtggccatgggagtcagcgacaagcgggatattagccggttcctggagagcaaccccgtgatgatcgatgccaaggaagtgagcgccgcccaccgggccagatacttctggggcaatctgcctggcatgaacagacccctggccagcaccgtgaacgacaagctggagctgcaggagtgcctggagcacggccggatcgccaagttcagcaaggtgagaaccatcaccacccgaagcaacagcatcaaacaaggcaaggaccagcactttcctgtgttcatgaacgagaaggaggacatcctgtggtgtaccgagatggagagagtgttcgggttcccagtccactacacagatgtcagcaacatgtctagactggccagacagagactgctgggaagaagctggtccgtccctgtgatcagacacctgttcgcccctctgaaggagtacttcgcctgcgtgagcagcggcaacagcaacgccaacagccggggccccagcttctctagcggcctggtgccactgtccctgagagggagccacatgggccccatggagatctacaaaaccgtgagcgcctggaagcggcagcctgtgcgcgtgctgagcctgtttcggaatatcgataaagtcctgaaaagcctgggattcctggagagcggctctggctccggcggtggcaccctgaagtacgtggaggatgtgacaaacgtggtcagacgggatgtggagaagtggggccccttcgatctggtgtacggcagcacccaacccctgggcagctcttgtgaccggtgccctggctggtacatgtttcagttccaccggatcctgcagtacgccctgccgagacaggagtcccagcggccattcttttggattttcatggacaacttgctgctgaccgaggatgaccaggaaactaccactcggttcctgcagaccgaagccgtgaccctgcaggacgtgagaggccgggactaccagaacgccatgcgggtgtggtccaacatccctggactgaaaagcaagcacgcacctctgacccctaaagaagaggagtacctgcaggcccaggtgcggagcagaagcaagctggacgcccctaaggtggatctgctggtgaagaattgcctcctgcccctgagagagtacttcaagtatttcagccagaatagtctgcccctgggaggcagcggcggcggcgccctggtgacatttgaggacgtcgccgtgcggttcacccaggaggaatgggctctgctggatccttctcagaaaatcctgtaccgggacgtgatgagagagacataccggaatctgacctccgtgggcatcaactgggaatgttgggaccttgaagcctgcttcagaagcctgggaagaaacctgagagtgcaggtggtgaagagaaagtgcgagctgaccaacagcggcccctgcgccgagggcggcccaagcagcggcgcccctcctcccagcggcggcagcccagccggctccccaacctctaccgaggagggcacctctgagtccgccacccccgagagcggccctggcacctccaccgagcccagcgagggcagcgcacccggcagccctgccggcagccccacctccacagaggagggaaccagcaccgagcccagcgaaggcagcgccccaggcaccagcaccgagcctagtgagcaggagattaaacggatcaacaagatcagaagaagacttgtgaaagacagcaacaccaagaaggccggcaagacaggccccatgaaaaccctgctggttagagtgatgacacccgatctgagagagcggctggaaaacctgagaaagaagcctgaaaatatcccccagcccatcagcaatacatctagagccaacctgaataagctgctgaccgattacaccgaaatgaagaaggcgatcctgcatgtgtactgggaagagttccagaaggaccctgtgggcctgatgagccgggtggcccagcctgccagcaagaagatcgatcagaacaagctgaaacctgagatggacgagaagggcaacctgaccaccgccggctttgcctgctctcagtgtggccagcccctgttcgtgtacaagctggagcaggtgtctgagaagggcaaggcttacaccaactacttcggacggtgcaatgtggccgagcacgaaaagctgatcctgctggcccagctgaagcccgagaaggatagcgacgaagccgtgacatatagcctgggaaagtttgggcagagggccctggatttctacagcattcatgtgaccaaggagtccacccaccccgtgaagcccctggcccagatcgccggaaacagatacgcctccggacctgtgggaaaggccctgagcgacgcatgtatgggcacaatcgcctccttcctgtctaagtaccaggacatcatcatcgaacaccagaaggtggtgaagggcaaccagaagagactggagagcctgcgggagctggccggcaaggaaaacctggaataccctagcgtgaccctgccacctcagcctcacaccaaggagggcgttgatgcctacaacgaagtgatcgcccgggtgcgaatgtgggtgaacctgaacctgtggcagaagctgaagctaagcagagatgatgccaagcctctgctgagactgaagggattcccttcctttcctctggtcgagagacaggccaacgaagtggactggtgggacatggtgtgtaacgtgaagaagctgatcaacgagaaaaaggaggatggcaaggtgttttggcagaatctggctggctacaagagacaggaagccctgagaccatacctgagcagcgaggaagatcggaagaagggaaagaaattcgctcggtaccagctgggcgacctgctgctgcacctggaaaagaagcacggcgaggactggggaaaggtgtacgacgaggcctgggagcggattgacaagaaagtggaaggcctgagcaagcacatcaagctggaagaggaacggagaagcgaggacgcccagagcaaggccgccctgaccgactggctgcgggctaaggccagcttcgtgatcgagggcctgaaggaggccgacaaggacgagttctgcagatgcgagctgaagctgcagaagtggtacggggacctgcggggaaagcccttcgccatcgaagccgagaacagcatcctggacatcagcggcttcagcaagcagtacaactgtgccttcatctggcagaaggacggcgtgaagaagctgaacctgtacctgatcatcaactacttcaagggcggcaagctgcggttcaagaagatcaaacctgaagccttcgaagccaacagattctacaccgtgatcaacaaaaagagcggcgagatcgtgcccatggaggtgaacttcaacttcgacgaccccaacctgatcatcctgcctctggcctttggcaagagacagggcagagaattcatctggaacgacctgctgtccctggaaaccggcagcctgaagctggccaacggaagagtgatcgagaagacactgtacaacagaagaacccggcaggatgagcctgccctgttcgtggccctgaccttcgagcggcgggaggtcctggactcctccaatatcaaaccaatgaacctgatcggcgtggcaagaggcgaaaacatccccgccgtgatcgccctgaccgaccccgagggctgcccactgagccggtttaaggatagcctgggaaacccaacccacatcctgagaatcggcgagagctataaggagaagcagcggaccatccaggccaagaaggaggtggagcagcggagagccggcggctacagccggaagtacgccagcaaagccaagaatctggcagacgatatggtgagaaacaccgctagagatctgctgtactacgccgtgacccaggatgccatgctgatcttcgccaacctgagccggggcttcggccggcagggcaagcggaccttcatggccgagagacagtacacacggatggaggactggctgaccgccaagctggcctacgagggcctgagcaagacctacctgtccaagacactggcccagtacacctccaagacatgcagcaactgtgggtttaccatcaccagcgccgactacgacagggtgctggagaagctgaagaagacagcaacaggctggatgaccacaattaacggcaaggagctgaaggtggagggccagattacctactacaacagatacaagagacagaacgtagtcaaggacctgtccgtcgagctggatagactgagcgaagaatctgtgaacaacgacatctcctcctggacaaagggcagaagcggagaagctctgagcctcctgaagaaaagattctcccatagacccgtgcaggagaagttcgtgtgcctgaactgcggcttcgagacacacgcagccgagcaagccgccctgaacatcgccagatcctggctgttcctgcggagccaggagtacaagaaataccagacaaacaagacaaccggcaacaccgataagagagccttcgtcgagacctggcagtccttttaccggaagaagcttaaggaggtgtggaaacctgccgtgcggtctggcggatctggcggaggctccatggtgagcttcgaggacgtggccgtgctgctgagccaggaggagtgggactgcctgatccccgcccagaggggcctgtacagggacgtgatgctggagacctacggcaacctggtgagcctgggcctgcaggccagcaagcccgacgtgatcagcaggctggagcagggcgacaagccctggaccccccacatcctgaggacccagaggagctggagctggaggcacaagagggagtgctacggcggcccaagcagcggcgcccctcctcccagcggcggcagcccagccggctccccaacctctaccgaggagggcacctctgagtccgccacccccgagagcggccctggcacctccaccgagcccagcgagggcagcgcacccggcagccctgccggcagccccacctccacagaggagggaaccagcaccgagcccagcgaaggcagcgccccaggcaccagcaccgagcctagtgagcaggagattaaacggatcaacaagatcagaagaagacttgtgaaagacagcaacaccaagaaggccggcaagacaggccccatgaaaaccctgctggttagagtgatgacacccgatctgagagagcggctggaaaacctgagaaagaagcctgaaaatatcccccagcccatcagcaatacatctagagccaacctgaataagctgctgaccgattacaccgaaatgaagaaggcgatcctgcatgtgtactgggaagagttccagaaggaccctgtgggcctgatgagccgggtggcccagcctgccagcaagaagatcgatcagaacaagctgaaacctgagatggacgagaagggcaacctgaccaccgccggctttgcctgctctcagtgtggccagcccctgttcgtgtacaagctggagcaggtgtctgagaagggcaaggcttacaccaactacttcggacggtgcaatgtggccgagcacgaaaagctgatcctgctggcccagctgaagcccgagaaggatagcgacgaagccgtgacatatagcctgggaaagtttgggcagagggccctggatttctacagcattcatgtgaccaaggagtccacccaccccgtgaagcccctggcccagatcgccggaaacagatacgcctccggacctgtgggaaaggccctgagcgacgcatgtatgggcacaatcgcctccttcctgtctaagtaccaggacatcatcatcgaacaccagaaggtggtgaagggcaaccagaagagactggagagcctgcgggagctggccggcaaggaaaacctggaataccctagcgtgaccctgccacctcagcctcacaccaaggagggcgttgatgcctacaacgaagtgatcgcccgggtgcgaatgtgggtgaacctgaacctgtggcagaagctgaagctaagcagagatgatgccaagcctctgctgagactgaagggattcccttcctttcctctggtcgagagacaggccaacgaagtggactggtgggacatggtgtgtaacgtgaagaagctgatcaacgagaaaaaggaggatggcaaggtgttttggcagaatctggctggctacaagagacaggaagccctgagaccatacctgagcagcgaggaagatcggaagaagggaaagaaattcgctcggtaccagctgggcgacctgctgctgcacctggaaaagaagcacggcgaggactggggaaaggtgtacgacgaggcctgggagcggattgacaagaaagtggaaggcctgagcaagcacatcaagctggaagaggaacggagaagcgaggacgcccagagcaaggccgccctgaccgactggctgcgggctaaggccagcttcgtgatcgagggcctgaaggaggccgacaaggacgagttctgcagatgcgagctgaagctgcagaagtggtacggggacctgcggggaaagcccttcgccatcgaagccgagaacagcatcctggacatcagcggcttcagcaagcagtacaactgtgccttcatctggcagaaggacggcgtgaagaagctgaacctgtacctgatcatcaactacttcaagggcggcaagctgcggttcaagaagatcaaacctgaagccttcgaagccaacagattctacaccgtgatcaacaaaaagagcggcgagatcgtgcccatggaggtgaacttcaacttcgacgaccccaacctgatcatcctgcctctggcctttggcaagagacagggcagagaattcatctggaacgacctgctgtccctggaaaccggcagcctgaagctggccaacggaagagtgatcgagaagacactgtacaacagaagaacccggcaggatgagcctgccctgttcgtggccctgaccttcgagcggcgggaggtcctggactcctccaatatcaaaccaatgaacctgatcggcgtggcaagaggcgaaaacatccccgccgtgatcgccctgaccgaccccgagggctgcccactgagccggtttaaggatagcctgggaaacccaacccacatcctgagaatcggcgagagctataaggagaagcagcggaccatccaggccaagaaggaggtggagcagcggagagccggcggctacagccggaagtacgccagcaaagccaagaatctggcagacgatatggtgagaaacaccgctagagatctgctgtactacgccgtgacccaggatgccatgctgatcttcgccaacctgagccggggcttcggccggcagggcaagcggaccttcatggccgagagacagtacacacggatggaggactggctgaccgccaagctggcctacgagggcctgagcaagacctacctgtccaagacactggcccagtacacctccaagacatgcagcaactgtgggtttaccatcaccagcgccgactacgacagggtgctggagaagctgaagaagacagcaacaggctggatgaccacaattaacggcaaggagctgaaggtggagggccagattacctactacaacagatacaagagacagaacgtagtcaaggacctgtccgtcgagctggatagactgagcgaagaatctgtgaacaacgacatctcctcctggacaaagggcagaagcggagaagctctgagcctcctgaagaaaagattctcccatagacccgtgcaggagaagttcgtgtgcctgaactgcggcttcgagacacacgcagccgagcaagccgccctgaacatcgccagatcctggctgttcctgcggagccaggagtacaagaaataccagacaaacaagacaaccggcaacaccgataagagagccttcgtcgagacctggcagtccttttaccggaagaagcttaaggaggtgtggaaacctgccgtgcggtctggcggatctggcggaggctcctatggtgagcttcgaggacgtggccgtgctgctgagccaggaggagtgggactgcctgatccccgcccagaggggcctgtacagggacgtgatgctggagacctacggcaacctggtgagcctgggcctgcaggccagcaagcccgacgtgatcagcaggctggagcagggcgacaagccctggaccccccacatcctgaggacccagaggagctggagctggaggcacaagagggagtgctacggatctggctccggcagcggccccaagaaaaagagaaaagtctaagctgccttctgcggggcttgccttctggccatgcccttcttctctcccttgcacctgtacctcttggtctttgaataaagcctgagtaggaaggctagcaaaaaaaaaaaaaaaaaaaaaaaaaaaaaaaaaaaaaaaaaaaaaaaaaaaaaaaaaaaaaaaaaaaaaaaaaaaaaaaa

SEQ ID NO: 15385 - RNA, 9485 nt, synthetic construct
  source 1..9485: mol_type = other RNA
aggaaataagagagaaaagaagagtaagaagaaatataagagccaccatggcccctaagaagaagcgtaaagtgagccggatggaacgcctcgtctacgaggtgcggcagaagtgcagaaacatcgaggacatctgcatctcctgcggatctctgaacgtgaccctggagcacccactgttcatcggcggcatgtgccagaactgtaaaaactgttttctggagtgtgcctatcaatacgacgatgacggctaccagagctactgcaccatctgttgcggcggaagagaggtgctgatgtgtggaaataacaactgctgccggtgcttctgcgtggaatgcgtggacctgctggtgggccccggcgccgcccaggccgctattaaggaagatccttggaactgctacatgtgcggccacaagggcacatacggcctgctgagacggagagaggactggcctagcagactgcagatgttcttcgccaataaccacgaccaggagttcgacccccctaaggtgtaccctcccgtccccgccgagaagagaaagcccatccgggtcctgagcctgttcgatggcatcgccaccggtctgctggtgctgaaggacctgggcatccaggtggataggtacattgcctccgaggtgtgcgaggactccatcaccgtgggaatggtgcgtcatcagggcaagatcatgtacgtgggcgacgtgcggagcgtgacacagaagcatatccaggagtggggccctttcgacctggtgatcggcggcagcccttgcaatgacctgagcatcgtgaacccagcccggaagggcctgtacgagggaaccggcagactgttcttcgagttttacagactgctgcacgacgcccggcctaaggaaggcgacgaccggcccttcttttggctgttcgagaatgtggtggccatgggagtcagcgacaagcgggatattagccggttcctggagagcaaccccgtgatgatcgatgccaaggaagtgagcgccgcccaccgggccagatacttctggggcaatctgcctggcatgaacagacccctggccagcaccgtgaacgacaagctggagctgcaggagtgcctggagcacggccggatcgccaagttcagcaaggtgagaaccatcaccacccgaagcaacagcatcaaacaaggcaaggaccagcactttcctgtgttcatgaacgagaaggaggacatcctgtggtgtaccgagatggagagagtgttcgggttcccagtccactacacagatgtcagcaacatgtctagactggccagacagagactgctgggaagaagctggtccgtccctgtgatcagacacctgttcgcccctctgaaggagtacttcgcctgcgtgagcagcggcaacagcaacgccaacagccggggccccagcttctctagcggcctggtgccactgtccctgagagggagccacatgggccccatggagatctacaaaaccgtgagcgcctggaagcggcagcctgtgcgcgtgctgagcctgtttcggaatatcgataaagtcctgaaaagcctgggattcctggagagcggctctggctccggcggtggcaccctgaagtacgtggaggatgtgacaaacgtggtcagacgggatgtggagaagtggggccccttcgatctggtgtacggcagcacccaacccctgggcagctcttgtgaccggtgccctggctggtacatgtttcagttccaccggatcctgcagtacgccctgccgagacaggagtcccagcggccattcttttggattttcatggacaacttgctgctgaccgaggatgaccaggaaactaccactcggttcctgcagaccgaagccgtgaccctgcaggacgtgagaggccgggactaccagaacgccatgcgggtgtggtccaacatccctggactgaaaagcaagcacgcacctctgacccctaaagaagaggagtacctgcaggcccaggtgcggagcagaagcaagctggacgcccctaaggtggatctgctggtgaagaattgcctcctgcccctgagagagtacttcaagtatttcagccagaatagtctgcccctgggaggcagcggcggcggcgccctggtgacatttgaggacgtcgccgtgcggttcacccaggaggaatgggctctgctggatccttctcagaaaatcctgtaccgggacgtgatgagagagacataccggaatctgacctccgtgggcatcaactgggaatgttgggaccttgaagcctgcttcagaagcctgggaagaaacctgagagtgcaggtggtgaagagaaagtgcgagctgaccaacagcggcccctgcgccgagggcggcccaagcagcggcgcccctcctcccagcggcggcagcccagccggctccccaacctctaccgaggagggcacctctgagtccgccacccccgagagcggccctggcacctccaccgagcccagcgagggcagcgcacccggcagccctgccggcagccccacctccacagaggagggaaccagcaccgagcccagcgaaggcagcgccccaggcaccagcaccgagcctagtgagcaggagattaaacggatcaacaagatcagaagaagacttgtgaaagacagcaacaccaagaaggccggcaagacaggccccatgaaaaccctgctggttagagtgatgacacccgatctgagagagcggctggaaaacctgagaaagaagcctgaaaatatcccccagcccatcagcaatacatctagagccaacctgaataagctgctgaccgattacaccgaaatgaagaaggcgatcctgcatgtgtactgggaagagttccagaaggaccctgtgggcctgatgagccgggtggcccagcctgccagcaagaagatcgatcagaacaagctgaaacctgagatggacgagaagggcaacctgaccaccgccggctttgcctgctctcagtgtggccagcccctgttcgtgtacaagctggagcaggtgtctgagaagggcaaggcttacaccaactacttcggacggtgcaatgtggccgagcacgaaaagctgatcctgctggcccagctgaagcccgagaaggatagcgacgaagccgtgacatatagcctgggaaagtttgggcagagggccctggatttctacagcattcatgtgaccaaggagtccacccaccccgtgaagcccctggcccagatcgccggaaacagatacgcctccggacctgtgggaaaggccctgagcgacgcatgtatgggcacaatcgcctccttcctgtctaagtaccaggacatcatcatcgaacaccagaaggtggtgaagggcaaccagaagagactggagagcctgcgggagctggccggcaaggaaaacctggaataccctagcgtgaccctgccacctcagcctcacaccaaggagggcgttgatgcctacaacgaagtgatcgcccgggtgcgaatgtgggtgaacctgaacctgtggcagaagctgaagctaagcagagatgatgccaagcctctgctgagactgaagggattcccttcctttcctctggtcgagagacaggccaacgaagtggactggtgggacatggtgtgtaacgtgaagaagctgatcaacgagaaaaaggaggatggcaaggtgttttggcagaatctggctggctacaagagacaggaagccctgagaccatacctgagcagcgaggaagatcggaagaagggaaagaaattcgctcggtaccagctgggcgacctgctgctgcacctggaaaagaagcacggcgaggactggggaaaggtgtacgacgaggcctgggagcggattgacaagaaagtggaaggcctgagcaagcacatcaagctggaagaggaacggagaagcgaggacgcccagagcaaggccgccctgaccgactggctgcgggctaaggccagcttcgtgatcgagggcctgaaggaggccgacaaggacgagttctgcagatgcgagctgaagctgcagaagtggtacggggacctgcggggaaagcccttcgccatcgaagccgagaacagcatcctggacatcagcggcttcagcaagcagtacaactgtgccttcatctggcagaaggacggcgtgaagaagctgaacctgtacctgatcatcaactacttcaagggcggcaagctgcggttcaagaagatcaaacctgaagccttcgaagccaacagattctacaccgtgatcaacaaaaagagcggcgagatcgtgcccatggaggtgaacttcaacttcgacgaccccaacctgatcatcctgcctctggcctttggcaagagacagggcagagaattcatctggaacgacctgctgtccctggaaaccggcagcctgaagctggccaacggaagagtgatcgagaagacactgtacaacagaagaacccggcaggatgagcctgccctgttcgtggccctgaccttcgagcggcgggaggtcctggactcctccaatatcaaaccaatgaacctgatcggcgtggcaagaggcgaaaacatccccgccgtgatcgccctgaccgaccccgagggctgcccactgagccggtttaaggatagcctgggaaacccaacccacatcctgagaatcggcgagagctataaggagaagcagcggaccatccaggccaagaaggaggtggagcagcggagagccggcggctacagccggaagtacgccagcaaagccaagaatctggcagacgatatggtgagaaacaccgctagagatctgctgtactacgccgtgacccaggatgccatgctgatcttcgccaacctgagccggggcttcggccggcagggcaagcggaccttcatggccgagagacagtacacacggatggaggactggctgaccgccaagctggcctacgagggcctgagcaagacctacctgtccaagacactggcccagtacacctccaagacatgcagcaactgtgggtttaccatcaccagcgccgactacgacagggtgctggagaagctgaagaagacagcaacaggctggatgaccacaattaacggcaaggagctgaaggtggagggccagattacctactacaacagatacaagagacagaacgtagtcaaggacctgtccgtcgagctggatagactgagcgaagaatctgtgaacaacgacatctcctcctggacaaagggcagaagcggagaagctctgagcctcctgaagaaaagattctcccatagacccgtgcaggagaagttcgtgtgcctgaactgcggcttcgagacacacgcagccgagcaagccgccctgaacatcgccagatcctggctgttcctgcggagccaggagtacaagaaataccagacaaacaagacaaccggcaacaccgataagagagccttcgtcgagacctggcagtccttttaccggaagaagcttaaggaggtgtggaaacctgccgtgcggtctggcggatctggcggaggctcccaggccgaggtgaccttcgaggacgtggccgtgctgttcagcagggaggagtggggcaggctgggccccgcccagaggggcctgtacagggacgtgatgctggagacctacaggaacctggtgagcctgggcgccggccccgccgcccccaagcccggcgtgatcacccagctggagaggggcgacgagccctgggtgctggacgcccagggcgccaagggcaaggagaggctgagggtgagcggcggcccaagcagcggcgcccctcctcccagcggcggcagcccagccggctccccaacctctaccgaggagggcacctctgagtccgccacccccgagagcggccctggcacctccaccgagcccagcgagggcagcgcacccggcagccctgccggcagccccacctccacagaggagggaaccagcaccgagcccagcgaaggcagcgccccaggcaccagcaccgagcctagtgagcaggagattaaacggatcaacaagatcagaagaagacttgtgaaagacagcaacaccaagaaggccggcaagacaggccccatgaaaaccctgctggttagagtgatgacacccgatctgagagagcggctggaaaacctgagaaagaagcctgaaaatatcccccagcccatcagcaatacatctagagccaacctgaataagctgctgaccgattacaccgaaatgaagaaggcgatcctgcatgtgtactgggaagagttccagaaggaccctgtgggcctgatgagccgggtggcccagcctgccagcaagaagatcgatcagaacaagctgaaacctgagatggacgagaagggcaacctgaccaccgccggctttgcctgctctcagtgtggccagcccctgttcgtgtacaagctggagcaggtgtctgagaagggcaaggcttacaccaactacttcggacggtgcaatgtggccgagcacgaaaagctgatcctgctggcccagctgaagcccgagaaggatagcgacgaagccgtgacatatagcctgggaaagtttgggcagagggccctggatttctacagcattcatgtgaccaaggagtccacccaccccgtgaagcccctggcccagatcgccggaaacagatacgcctccggacctgtgggaaaggccctgagcgacgcatgtatgggcacaatcgcctccttcctgtctaagtaccaggacatcatcatcgaacaccagaaggtggtgaagggcaaccagaagagactggagagcctgcgggagctggccggcaaggaaaacctggaataccctagcgtgaccctgccacctcagcctcacaccaaggagggcgttgatgcctacaacgaagtgatcgcccgggtgcgaatgtgggtgaacctgaacctgtggcagaagctgaagctaagcagagatgatgccaagcctctgctgagactgaagggattcccttcctttcctctggtcgagagacaggccaacgaagtggactggtgggacatggtgtgtaacgtgaagaagctgatcaacgagaaaaaggaggatggcaaggtgttttggcagaatctggctggctacaagagacaggaagccctgagaccatacctgagcagcgaggaagatcggaagaagggaaagaaattcgctcggtaccagctgggcgacctgctgctgcacctggaaaagaagcacggcgaggactggggaaaggtgtacgacgaggcctgggagcggattgacaagaaagtggaaggcctgagcaagcacatcaagctggaagaggaacggagaagcgaggacgcccagagcaaggccgccctgaccgactggctgcgggctaaggccagcttcgtgatcgagggcctgaaggaggccgacaaggacgagttctgcagatgcgagctgaagctgcagaagtggtacggggacctgcggggaaagcccttcgccatcgaagccgagaacagcatcctggacatcagcggcttcagcaagcagtacaactgtgccttcatctggcagaaggacggcgtgaagaagctgaacctgtacctgatcatcaactacttcaagggcggcaagctgcggttcaagaagatcaaacctgaagccttcgaagccaacagattctacaccgtgatcaacaaaaagagcggcgagatcgtgcccatggaggtgaacttcaacttcgacgaccccaacctgatcatcctgcctctggcctttggcaagagacagggcagagaattcatctggaacgacctgctgtccctggaaaccggcagcctgaagctggccaacggaagagtgatcgagaagacactgtacaacagaagaacccggcaggatgagcctgccctgttcgtggccctgaccttcgagcggcgggaggtcctggactcctccaatatcaaaccaatgaacctgatcggcgtggcaagaggcgaaaacatccccgccgtgatcgccctgaccgaccccgagggctgcccactgagccggtttaaggatagcctgggaaacccaacccacatcctgagaatcggcgagagctataaggagaagcagcggaccatccaggccaagaaggaggtggagcagcggagagccggcggctacagccggaagtacgccagcaaagccaagaatctggcagacgatatggtgagaaacaccgctagagatctgctgtactacgccgtgacccaggatgccatgctgatcttcgccaacctgagccggggcttcggccggcagggcaagcggaccttcatggccgagagacagtacacacggatggaggactggctgaccgccaagctggcctacgagggcctgagcaagacctacctgtccaagacactggcccagtacacctccaagacatgcagcaactgtgggtttaccatcaccagcgccgactacgacagggtgctggagaagctgaagaagacagcaacaggctggatgaccacaattaacggcaaggagctgaaggtggagggccagattacctactacaacagatacaagagacagaacgtagtcaaggacctgtccgtcgagctggatagactgagcgaagaatctgtgaacaacgacatctcctcctggacaaagggcagaagcggagaagctctgagcctcctgaagaaaagattctcccatagacccgtgcaggagaagttcgtgtgcctgaactgcggcttcgagacacacgcagccgagcaagccgccctgaacatcgccagatcctggctgttcctgcggagccaggagtacaagaaataccagacaaacaagacaaccggcaacaccgataagagagccttcgtcgagacctggcagtccttttaccggaagaagcttaaggaggtgtggaaacctgccgtgcggtctggcggatctggcggaggctcctcaggccgaggtgaccttcgaggacgtggccgtgctgttcagcagggaggagtggggcaggctgggccccgcccagaggggcctgtacagggacgtgatgctggagacctacaggaacctggtgagcctgggcgccggccccgccgcccccaagcccggcgtgatcacccagctggagaggggcgacgagccctgggtgctggacgcccagggcgccaagggcaaggagaggctgagggtgagcggatctggctccggcagcggccccaagaaaaagagaaaagtctaagctgccttctgcggggcttgccttctggccatgcccttcttctctcccttgcacctgtacctcttggtctttgaataaagcctgagtaggaaggctagcaaaaaaaaaaaaaaaaaaaaaaaaaaaaaaaaaaaaaaaaaaaaaaaaaaaaaaaaaaaaaaaaaaaaaaaaaaaaaaaa

SEQ ID NO: 15386 - RNA, 9485 nt, synthetic construct
  source 1..9485: mol_type = other RNA
aggaaataagagagaaaagaagagtaagaagaaatataagagccaccatggcccctaagaagaagcgtaaagtgagccggatggaacgcctcgtctacgaggtgcggcagaagtgcagaaacatcgaggacatctgcatctcctgcggatctctgaacgtgaccctggagcacccactgttcatcggcggcatgtgccagaactgtaaaaactgttttctggagtgtgcctatcaatacgacgatgacggctaccagagctactgcaccatctgttgcggcggaagagaggtgctgatgtgtggaaataacaactgctgccggtgcttctgcgtggaatgcgtggacctgctggtgggccccggcgccgcccaggccgctattaaggaagatccttggaactgctacatgtgcggccacaagggcacatacggcctgctgagacggagagaggactggcctagcagactgcagatgttcttcgccaataaccacgaccaggagttcgacccccctaaggtgtaccctcccgtccccgccgagaagagaaagcccatccgggtcctgagcctgttcgatggcatcgccaccggtctgctggtgctgaaggacctgggcatccaggtggataggtacattgcctccgaggtgtgcgaggactccatcaccgtgggaatggtgcgtcatcagggcaagatcatgtacgtgggcgacgtgcggagcgtgacacagaagcatatccaggagtggggccctttcgacctggtgatcggcggcagcccttgcaatgacctgagcatcgtgaacccagcccggaagggcctgtacgagggaaccggcagactgttcttcgagttttacagactgctgcacgacgcccggcctaaggaaggcgacgaccggcccttcttttggctgttcgagaatgtggtggccatgggagtcagcgacaagcgggatattagccggttcctggagagcaaccccgtgatgatcgatgccaaggaagtgagcgccgcccaccgggccagatacttctggggcaatctgcctggcatgaacagacccctggccagcaccgtgaacgacaagctggagctgcaggagtgcctggagcacggccggatcgccaagttcagcaaggtgagaaccatcaccacccgaagcaacagcatcaaacaaggcaaggaccagcactttcctgtgttcatgaacgagaaggaggacatcctgtggtgtaccgagatggagagagtgttcgggttcccagtccactacacagatgtcagcaacatgtctagactggccagacagagactgctgggaagaagctggtccgtccctgtgatcagacacctgttcgcccctctgaaggagtacttcgcctgcgtgagcagcggcaacagcaacgccaacagccggggccccagcttctctagcggcctggtgccactgtccctgagagggagccacatgggccccatggagatctacaaaaccgtgagcgcctggaagcggcagcctgtgcgcgtgctgagcctgtttcggaatatcgataaagtcctgaaaagcctgggattcctggagagcggctctggctccggcggtggcaccctgaagtacgtggaggatgtgacaaacgtggtcagacgggatgtggagaagtggggccccttcgatctggtgtacggcagcacccaacccctgggcagctcttgtgaccggtgccctggctggtacatgtttcagttccaccggatcctgcagtacgccctgccgagacaggagtcccagcggccattcttttggattttcatggacaacttgctgctgaccgaggatgaccaggaaactaccactcggttcctgcagaccgaagccgtgaccctgcaggacgtgagaggccgggactaccagaacgccatgcgggtgtggtccaacatccctggactgaaaagcaagcacgcacctctgacccctaaagaagaggagtacctgcaggcccaggtgcggagcagaagcaagctggacgcccctaaggtggatctgctggtgaagaattgcctcctgcccctgagagagtacttcaagtatttcagccagaatagtctgcccctgggaggcagcggcggcggcgccctggtgacatttgaggacgtcgccgtgcggttcacccaggaggaatgggctctgctggatccttctcagaaaatcctgtaccgggacgtgatgagagagacataccggaatctgacctccgtgggcatcaactgggaatgttgggaccttgaagcctgcttcagaagcctgggaagaaacctgagagtgcaggtggtgaagagaaagtgcgagctgaccaacagcggcccctgcgccgagggcggcccaagcagcggcgcccctcctcccagcggcggcagcccagccggctccccaacctctaccgaggagggcacctctgagtccgccacccccgagagcggccctggcacctccaccgagcccagcgagggcagcgcacccggcagccctgccggcagccccacctccacagaggagggaaccagcaccgagcccagcgaaggcagcgccccaggcaccagcaccgagcctagtgagcaggagattaaacggatcaacaagatcagaagaagacttgtgaaagacagcaacaccaagaaggccggcaagacaggccccatgaaaaccctgctggttagagtgatgacacccgatctgagagagcggctggaaaacctgagaaagaagcctgaaaatatcccccagcccatcagcaatacatctagagccaacctgaataagctgctgaccgattacaccgaaatgaagaaggcgatcctgcatgtgtactgggaagagttccagaaggaccctgtgggcctgatgagccgggtggcccagcctgccagcaagaagatcgatcagaacaagctgaaacctgagatggacgagaagggcaacctgaccaccgccggctttgcctgctctcagtgtggccagcccctgttcgtgtacaagctggagcaggtgtctgagaagggcaaggcttacaccaactacttcggacggtgcaatgtggccgagcacgaaaagctgatcctgctggcccagctgaagcccgagaaggatagcgacgaagccgtgacatatagcctgggaaagtttgggcagagggccctggatttctacagcattcatgtgaccaaggagtccacccaccccgtgaagcccctggcccagatcgccggaaacagatacgcctccggacctgtgggaaaggccctgagcgacgcatgtatgggcacaatcgcctccttcctgtctaagtaccaggacatcatcatcgaacaccagaaggtggtgaagggcaaccagaagagactggagagcctgcgggagctggccggcaaggaaaacctggaataccctagcgtgaccctgccacctcagcctcacaccaaggagggcgttgatgcctacaacgaagtgatcgcccgggtgcgaatgtgggtgaacctgaacctgtggcagaagctgaagctaagcagagatgatgccaagcctctgctgagactgaagggattcccttcctttcctctggtcgagagacaggccaacgaagtggactggtgggacatggtgtgtaacgtgaagaagctgatcaacgagaaaaaggaggatggcaaggtgttttggcagaatctggctggctacaagagacaggaagccctgagaccatacctgagcagcgaggaagatcggaagaagggaaagaaattcgctcggtaccagctgggcgacctgctgctgcacctggaaaagaagcacggcgaggactggggaaaggtgtacgacgaggcctgggagcggattgacaagaaagtggaaggcctgagcaagcacatcaagctggaagaggaacggagaagcgaggacgcccagagcaaggccgccctgaccgactggctgcgggctaaggccagcttcgtgatcgagggcctgaaggaggccgacaaggacgagttctgcagatgcgagctgaagctgcagaagtggtacggggacctgcggggaaagcccttcgccatcgaagccgagaacagcatcctggacatcagcggcttcagcaagcagtacaactgtgccttcatctggcagaaggacggcgtgaagaagctgaacctgtacctgatcatcaactacttcaagggcggcaagctgcggttcaagaagatcaaacctgaagccttcgaagccaacagattctacaccgtgatcaacaaaaagagcggcgagatcgtgcccatggaggtgaacttcaacttcgacgaccccaacctgatcatcctgcctctggcctttggcaagagacagggcagagaattcatctggaacgacctgctgtccctggaaaccggcagcctgaagctggccaacggaagagtgatcgagaagacactgtacaacagaagaacccggcaggatgagcctgccctgttcgtggccctgaccttcgagcggcgggaggtcctggactcctccaatatcaaaccaatgaacctgatcggcgtggcaagaggcgaaaacatccccgccgtgatcgccctgaccgaccccgagggctgcccactgagccggtttaaggatagcctgggaaacccaacccacatcctgagaatcggcgagagctataaggagaagcagcggaccatccaggccaagaaggaggtggagcagcggagagccggcggctacagccggaagtacgccagcaaagccaagaatctggcagacgatatggtgagaaacaccgctagagatctgctgtactacgccgtgacccaggatgccatgctgatcttcgccaacctgagccggggcttcggccggcagggcaagcggaccttcatggccgagagacagtacacacggatggaggactggctgaccgccaagctggcctacgagggcctgagcaagacctacctgtccaagacactggcccagtacacctccaagacatgcagcaactgtgggtttaccatcaccagcgccgactacgacagggtgctggagaagctgaagaagacagcaacaggctggatgaccacaattaacggcaaggagctgaaggtggagggccagattacctactacaacagatacaagagacagaacgtagtcaaggacctgtccgtcgagctggatagactgagcgaagaatctgtgaacaacgacatctcctcctggacaaagggcagaagcggagaagctctgagcctcctgaagaaaagattctcccatagacccgtgcaggagaagttcgtgtgcctgaactgcggcttcgagacacacgcagccgagcaagccgccctgaacatcgccagatcctggctgttcctgcggagccaggagtacaagaaataccagacaaacaagacaaccggcaacaccgataagagagccttcgtcgagacctggcagtccttttaccggaagaagcttaaggaggtgtggaaacctgccgtgcggtctggcggatctggcggaggctccccccagaagagcgtgaccttcgaggacgtggccgtgtacttcacccagaccgagtgggacggcctgagccccgcccagagggccctgtacagggacgtgatgctggagaactacggcaacgtggccagcctgggcttcagcctgctgaagcccgccgtgatcctgcagctggagggcgccggcgagctgggcgaccccagcctgctggtggccggcaccgaggtgggcagccagggcgtgtggggcggcccaagcagcggcgcccctcctcccagcggcggcagcccagccggctccccaacctctaccgaggagggcacctctgagtccgccacccccgagagcggccctggcacctccaccgagcccagcgagggcagcgcacccggcagccctgccggcagccccacctccacagaggagggaaccagcaccgagcccagcgaaggcagcgccccaggcaccagcaccgagcctagtgagcaggagattaaacggatcaacaagatcagaagaagacttgtgaaagacagcaacaccaagaaggccggcaagacaggccccatgaaaaccctgctggttagagtgatgacacccgatctgagagagcggctggaaaacctgagaaagaagcctgaaaatatcccccagcccatcagcaatacatctagagccaacctgaataagctgctgaccgattacaccgaaatgaagaaggcgatcctgcatgtgtactgggaagagttccagaaggaccctgtgggcctgatgagccgggtggcccagcctgccagcaagaagatcgatcagaacaagctgaaacctgagatggacgagaagggcaacctgaccaccgccggctttgcctgctctcagtgtggccagcccctgttcgtgtacaagctggagcaggtgtctgagaagggcaaggcttacaccaactacttcggacggtgcaatgtggccgagcacgaaaagctgatcctgctggcccagctgaagcccgagaaggatagcgacgaagccgtgacatatagcctgggaaagtttgggcagagggccctggatttctacagcattcatgtgaccaaggagtccacccaccccgtgaagcccctggcccagatcgccggaaacagatacgcctccggacctgtgggaaaggccctgagcgacgcatgtatgggcacaatcgcctccttcctgtctaagtaccaggacatcatcatcgaacaccagaaggtggtgaagggcaaccagaagagactggagagcctgcgggagctggccggcaaggaaaacctggaataccctagcgtgaccctgccacctcagcctcacaccaaggagggcgttgatgcctacaacgaagtgatcgcccgggtgcgaatgtgggtgaacctgaacctgtggcagaagctgaagctaagcagagatgatgccaagcctctgctgagactgaagggattcccttcctttcctctggtcgagagacaggccaacgaagtggactggtgggacatggtgtgtaacgtgaagaagctgatcaacgagaaaaaggaggatggcaaggtgttttggcagaatctggctggctacaagagacaggaagccctgagaccatacctgagcagcgaggaagatcggaagaagggaaagaaattcgctcggtaccagctgggcgacctgctgctgcacctggaaaagaagcacggcgaggactggggaaaggtgtacgacgaggcctgggagcggattgacaagaaagtggaaggcctgagcaagcacatcaagctggaagaggaacggagaagcgaggacgcccagagcaaggccgccctgaccgactggctgcgggctaaggccagcttcgtgatcgagggcctgaaggaggccgacaaggacgagttctgcagatgcgagctgaagctgcagaagtggtacggggacctgcggggaaagcccttcgccatcgaagccgagaacagcatcctggacatcagcggcttcagcaagcagtacaactgtgccttcatctggcagaaggacggcgtgaagaagctgaacctgtacctgatcatcaactacttcaagggcggcaagctgcggttcaagaagatcaaacctgaagccttcgaagccaacagattctacaccgtgatcaacaaaaagagcggcgagatcgtgcccatggaggtgaacttcaacttcgacgaccccaacctgatcatcctgcctctggcctttggcaagagacagggcagagaattcatctggaacgacctgctgtccctggaaaccggcagcctgaagctggccaacggaagagtgatcgagaagacactgtacaacagaagaacccggcaggatgagcctgccctgttcgtggccctgaccttcgagcggcgggaggtcctggactcctccaatatcaaaccaatgaacctgatcggcgtggcaagaggcgaaaacatccccgccgtgatcgccctgaccgaccccgagggctgcccactgagccggtttaaggatagcctgggaaacccaacccacatcctgagaatcggcgagagctataaggagaagcagcggaccatccaggccaagaaggaggtggagcagcggagagccggcggctacagccggaagtacgccagcaaagccaagaatctggcagacgatatggtgagaaacaccgctagagatctgctgtactacgccgtgacccaggatgccatgctgatcttcgccaacctgagccggggcttcggccggcagggcaagcggaccttcatggccgagagacagtacacacggatggaggactggctgaccgccaagctggcctacgagggcctgagcaagacctacctgtccaagacactggcccagtacacctccaagacatgcagcaactgtgggtttaccatcaccagcgccgactacgacagggtgctggagaagctgaagaagacagcaacaggctggatgaccacaattaacggcaaggagctgaaggtggagggccagattacctactacaacagatacaagagacagaacgtagtcaaggacctgtccgtcgagctggatagactgagcgaagaatctgtgaacaacgacatctcctcctggacaaagggcagaagcggagaagctctgagcctcctgaagaaaagattctcccatagacccgtgcaggagaagttcgtgtgcctgaactgcggcttcgagacacacgcagccgagcaagccgccctgaacatcgccagatcctggctgttcctgcggagccaggagtacaagaaataccagacaaacaagacaaccggcaacaccgataagagagccttcgtcgagacctggcagtccttttaccggaagaagcttaaggaggtgtggaaacctgccgtgcggtctggcggatctggcggaggctcctccccagaagagcgtgaccttcgaggacgtggccgtgtacttcacccagaccgagtgggacggcctgagccccgcccagagggccctgtacagggacgtgatgctggagaactacggcaacgtggccagcctgggcttcagcctgctgaagcccgccgtgatcctgcagctggagggcgccggcgagctgggcgaccccagcctgctggtggccggcaccgaggtgggcagccagggcgtgtggggatctggctccggcagcggccccaagaaaaagagaaaagtctaagctgccttctgcggggcttgccttctggccatgcccttcttctctcccttgcacctgtacctcttggtctttgaataaagcctgagtaggaaggctagcaaaaaaaaaaaaaaaaaaaaaaaaaaaaaaaaaaaaaaaaaaaaaaaaaaaaaaaaaaaaaaaaaaaaaaaaaaaaaaaa

SEQ ID NO: 15387 - RNA, 9485 nt, synthetic construct
  source 1..9485: mol_type = other RNA
aggaaataagagagaaaagaagagtaagaagaaatataagagccaccatggcccctaagaagaagcgtaaagtgagccggatggaacgcctcgtctacgaggtgcggcagaagtgcagaaacatcgaggacatctgcatctcctgcggatctctgaacgtgaccctggagcacccactgttcatcggcggcatgtgccagaactgtaaaaactgttttctggagtgtgcctatcaatacgacgatgacggctaccagagctactgcaccatctgttgcggcggaagagaggtgctgatgtgtggaaataacaactgctgccggtgcttctgcgtggaatgcgtggacctgctggtgggccccggcgccgcccaggccgctattaaggaagatccttggaactgctacatgtgcggccacaagggcacatacggcctgctgagacggagagaggactggcctagcagactgcagatgttcttcgccaataaccacgaccaggagttcgacccccctaaggtgtaccctcccgtccccgccgagaagagaaagcccatccgggtcctgagcctgttcgatggcatcgccaccggtctgctggtgctgaaggacctgggcatccaggtggataggtacattgcctccgaggtgtgcgaggactccatcaccgtgggaatggtgcgtcatcagggcaagatcatgtacgtgggcgacgtgcggagcgtgacacagaagcatatccaggagtggggccctttcgacctggtgatcggcggcagcccttgcaatgacctgagcatcgtgaacccagcccggaagggcctgtacgagggaaccggcagactgttcttcgagttttacagactgctgcacgacgcccggcctaaggaaggcgacgaccggcccttcttttggctgttcgagaatgtggtggccatgggagtcagcgacaagcgggatattagccggttcctggagagcaaccccgtgatgatcgatgccaaggaagtgagcgccgcccaccgggccagatacttctggggcaatctgcctggcatgaacagacccctggccagcaccgtgaacgacaagctggagctgcaggagtgcctggagcacggccggatcgccaagttcagcaaggtgagaaccatcaccacccgaagcaacagcatcaaacaaggcaaggaccagcactttcctgtgttcatgaacgagaaggaggacatcctgtggtgtaccgagatggagagagtgttcgggttcccagtccactacacagatgtcagcaacatgtctagactggccagacagagactgctgggaagaagctggtccgtccctgtgatcagacacctgttcgcccctctgaaggagtacttcgcctgcgtgagcagcggcaacagcaacgccaacagccggggccccagcttctctagcggcctggtgccactgtccctgagagggagccacatgggccccatggagatctacaaaaccgtgagcgcctggaagcggcagcctgtgcgcgtgctgagcctgtttcggaatatcgataaagtcctgaaaagcctgggattcctggagagcggctctggctccggcggtggcaccctgaagtacgtggaggatgtgacaaacgtggtcagacgggatgtggagaagtggggccccttcgatctggtgtacggcagcacccaacccctgggcagctcttgtgaccggtgccctggctggtacatgtttcagttccaccggatcctgcagtacgccctgccgagacaggagtcccagcggccattcttttggattttcatggacaacttgctgctgaccgaggatgaccaggaaactaccactcggttcctgcagaccgaagccgtgaccctgcaggacgtgagaggccgggactaccagaacgccatgcgggtgtggtccaacatccctggactgaaaagcaagcacgcacctctgacccctaaagaagaggagtacctgcaggcccaggtgcggagcagaagcaagctggacgcccctaaggtggatctgctggtgaagaattgcctcctgcccctgagagagtacttcaagtatttcagccagaatagtctgcccctgggaggcagcggcggcggcgccctggtgacatttgaggacgtcgccgtgcggttcacccaggaggaatgggctctgctggatccttctcagaaaatcctgtaccgggacgtgatgagagagacataccggaatctgacctccgtgggcatcaactgggaatgttgggaccttgaagcctgcttcagaagcctgggaagaaacctgagagtgcaggtggtgaagagaaagtgcgagctgaccaacagcggcccctgcgccgagggcggcccaagcagcggcgcccctcctcccagcggcggcagcccagccggctccccaacctctaccgaggagggcacctctgagtccgccacccccgagagcggccctggcacctccaccgagcccagcgagggcagcgcacccggcagccctgccggcagccccacctccacagaggagggaaccagcaccgagcccagcgaaggcagcgccccaggcaccagcaccgagcctagtgagcaggagattaaacggatcaacaagatcagaagaagacttgtgaaagacagcaacaccaagaaggccggcaagacaggccccatgaaaaccctgctggttagagtgatgacacccgatctgagagagcggctggaaaacctgagaaagaagcctgaaaatatcccccagcccatcagcaatacatctagagccaacctgaataagctgctgaccgattacaccgaaatgaagaaggcgatcctgcatgtgtactgggaagagttccagaaggaccctgtgggcctgatgagccgggtggcccagcctgccagcaagaagatcgatcagaacaagctgaaacctgagatggacgagaagggcaacctgaccaccgccggctttgcctgctctcagtgtggccagcccctgttcgtgtacaagctggagcaggtgtctgagaagggcaaggcttacaccaactacttcggacggtgcaatgtggccgagcacgaaaagctgatcctgctggcccagctgaagcccgagaaggatagcgacgaagccgtgacatatagcctgggaaagtttgggcagagggccctggatttctacagcattcatgtgaccaaggagtccacccaccccgtgaagcccctggcccagatcgccggaaacagatacgcctccggacctgtgggaaaggccctgagcgacgcatgtatgggcacaatcgcctccttcctgtctaagtaccaggacatcatcatcgaacaccagaaggtggtgaagggcaaccagaagagactggagagcctgcgggagctggccggcaaggaaaacctggaataccctagcgtgaccctgccacctcagcctcacaccaaggagggcgttgatgcctacaacgaagtgatcgcccgggtgcgaatgtgggtgaacctgaacctgtggcagaagctgaagctaagcagagatgatgccaagcctctgctgagactgaagggattcccttcctttcctctggtcgagagacaggccaacgaagtggactggtgggacatggtgtgtaacgtgaagaagctgatcaacgagaaaaaggaggatggcaaggtgttttggcagaatctggctggctacaagagacaggaagccctgagaccatacctgagcagcgaggaagatcggaagaagggaaagaaattcgctcggtaccagctgggcgacctgctgctgcacctggaaaagaagcacggcgaggactggggaaaggtgtacgacgaggcctgggagcggattgacaagaaagtggaaggcctgagcaagcacatcaagctggaagaggaacggagaagcgaggacgcccagagcaaggccgccctgaccgactggctgcgggctaaggccagcttcgtgatcgagggcctgaaggaggccgacaaggacgagttctgcagatgcgagctgaagctgcagaagtggtacggggacctgcggggaaagcccttcgccatcgaagccgagaacagcatcctggacatcagcggcttcagcaagcagtacaactgtgccttcatctggcagaaggacggcgtgaagaagctgaacctgtacctgatcatcaactacttcaagggcggcaagctgcggttcaagaagatcaaacctgaagccttcgaagccaacagattctacaccgtgatcaacaaaaagagcggcgagatcgtgcccatggaggtgaacttcaacttcgacgaccccaacctgatcatcctgcctctggcctttggcaagagacagggcagagaattcatctggaacgacctgctgtccctggaaaccggcagcctgaagctggccaacggaagagtgatcgagaagacactgtacaacagaagaacccggcaggatgagcctgccctgttcgtggccctgaccttcgagcggcgggaggtcctggactcctccaatatcaaaccaatgaacctgatcggcgtggcaagaggcgaaaacatccccgccgtgatcgccctgaccgaccccgagggctgcccactgagccggtttaaggatagcctgggaaacccaacccacatcctgagaatcggcgagagctataaggagaagcagcggaccatccaggccaagaaggaggtggagcagcggagagccggcggctacagccggaagtacgccagcaaagccaagaatctggcagacgatatggtgagaaacaccgctagagatctgctgtactacgccgtgacccaggatgccatgctgatcttcgccaacctgagccggggcttcggccggcagggcaagcggaccttcatggccgagagacagtacacacggatggaggactggctgaccgccaagctggcctacgagggcctgagcaagacctacctgtccaagacactggcccagtacacctccaagacatgcagcaactgtgggtttaccatcaccagcgccgactacgacagggtgctggagaagctgaagaagacagcaacaggctggatgaccacaattaacggcaaggagctgaaggtggagggccagattacctactacaacagatacaagagacagaacgtagtcaaggacctgtccgtcgagctggatagactgagcgaagaatctgtgaacaacgacatctcctcctggacaaagggcagaagcggagaagctctgagcctcctgaagaaaagattctcccatagacccgtgcaggagaagttcgtgtgcctgaactgcggcttcgagacacacgcagccgagcaagccgccctgaacatcgccagatcctggctgttcctgcggagccaggagtacaagaaataccagacaaacaagacaaccggcaacaccgataagagagccttcgtcgagacctggcagtccttttaccggaagaagcttaaggaggtgtggaaacctgccgtgcggtctggcggatctggcggaggctccccccaggagctggtgaccttccaggacgtggccgtgtacttcacccccgaggaggtgaggtacctggacagctaccagaaggccctgtacaaggacgtgatgctggagaactacggcaacatggccagcctgggcttccccctgagcaagcccgtgctgatcagccagctggagaggggcgaggagccctgggccatggaccccctggtggccaaggagaggaagaccaggaggggcaccagcggcggcccaagcagcggcgcccctcctcccagcggcggcagcccagccggctccccaacctctaccgaggagggcacctctgagtccgccacccccgagagcggccctggcacctccaccgagcccagcgagggcagcgcacccggcagccctgccggcagccccacctccacagaggagggaaccagcaccgagcccagcgaaggcagcgccccaggcaccagcaccgagcctagtgagcaggagattaaacggatcaacaagatcagaagaagacttgtgaaagacagcaacaccaagaaggccggcaagacaggccccatgaaaaccctgctggttagagtgatgacacccgatctgagagagcggctggaaaacctgagaaagaagcctgaaaatatcccccagcccatcagcaatacatctagagccaacctgaataagctgctgaccgattacaccgaaatgaagaaggcgatcctgcatgtgtactgggaagagttccagaaggaccctgtgggcctgatgagccgggtggcccagcctgccagcaagaagatcgatcagaacaagctgaaacctgagatggacgagaagggcaacctgaccaccgccggctttgcctgctctcagtgtggccagcccctgttcgtgtacaagctggagcaggtgtctgagaagggcaaggcttacaccaactacttcggacggtgcaatgtggccgagcacgaaaagctgatcctgctggcccagctgaagcccgagaaggatagcgacgaagccgtgacatatagcctgggaaagtttgggcagagggccctggatttctacagcattcatgtgaccaaggagtccacccaccccgtgaagcccctggcccagatcgccggaaacagatacgcctccggacctgtgggaaaggccctgagcgacgcatgtatgggcacaatcgcctccttcctgtctaagtaccaggacatcatcatcgaacaccagaaggtggtgaagggcaaccagaagagactggagagcctgcgggagctggccggcaaggaaaacctggaataccctagcgtgaccctgccacctcagcctcacaccaaggagggcgttgatgcctacaacgaagtgatcgcccgggtgcgaatgtgggtgaacctgaacctgtggcagaagctgaagctaagcagagatgatgccaagcctctgctgagactgaagggattcccttcctttcctctggtcgagagacaggccaacgaagtggactggtgggacatggtgtgtaacgtgaagaagctgatcaacgagaaaaaggaggatggcaaggtgttttggcagaatctggctggctacaagagacaggaagccctgagaccatacctgagcagcgaggaagatcggaagaagggaaagaaattcgctcggtaccagctgggcgacctgctgctgcacctggaaaagaagcacggcgaggactggggaaaggtgtacgacgaggcctgggagcggattgacaagaaagtggaaggcctgagcaagcacatcaagctggaagaggaacggagaagcgaggacgcccagagcaaggccgccctgaccgactggctgcgggctaaggccagcttcgtgatcgagggcctgaaggaggccgacaaggacgagttctgcagatgcgagctgaagctgcagaagtggtacggggacctgcggggaaagcccttcgccatcgaagccgagaacagcatcctggacatcagcggcttcagcaagcagtacaactgtgccttcatctggcagaaggacggcgtgaagaagctgaacctgtacctgatcatcaactacttcaagggcggcaagctgcggttcaagaagatcaaacctgaagccttcgaagccaacagattctacaccgtgatcaacaaaaagagcggcgagatcgtgcccatggaggtgaacttcaacttcgacgaccccaacctgatcatcctgcctctggcctttggcaagagacagggcagagaattcatctggaacgacctgctgtccctggaaaccggcagcctgaagctggccaacggaagagtgatcgagaagacactgtacaacagaagaacccggcaggatgagcctgccctgttcgtggccctgaccttcgagcggcgggaggtcctggactcctccaatatcaaaccaatgaacctgatcggcgtggcaagaggcgaaaacatccccgccgtgatcgccctgaccgaccccgagggctgcccactgagccggtttaaggatagcctgggaaacccaacccacatcctgagaatcggcgagagctataaggagaagcagcggaccatccaggccaagaaggaggtggagcagcggagagccggcggctacagccggaagtacgccagcaaagccaagaatctggcagacgatatggtgagaaacaccgctagagatctgctgtactacgccgtgacccaggatgccatgctgatcttcgccaacctgagccggggcttcggccggcagggcaagcggaccttcatggccgagagacagtacacacggatggaggactggctgaccgccaagctggcctacgagggcctgagcaagacctacctgtccaagacactggcccagtacacctccaagacatgcagcaactgtgggtttaccatcaccagcgccgactacgacagggtgctggagaagctgaagaagacagcaacaggctggatgaccacaattaacggcaaggagctgaaggtggagggccagattacctactacaacagatacaagagacagaacgtagtcaaggacctgtccgtcgagctggatagactgagcgaagaatctgtgaacaacgacatctcctcctggacaaagggcagaagcggagaagctctgagcctcctgaagaaaagattctcccatagacccgtgcaggagaagttcgtgtgcctgaactgcggcttcgagacacacgcagccgagcaagccgccctgaacatcgccagatcctggctgttcctgcggagccaggagtacaagaaataccagacaaacaagacaaccggcaacaccgataagagagccttcgtcgagacctggcagtccttttaccggaagaagcttaaggaggtgtggaaacctgccgtgcggtctggcggatctggcggaggctcctccccaggagctggtgaccttccaggacgtggccgtgtacttcacccccgaggaggtgaggtacctggacagctaccagaaggccctgtacaaggacgtgatgctggagaactacggcaacatggccagcctgggcttccccctgagcaagcccgtgctgatcagccagctggagaggggcgaggagccctgggccatggaccccctggtggccaaggagaggaagaccaggaggggcaccagcggatctggctccggcagcggccccaagaaaaagagaaaagtctaagctgccttctgcggggcttgccttctggccatgcccttcttctctcccttgcacctgtacctcttggtctttgaataaagcctgagtaggaaggctagcaaaaaaaaaaaaaaaaaaaaaaaaaaaaaaaaaaaaaaaaaaaaaaaaaaaaaaaaaaaaaaaaaaaaaaaaaaaaaaaa

SEQ ID NO: 15388 - RNA, 9485 nt, synthetic construct
  source 1..9485: mol_type = other RNA
aggaaataagagagaaaagaagagtaagaagaaatataagagccaccatggcccctaagaagaagcgtaaagtgagccggatggaacgcctcgtctacgaggtgcggcagaagtgcagaaacatcgaggacatctgcatctcctgcggatctctgaacgtgaccctggagcacccactgttcatcggcggcatgtgccagaactgtaaaaactgttttctggagtgtgcctatcaatacgacgatgacggctaccagagctactgcaccatctgttgcggcggaagagaggtgctgatgtgtggaaataacaactgctgccggtgcttctgcgtggaatgcgtggacctgctggtgggccccggcgccgcccaggccgctattaaggaagatccttggaactgctacatgtgcggccacaagggcacatacggcctgctgagacggagagaggactggcctagcagactgcagatgttcttcgccaataaccacgaccaggagttcgacccccctaaggtgtaccctcccgtccccgccgagaagagaaagcccatccgggtcctgagcctgttcgatggcatcgccaccggtctgctggtgctgaaggacctgggcatccaggtggataggtacattgcctccgaggtgtgcgaggactccatcaccgtgggaatggtgcgtcatcagggcaagatcatgtacgtgggcgacgtgcggagcgtgacacagaagcatatccaggagtggggccctttcgacctggtgatcggcggcagcccttgcaatgacctgagcatcgtgaacccagcccggaagggcctgtacgagggaaccggcagactgttcttcgagttttacagactgctgcacgacgcccggcctaaggaaggcgacgaccggcccttcttttggctgttcgagaatgtggtggccatgggagtcagcgacaagcgggatattagccggttcctggagagcaaccccgtgatgatcgatgccaaggaagtgagcgccgcccaccgggccagatacttctggggcaatctgcctggcatgaacagacccctggccagcaccgtgaacgacaagctggagctgcaggagtgcctggagcacggccggatcgccaagttcagcaaggtgagaaccatcaccacccgaagcaacagcatcaaacaaggcaaggaccagcactttcctgtgttcatgaacgagaaggaggacatcctgtggtgtaccgagatggagagagtgttcgggttcccagtccactacacagatgtcagcaacatgtctagactggccagacagagactgctgggaagaagctggtccgtccctgtgatcagacacctgttcgcccctctgaaggagtacttcgcctgcgtgagcagcggcaacagcaacgccaacagccggggccccagcttctctagcggcctggtgccactgtccctgagagggagccacatgggccccatggagatctacaaaaccgtgagcgcctggaagcggcagcctgtgcgcgtgctgagcctgtttcggaatatcgataaagtcctgaaaagcctgggattcctggagagcggctctggctccggcggtggcaccctgaagtacgtggaggatgtgacaaacgtggtcagacgggatgtggagaagtggggccccttcgatctggtgtacggcagcacccaacccctgggcagctcttgtgaccggtgccctggctggtacatgtttcagttccaccggatcctgcagtacgccctgccgagacaggagtcccagcggccattcttttggattttcatggacaacttgctgctgaccgaggatgaccaggaaactaccactcggttcctgcagaccgaagccgtgaccctgcaggacgtgagaggccgggactaccagaacgccatgcgggtgtggtccaacatccctggactgaaaagcaagcacgcacctctgacccctaaagaagaggagtacctgcaggcccaggtgcggagcagaagcaagctggacgcccctaaggtggatctgctggtgaagaattgcctcctgcccctgagagagtacttcaagtatttcagccagaatagtctgcccctgggaggcagcggcggcggcgccctggtgacatttgaggacgtcgccgtgcggttcacccaggaggaatgggctctgctggatccttctcagaaaatcctgtaccgggacgtgatgagagagacataccggaatctgacctccgtgggcatcaactgggaatgttgggaccttgaagcctgcttcagaagcctgggaagaaacctgagagtgcaggtggtgaagagaaagtgcgagctgaccaacagcggcccctgcgccgagggcggcccaagcagcggcgcccctcctcccagcggcggcagcccagccggctccccaacctctaccgaggagggcacctctgagtccgccacccccgagagcggccctggcacctccaccgagcccagcgagggcagcgcacccggcagccctgccggcagccccacctccacagaggagggaaccagcaccgagcccagcgaaggcagcgccccaggcaccagcaccgagcctagtgagcaggagattaaacggatcaacaagatcagaagaagacttgtgaaagacagcaacaccaagaaggccggcaagacaggccccatgaaaaccctgctggttagagtgatgacacccgatctgagagagcggctggaaaacctgagaaagaagcctgaaaatatcccccagcccatcagcaatacatctagagccaacctgaataagctgctgaccgattacaccgaaatgaagaaggcgatcctgcatgtgtactgggaagagttccagaaggaccctgtgggcctgatgagccgggtggcccagcctgccagcaagaagatcgatcagaacaagctgaaacctgagatggacgagaagggcaacctgaccaccgccggctttgcctgctctcagtgtggccagcccctgttcgtgtacaagctggagcaggtgtctgagaagggcaaggcttacaccaactacttcggacggtgcaatgtggccgagcacgaaaagctgatcctgctggcccagctgaagcccgagaaggatagcgacgaagccgtgacatatagcctgggaaagtttgggcagagggccctggatttctacagcattcatgtgaccaaggagtccacccaccccgtgaagcccctggcccagatcgccggaaacagatacgcctccggacctgtgggaaaggccctgagcgacgcatgtatgggcacaatcgcctccttcctgtctaagtaccaggacatcatcatcgaacaccagaaggtggtgaagggcaaccagaagagactggagagcctgcgggagctggccggcaaggaaaacctggaataccctagcgtgaccctgccacctcagcctcacaccaaggagggcgttgatgcctacaacgaagtgatcgcccgggtgcgaatgtgggtgaacctgaacctgtggcagaagctgaagctaagcagagatgatgccaagcctctgctgagactgaagggattcccttcctttcctctggtcgagagacaggccaacgaagtggactggtgggacatggtgtgtaacgtgaagaagctgatcaacgagaaaaaggaggatggcaaggtgttttggcagaatctggctggctacaagagacaggaagccctgagaccatacctgagcagcgaggaagatcggaagaagggaaagaaattcgctcggtaccagctgggcgacctgctgctgcacctggaaaagaagcacggcgaggactggggaaaggtgtacgacgaggcctgggagcggattgacaagaaagtggaaggcctgagcaagcacatcaagctggaagaggaacggagaagcgaggacgcccagagcaaggccgccctgaccgactggctgcgggctaaggccagcttcgtgatcgagggcctgaaggaggccgacaaggacgagttctgcagatgcgagctgaagctgcagaagtggtacggggacctgcggggaaagcccttcgccatcgaagccgagaacagcatcctggacatcagcggcttcagcaagcagtacaactgtgccttcatctggcagaaggacggcgtgaagaagctgaacctgtacctgatcatcaactacttcaagggcggcaagctgcggttcaagaagatcaaacctgaagccttcgaagccaacagattctacaccgtgatcaacaaaaagagcggcgagatcgtgcccatggaggtgaacttcaacttcgacgaccccaacctgatcatcctgcctctggcctttggcaagagacagggcagagaattcatctggaacgacctgctgtccctggaaaccggcagcctgaagctggccaacggaagagtgatcgagaagacactgtacaacagaagaacccggcaggatgagcctgccctgttcgtggccctgaccttcgagcggcgggaggtcctggactcctccaatatcaaaccaatgaacctgatcggcgtggcaagaggcgaaaacatccccgccgtgatcgccctgaccgaccccgagggctgcccactgagccggtttaaggatagcctgggaaacccaacccacatcctgagaatcggcgagagctataaggagaagcagcggaccatccaggccaagaaggaggtggagcagcggagagccggcggctacagccggaagtacgccagcaaagccaagaatctggcagacgatatggtgagaaacaccgctagagatctgctgtactacgccgtgacccaggatgccatgctgatcttcgccaacctgagccggggcttcggccggcagggcaagcggaccttcatggccgagagacagtacacacggatggaggactggctgaccgccaagctggcctacgagggcctgagcaagacctacctgtccaagacactggcccagtacacctccaagacatgcagcaactgtgggtttaccatcaccagcgccgactacgacagggtgctggagaagctgaagaagacagcaacaggctggatgaccacaattaacggcaaggagctgaaggtggagggccagattacctactacaacagatacaagagacagaacgtagtcaaggacctgtccgtcgagctggatagactgagcgaagaatctgtgaacaacgacatctcctcctggacaaagggcagaagcggagaagctctgagcctcctgaagaaaagattctcccatagacccgtgcaggagaagttcgtgtgcctgaactgcggcttcgagacacacgcagccgagcaagccgccctgaacatcgccagatcctggctgttcctgcggagccaggagtacaagaaataccagacaaacaagacaaccggcaacaccgataagagagccttcgtcgagacctggcagtccttttaccggaagaagcttaaggaggtgtggaaacctgccgtgcggtctggcggatctggcggaggctccaccgtgggcagcgtgatgttcagcgacgtgagcgtggacttcagccaggaggagtgggagtgcctggaccccggccagagggacctgtacagggacgtgatgctggagaactacagcaacctgctgagcatgggcctgtacatccccaagccccaggtgatcagcctgctggagcagggcaaggagccctggatggtgggcagggagctgaccaggggcctgtgcagcgacctggagagcatgggcggcccaagcagcggcgcccctcctcccagcggcggcagcccagccggctccccaacctctaccgaggagggcacctctgagtccgccacccccgagagcggccctggcacctccaccgagcccagcgagggcagcgcacccggcagccctgccggcagccccacctccacagaggagggaaccagcaccgagcccagcgaaggcagcgccccaggcaccagcaccgagcctagtgagcaggagattaaacggatcaacaagatcagaagaagacttgtgaaagacagcaacaccaagaaggccggcaagacaggccccatgaaaaccctgctggttagagtgatgacacccgatctgagagagcggctggaaaacctgagaaagaagcctgaaaatatcccccagcccatcagcaatacatctagagccaacctgaataagctgctgaccgattacaccgaaatgaagaaggcgatcctgcatgtgtactgggaagagttccagaaggaccctgtgggcctgatgagccgggtggcccagcctgccagcaagaagatcgatcagaacaagctgaaacctgagatggacgagaagggcaacctgaccaccgccggctttgcctgctctcagtgtggccagcccctgttcgtgtacaagctggagcaggtgtctgagaagggcaaggcttacaccaactacttcggacggtgcaatgtggccgagcacgaaaagctgatcctgctggcccagctgaagcccgagaaggatagcgacgaagccgtgacatatagcctgggaaagtttgggcagagggccctggatttctacagcattcatgtgaccaaggagtccacccaccccgtgaagcccctggcccagatcgccggaaacagatacgcctccggacctgtgggaaaggccctgagcgacgcatgtatgggcacaatcgcctccttcctgtctaagtaccaggacatcatcatcgaacaccagaaggtggtgaagggcaaccagaagagactggagagcctgcgggagctggccggcaaggaaaacctggaataccctagcgtgaccctgccacctcagcctcacaccaaggagggcgttgatgcctacaacgaagtgatcgcccgggtgcgaatgtgggtgaacctgaacctgtggcagaagctgaagctaagcagagatgatgccaagcctctgctgagactgaagggattcccttcctttcctctggtcgagagacaggccaacgaagtggactggtgggacatggtgtgtaacgtgaagaagctgatcaacgagaaaaaggaggatggcaaggtgttttggcagaatctggctggctacaagagacaggaagccctgagaccatacctgagcagcgaggaagatcggaagaagggaaagaaattcgctcggtaccagctgggcgacctgctgctgcacctggaaaagaagcacggcgaggactggggaaaggtgtacgacgaggcctgggagcggattgacaagaaagtggaaggcctgagcaagcacatcaagctggaagaggaacggagaagcgaggacgcccagagcaaggccgccctgaccgactggctgcgggctaaggccagcttcgtgatcgagggcctgaaggaggccgacaaggacgagttctgcagatgcgagctgaagctgcagaagtggtacggggacctgcggggaaagcccttcgccatcgaagccgagaacagcatcctggacatcagcggcttcagcaagcagtacaactgtgccttcatctggcagaaggacggcgtgaagaagctgaacctgtacctgatcatcaactacttcaagggcggcaagctgcggttcaagaagatcaaacctgaagccttcgaagccaacagattctacaccgtgatcaacaaaaagagcggcgagatcgtgcccatggaggtgaacttcaacttcgacgaccccaacctgatcatcctgcctctggcctttggcaagagacagggcagagaattcatctggaacgacctgctgtccctggaaaccggcagcctgaagctggccaacggaagagtgatcgagaagacactgtacaacagaagaacccggcaggatgagcctgccctgttcgtggccctgaccttcgagcggcgggaggtcctggactcctccaatatcaaaccaatgaacctgatcggcgtggcaagaggcgaaaacatccccgccgtgatcgccctgaccgaccccgagggctgcccactgagccggtttaaggatagcctgggaaacccaacccacatcctgagaatcggcgagagctataaggagaagcagcggaccatccaggccaagaaggaggtggagcagcggagagccggcggctacagccggaagtacgccagcaaagccaagaatctggcagacgatatggtgagaaacaccgctagagatctgctgtactacgccgtgacccaggatgccatgctgatcttcgccaacctgagccggggcttcggccggcagggcaagcggaccttcatggccgagagacagtacacacggatggaggactggctgaccgccaagctggcctacgagggcctgagcaagacctacctgtccaagacactggcccagtacacctccaagacatgcagcaactgtgggtttaccatcaccagcgccgactacgacagggtgctggagaagctgaagaagacagcaacaggctggatgaccacaattaacggcaaggagctgaaggtggagggccagattacctactacaacagatacaagagacagaacgtagtcaaggacctgtccgtcgagctggatagactgagcgaagaatctgtgaacaacgacatctcctcctggacaaagggcagaagcggagaagctctgagcctcctgaagaaaagattctcccatagacccgtgcaggagaagttcgtgtgcctgaactgcggcttcgagacacacgcagccgagcaagccgccctgaacatcgccagatcctggctgttcctgcggagccaggagtacaagaaataccagacaaacaagacaaccggcaacaccgataagagagccttcgtcgagacctggcagtccttttaccggaagaagcttaaggaggtgtggaaacctgccgtgcggtctggcggatctggcggaggctcctaccgtgggcagcgtgatgttcagcgacgtgagcgtggacttcagccaggaggagtgggagtgcctggaccccggccagagggacctgtacagggacgtgatgctggagaactacagcaacctgctgagcatgggcctgtacatccccaagccccaggtgatcagcctgctggagcagggcaaggagccctggatggtgggcagggagctgaccaggggcctgtgcagcgacctggagagcatgggatctggctccggcagcggccccaagaaaaagagaaaagtctaagctgccttctgcggggcttgccttctggccatgcccttcttctctcccttgcacctgtacctcttggtctttgaataaagcctgagtaggaaggctagcaaaaaaaaaaaaaaaaaaaaaaaaaaaaaaaaaaaaaaaaaaaaaaaaaaaaaaaaaaaaaaaaaaaaaaaaaaaaaaaa

SEQ ID NO: 15389 - RNA, 9485 nt, synthetic construct
  source 1..9485: mol_type = other RNA
aggaaataagagagaaaagaagagtaagaagaaatataagagccaccatggcccctaagaagaagcgtaaagtgagccggatggaacgcctcgtctacgaggtgcggcagaagtgcagaaacatcgaggacatctgcatctcctgcggatctctgaacgtgaccctggagcacccactgttcatcggcggcatgtgccagaactgtaaaaactgttttctggagtgtgcctatcaatacgacgatgacggctaccagagctactgcaccatctgttgcggcggaagagaggtgctgatgtgtggaaataacaactgctgccggtgcttctgcgtggaatgcgtggacctgctggtgggccccggcgccgcccaggccgctattaaggaagatccttggaactgctacatgtgcggccacaagggcacatacggcctgctgagacggagagaggactggcctagcagactgcagatgttcttcgccaataaccacgaccaggagttcgacccccctaaggtgtaccctcccgtccccgccgagaagagaaagcccatccgggtcctgagcctgttcgatggcatcgccaccggtctgctggtgctgaaggacctgggcatccaggtggataggtacattgcctccgaggtgtgcgaggactccatcaccgtgggaatggtgcgtcatcagggcaagatcatgtacgtgggcgacgtgcggagcgtgacacagaagcatatccaggagtggggccctttcgacctggtgatcggcggcagcccttgcaatgacctgagcatcgtgaacccagcccggaagggcctgtacgagggaaccggcagactgttcttcgagttttacagactgctgcacgacgcccggcctaaggaaggcgacgaccggcccttcttttggctgttcgagaatgtggtggccatgggagtcagcgacaagcgggatattagccggttcctggagagcaaccccgtgatgatcgatgccaaggaagtgagcgccgcccaccgggccagatacttctggggcaatctgcctggcatgaacagacccctggccagcaccgtgaacgacaagctggagctgcaggagtgcctggagcacggccggatcgccaagttcagcaaggtgagaaccatcaccacccgaagcaacagcatcaaacaaggcaaggaccagcactttcctgtgttcatgaacgagaaggaggacatcctgtggtgtaccgagatggagagagtgttcgggttcccagtccactacacagatgtcagcaacatgtctagactggccagacagagactgctgggaagaagctggtccgtccctgtgatcagacacctgttcgcccctctgaaggagtacttcgcctgcgtgagcagcggcaacagcaacgccaacagccggggccccagcttctctagcggcctggtgccactgtccctgagagggagccacatgggccccatggagatctacaaaaccgtgagcgcctggaagcggcagcctgtgcgcgtgctgagcctgtttcggaatatcgataaagtcctgaaaagcctgggattcctggagagcggctctggctccggcggtggcaccctgaagtacgtggaggatgtgacaaacgtggtcagacgggatgtggagaagtggggccccttcgatctggtgtacggcagcacccaacccctgggcagctcttgtgaccggtgccctggctggtacatgtttcagttccaccggatcctgcagtacgccctgccgagacaggagtcccagcggccattcttttggattttcatggacaacttgctgctgaccgaggatgaccaggaaactaccactcggttcctgcagaccgaagccgtgaccctgcaggacgtgagaggccgggactaccagaacgccatgcgggtgtggtccaacatccctggactgaaaagcaagcacgcacctctgacccctaaagaagaggagtacctgcaggcccaggtgcggagcagaagcaagctggacgcccctaaggtggatctgctggtgaagaattgcctcctgcccctgagagagtacttcaagtatttcagccagaatagtctgcccctgggaggcagcggcggcggcgccctggtgacatttgaggacgtcgccgtgcggttcacccaggaggaatgggctctgctggatccttctcagaaaatcctgtaccgggacgtgatgagagagacataccggaatctgacctccgtgggcatcaactgggaatgttgggaccttgaagcctgcttcagaagcctgggaagaaacctgagagtgcaggtggtgaagagaaagtgcgagctgaccaacagcggcccctgcgccgagggcggcccaagcagcggcgcccctcctcccagcggcggcagcccagccggctccccaacctctaccgaggagggcacctctgagtccgccacccccgagagcggccctggcacctccaccgagcccagcgagggcagcgcacccggcagccctgccggcagccccacctccacagaggagggaaccagcaccgagcccagcgaaggcagcgccccaggcaccagcaccgagcctagtgagcaggagattaaacggatcaacaagatcagaagaagacttgtgaaagacagcaacaccaagaaggccggcaagacaggccccatgaaaaccctgctggttagagtgatgacacccgatctgagagagcggctggaaaacctgagaaagaagcctgaaaatatcccccagcccatcagcaatacatctagagccaacctgaataagctgctgaccgattacaccgaaatgaagaaggcgatcctgcatgtgtactgggaagagttccagaaggaccctgtgggcctgatgagccgggtggcccagcctgccagcaagaagatcgatcagaacaagctgaaacctgagatggacgagaagggcaacctgaccaccgccggctttgcctgctctcagtgtggccagcccctgttcgtgtacaagctggagcaggtgtctgagaagggcaaggcttacaccaactacttcggacggtgcaatgtggccgagcacgaaaagctgatcctgctggcccagctgaagcccgagaaggatagcgacgaagccgtgacatatagcctgggaaagtttgggcagagggccctggatttctacagcattcatgtgaccaaggagtccacccaccccgtgaagcccctggcccagatcgccggaaacagatacgcctccggacctgtgggaaaggccctgagcgacgcatgtatgggcacaatcgcctccttcctgtctaagtaccaggacatcatcatcgaacaccagaaggtggtgaagggcaaccagaagagactggagagcctgcgggagctggccggcaaggaaaacctggaataccctagcgtgaccctgccacctcagcctcacaccaaggagggcgttgatgcctacaacgaagtgatcgcccgggtgcgaatgtgggtgaacctgaacctgtggcagaagctgaagctaagcagagatgatgccaagcctctgctgagactgaagggattcccttcctttcctctggtcgagagacaggccaacgaagtggactggtgggacatggtgtgtaacgtgaagaagctgatcaacgagaaaaaggaggatggcaaggtgttttggcagaatctggctggctacaagagacaggaagccctgagaccatacctgagcagcgaggaagatcggaagaagggaaagaaattcgctcggtaccagctgggcgacctgctgctgcacctggaaaagaagcacggcgaggactggggaaaggtgtacgacgaggcctgggagcggattgacaagaaagtggaaggcctgagcaagcacatcaagctggaagaggaacggagaagcgaggacgcccagagcaaggccgccctgaccgactggctgcgggctaaggccagcttcgtgatcgagggcctgaaggaggccgacaaggacgagttctgcagatgcgagctgaagctgcagaagtggtacggggacctgcggggaaagcccttcgccatcgaagccgagaacagcatcctggacatcagcggcttcagcaagcagtacaactgtgccttcatctggcagaaggacggcgtgaagaagctgaacctgtacctgatcatcaactacttcaagggcggcaagctgcggttcaagaagatcaaacctgaagccttcgaagccaacagattctacaccgtgatcaacaaaaagagcggcgagatcgtgcccatggaggtgaacttcaacttcgacgaccccaacctgatcatcctgcctctggcctttggcaagagacagggcagagaattcatctggaacgacctgctgtccctggaaaccggcagcctgaagctggccaacggaagagtgatcgagaagacactgtacaacagaagaacccggcaggatgagcctgccctgttcgtggccctgaccttcgagcggcgggaggtcctggactcctccaatatcaaaccaatgaacctgatcggcgtggcaagaggcgaaaacatccccgccgtgatcgccctgaccgaccccgagggctgcccactgagccggtttaaggatagcctgggaaacccaacccacatcctgagaatcggcgagagctataaggagaagcagcggaccatccaggccaagaaggaggtggagcagcggagagccggcggctacagccggaagtacgccagcaaagccaagaatctggcagacgatatggtgagaaacaccgctagagatctgctgtactacgccgtgacccaggatgccatgctgatcttcgccaacctgagccggggcttcggccggcagggcaagcggaccttcatggccgagagacagtacacacggatggaggactggctgaccgccaagctggcctacgagggcctgagcaagacctacctgtccaagacactggcccagtacacctccaagacatgcagcaactgtgggtttaccatcaccagcgccgactacgacagggtgctggagaagctgaagaagacagcaacaggctggatgaccacaattaacggcaaggagctgaaggtggagggccagattacctactacaacagatacaagagacagaacgtagtcaaggacctgtccgtcgagctggatagactgagcgaagaatctgtgaacaacgacatctcctcctggacaaagggcagaagcggagaagctctgagcctcctgaagaaaagattctcccatagacccgtgcaggagaagttcgtgtgcctgaactgcggcttcgagacacacgcagccgagcaagccgccctgaacatcgccagatcctggctgttcctgcggagccaggagtacaagaaataccagacaaacaagacaaccggcaacaccgataagagagccttcgtcgagacctggcagtccttttaccggaagaagcttaaggaggtgtggaaacctgccgtgcggtctggcggatctggcggaggctccgtgcaggagcccgtgaccttcaaggacgtggccgtggacttcacccaggaggagtggggccagctggacctggtgcagaggaccctgtacagggacgtgatgctggagacctacggccacctgctgagcgtgggcaaccagatcgccaagcccgaggtgatcagcctgctggagcagggcgaggagccctggagcgtggagcaggcctgcccccagcacacctgccccgagtggatgaggaacggcggcccaagcagcggcgcccctcctcccagcggcggcagcccagccggctccccaacctctaccgaggagggcacctctgagtccgccacccccgagagcggccctggcacctccaccgagcccagcgagggcagcgcacccggcagccctgccggcagccccacctccacagaggagggaaccagcaccgagcccagcgaaggcagcgccccaggcaccagcaccgagcctagtgagcaggagattaaacggatcaacaagatcagaagaagacttgtgaaagacagcaacaccaagaaggccggcaagacaggccccatgaaaaccctgctggttagagtgatgacacccgatctgagagagcggctggaaaacctgagaaagaagcctgaaaatatcccccagcccatcagcaatacatctagagccaacctgaataagctgctgaccgattacaccgaaatgaagaaggcgatcctgcatgtgtactgggaagagttccagaaggaccctgtgggcctgatgagccgggtggcccagcctgccagcaagaagatcgatcagaacaagctgaaacctgagatggacgagaagggcaacctgaccaccgccggctttgcctgctctcagtgtggccagcccctgttcgtgtacaagctggagcaggtgtctgagaagggcaaggcttacaccaactacttcggacggtgcaatgtggccgagcacgaaaagctgatcctgctggcccagctgaagcccgagaaggatagcgacgaagccgtgacatatagcctgggaaagtttgggcagagggccctggatttctacagcattcatgtgaccaaggagtccacccaccccgtgaagcccctggcccagatcgccggaaacagatacgcctccggacctgtgggaaaggccctgagcgacgcatgtatgggcacaatcgcctccttcctgtctaagtaccaggacatcatcatcgaacaccagaaggtggtgaagggcaaccagaagagactggagagcctgcgggagctggccggcaaggaaaacctggaataccctagcgtgaccctgccacctcagcctcacaccaaggagggcgttgatgcctacaacgaagtgatcgcccgggtgcgaatgtgggtgaacctgaacctgtggcagaagctgaagctaagcagagatgatgccaagcctctgctgagactgaagggattcccttcctttcctctggtcgagagacaggccaacgaagtggactggtgggacatggtgtgtaacgtgaagaagctgatcaacgagaaaaaggaggatggcaaggtgttttggcagaatctggctggctacaagagacaggaagccctgagaccatacctgagcagcgaggaagatcggaagaagggaaagaaattcgctcggtaccagctgggcgacctgctgctgcacctggaaaagaagcacggcgaggactggggaaaggtgtacgacgaggcctgggagcggattgacaagaaagtggaaggcctgagcaagcacatcaagctggaagaggaacggagaagcgaggacgcccagagcaaggccgccctgaccgactggctgcgggctaaggccagcttcgtgatcgagggcctgaaggaggccgacaaggacgagttctgcagatgcgagctgaagctgcagaagtggtacggggacctgcggggaaagcccttcgccatcgaagccgagaacagcatcctggacatcagcggcttcagcaagcagtacaactgtgccttcatctggcagaaggacggcgtgaagaagctgaacctgtacctgatcatcaactacttcaagggcggcaagctgcggttcaagaagatcaaacctgaagccttcgaagccaacagattctacaccgtgatcaacaaaaagagcggcgagatcgtgcccatggaggtgaacttcaacttcgacgaccccaacctgatcatcctgcctctggcctttggcaagagacagggcagagaattcatctggaacgacctgctgtccctggaaaccggcagcctgaagctggccaacggaagagtgatcgagaagacactgtacaacagaagaacccggcaggatgagcctgccctgttcgtggccctgaccttcgagcggcgggaggtcctggactcctccaatatcaaaccaatgaacctgatcggcgtggcaagaggcgaaaacatccccgccgtgatcgccctgaccgaccccgagggctgcccactgagccggtttaaggatagcctgggaaacccaacccacatcctgagaatcggcgagagctataaggagaagcagcggaccatccaggccaagaaggaggtggagcagcggagagccggcggctacagccggaagtacgccagcaaagccaagaatctggcagacgatatggtgagaaacaccgctagagatctgctgtactacgccgtgacccaggatgccatgctgatcttcgccaacctgagccggggcttcggccggcagggcaagcggaccttcatggccgagagacagtacacacggatggaggactggctgaccgccaagctggcctacgagggcctgagcaagacctacctgtccaagacactggcccagtacacctccaagacatgcagcaactgtgggtttaccatcaccagcgccgactacgacagggtgctggagaagctgaagaagacagcaacaggctggatgaccacaattaacggcaaggagctgaaggtggagggccagattacctactacaacagatacaagagacagaacgtagtcaaggacctgtccgtcgagctggatagactgagcgaagaatctgtgaacaacgacatctcctcctggacaaagggcagaagcggagaagctctgagcctcctgaagaaaagattctcccatagacccgtgcaggagaagttcgtgtgcctgaactgcggcttcgagacacacgcagccgagcaagccgccctgaacatcgccagatcctggctgttcctgcggagccaggagtacaagaaataccagacaaacaagacaaccggcaacaccgataagagagccttcgtcgagacctggcagtccttttaccggaagaagcttaaggaggtgtggaaacctgccgtgcggtctggcggatctggcggaggctcctgtgcaggagcccgtgaccttcaaggacgtggccgtggacttcacccaggaggagtggggccagctggacctggtgcagaggaccctgtacagggacgtgatgctggagacctacggccacctgctgagcgtgggcaaccagatcgccaagcccgaggtgatcagcctgctggagcagggcgaggagccctggagcgtggagcaggcctgcccccagcacacctgccccgagtggatgaggaacggatctggctccggcagcggccccaagaaaaagagaaaagtctaagctgccttctgcggggcttgccttctggccatgcccttcttctctcccttgcacctgtacctcttggtctttgaataaagcctgagtaggaaggctagcaaaaaaaaaaaaaaaaaaaaaaaaaaaaaaaaaaaaaaaaaaaaaaaaaaaaaaaaaaaaaaaaaaaaaaaaaaaaaaaa

SEQ ID NO: 15390 - RNA, 9485 nt, synthetic construct
  source 1..9485: mol_type = other RNA
aggaaataagagagaaaagaagagtaagaagaaatataagagccaccatggcccctaagaagaagcgtaaagtgagccggatggaacgcctcgtctacgaggtgcggcagaagtgcagaaacatcgaggacatctgcatctcctgcggatctctgaacgtgaccctggagcacccactgttcatcggcggcatgtgccagaactgtaaaaactgttttctggagtgtgcctatcaatacgacgatgacggctaccagagctactgcaccatctgttgcggcggaagagaggtgctgatgtgtggaaataacaactgctgccggtgcttctgcgtggaatgcgtggacctgctggtgggccccggcgccgcccaggccgctattaaggaagatccttggaactgctacatgtgcggccacaagggcacatacggcctgctgagacggagagaggactggcctagcagactgcagatgttcttcgccaataaccacgaccaggagttcgacccccctaaggtgtaccctcccgtccccgccgagaagagaaagcccatccgggtcctgagcctgttcgatggcatcgccaccggtctgctggtgctgaaggacctgggcatccaggtggataggtacattgcctccgaggtgtgcgaggactccatcaccgtgggaatggtgcgtcatcagggcaagatcatgtacgtgggcgacgtgcggagcgtgacacagaagcatatccaggagtggggccctttcgacctggtgatcggcggcagcccttgcaatgacctgagcatcgtgaacccagcccggaagggcctgtacgagggaaccggcagactgttcttcgagttttacagactgctgcacgacgcccggcctaaggaaggcgacgaccggcccttcttttggctgttcgagaatgtggtggccatgggagtcagcgacaagcgggatattagccggttcctggagagcaaccccgtgatgatcgatgccaaggaagtgagcgccgcccaccgggccagatacttctggggcaatctgcctggcatgaacagacccctggccagcaccgtgaacgacaagctggagctgcaggagtgcctggagcacggccggatcgccaagttcagcaaggtgagaaccatcaccacccgaagcaacagcatcaaacaaggcaaggaccagcactttcctgtgttcatgaacgagaaggaggacatcctgtggtgtaccgagatggagagagtgttcgggttcccagtccactacacagatgtcagcaacatgtctagactggccagacagagactgctgggaagaagctggtccgtccctgtgatcagacacctgttcgcccctctgaaggagtacttcgcctgcgtgagcagcggcaacagcaacgccaacagccggggccccagcttctctagcggcctggtgccactgtccctgagagggagccacatgggccccatggagatctacaaaaccgtgagcgcctggaagcggcagcctgtgcgcgtgctgagcctgtttcggaatatcgataaagtcctgaaaagcctgggattcctggagagcggctctggctccggcggtggcaccctgaagtacgtggaggatgtgacaaacgtggtcagacgggatgtggagaagtggggccccttcgatctggtgtacggcagcacccaacccctgggcagctcttgtgaccggtgccctggctggtacatgtttcagttccaccggatcctgcagtacgccctgccgagacaggagtcccagcggccattcttttggattttcatggacaacttgctgctgaccgaggatgaccaggaaactaccactcggttcctgcagaccgaagccgtgaccctgcaggacgtgagaggccgggactaccagaacgccatgcgggtgtggtccaacatccctggactgaaaagcaagcacgcacctctgacccctaaagaagaggagtacctgcaggcccaggtgcggagcagaagcaagctggacgcccctaaggtggatctgctggtgaagaattgcctcctgcccctgagagagtacttcaagtatttcagccagaatagtctgcccctgggaggcagcggcggcggcgccctggtgacatttgaggacgtcgccgtgcggttcacccaggaggaatgggctctgctggatccttctcagaaaatcctgtaccgggacgtgatgagagagacataccggaatctgacctccgtgggcatcaactgggaatgttgggaccttgaagcctgcttcagaagcctgggaagaaacctgagagtgcaggtggtgaagagaaagtgcgagctgaccaacagcggcccctgcgccgagggcggcccaagcagcggcgcccctcctcccagcggcggcagcccagccggctccccaacctctaccgaggagggcacctctgagtccgccacccccgagagcggccctggcacctccaccgagcccagcgagggcagcgcacccggcagccctgccggcagccccacctccacagaggagggaaccagcaccgagcccagcgaaggcagcgccccaggcaccagcaccgagcctagtgagcaggagattaaacggatcaacaagatcagaagaagacttgtgaaagacagcaacaccaagaaggccggcaagacaggccccatgaaaaccctgctggttagagtgatgacacccgatctgagagagcggctggaaaacctgagaaagaagcctgaaaatatcccccagcccatcagcaatacatctagagccaacctgaataagctgctgaccgattacaccgaaatgaagaaggcgatcctgcatgtgtactgggaagagttccagaaggaccctgtgggcctgatgagccgggtggcccagcctgccagcaagaagatcgatcagaacaagctgaaacctgagatggacgagaagggcaacctgaccaccgccggctttgcctgctctcagtgtggccagcccctgttcgtgtacaagctggagcaggtgtctgagaagggcaaggcttacaccaactacttcggacggtgcaatgtggccgagcacgaaaagctgatcctgctggcccagctgaagcccgagaaggatagcgacgaagccgtgacatatagcctgggaaagtttgggcagagggccctggatttctacagcattcatgtgaccaaggagtccacccaccccgtgaagcccctggcccagatcgccggaaacagatacgcctccggacctgtgggaaaggccctgagcgacgcatgtatgggcacaatcgcctccttcctgtctaagtaccaggacatcatcatcgaacaccagaaggtggtgaagggcaaccagaagagactggagagcctgcgggagctggccggcaaggaaaacctggaataccctagcgtgaccctgccacctcagcctcacaccaaggagggcgttgatgcctacaacgaagtgatcgcccgggtgcgaatgtgggtgaacctgaacctgtggcagaagctgaagctaagcagagatgatgccaagcctctgctgagactgaagggattcccttcctttcctctggtcgagagacaggccaacgaagtggactggtgggacatggtgtgtaacgtgaagaagctgatcaacgagaaaaaggaggatggcaaggtgttttggcagaatctggctggctacaagagacaggaagccctgagaccatacctgagcagcgaggaagatcggaagaagggaaagaaattcgctcggtaccagctgggcgacctgctgctgcacctggaaaagaagcacggcgaggactggggaaaggtgtacgacgaggcctgggagcggattgacaagaaagtggaaggcctgagcaagcacatcaagctggaagaggaacggagaagcgaggacgcccagagcaaggccgccctgaccgactggctgcgggctaaggccagcttcgtgatcgagggcctgaaggaggccgacaaggacgagttctgcagatgcgagctgaagctgcagaagtggtacggggacctgcggggaaagcccttcgccatcgaagccgagaacagcatcctggacatcagcggcttcagcaagcagtacaactgtgccttcatctggcagaaggacggcgtgaagaagctgaacctgtacctgatcatcaactacttcaagggcggcaagctgcggttcaagaagatcaaacctgaagccttcgaagccaacagattctacaccgtgatcaacaaaaagagcggcgagatcgtgcccatggaggtgaacttcaacttcgacgaccccaacctgatcatcctgcctctggcctttggcaagagacagggcagagaattcatctggaacgacctgctgtccctggaaaccggcagcctgaagctggccaacggaagagtgatcgagaagacactgtacaacagaagaacccggcaggatgagcctgccctgttcgtggccctgaccttcgagcggcgggaggtcctggactcctccaatatcaaaccaatgaacctgatcggcgtggcaagaggcgaaaacatccccgccgtgatcgccctgaccgaccccgagggctgcccactgagccggtttaaggatagcctgggaaacccaacccacatcctgagaatcggcgagagctataaggagaagcagcggaccatccaggccaagaaggaggtggagcagcggagagccggcggctacagccggaagtacgccagcaaagccaagaatctggcagacgatatggtgagaaacaccgctagagatctgctgtactacgccgtgacccaggatgccatgctgatcttcgccaacctgagccggggcttcggccggcagggcaagcggaccttcatggccgagagacagtacacacggatggaggactggctgaccgccaagctggcctacgagggcctgagcaagacctacctgtccaagacactggcccagtacacctccaagacatgcagcaactgtgggtttaccatcaccagcgccgactacgacagggtgctggagaagctgaagaagacagcaacaggctggatgaccacaattaacggcaaggagctgaaggtggagggccagattacctactacaacagatacaagagacagaacgtagtcaaggacctgtccgtcgagctggatagactgagcgaagaatctgtgaacaacgacatctcctcctggacaaagggcagaagcggagaagctctgagcctcctgaagaaaagattctcccatagacccgtgcaggagaagttcgtgtgcctgaactgcggcttcgagacacacgcagccgagcaagccgccctgaacatcgccagatcctggctgttcctgcggagccaggagtacaagaaataccagacaaacaagacaaccggcaacaccgataagagagccttcgtcgagacctggcagtccttttaccggaagaagcttaaggaggtgtggaaacctgccgtgcggtctggcggatctggcggaggctccttccaggccagcgtggtgttcgaggacgtggccgtgaacttcacccccgaggagtgggccctgctgaacaggggccagaggaagctgtacagggacgtgatgctggagacctgcaggaacctgagcgccgtgggcaaggacggcagcatccccagcctggtgttcagcgagaagcagaagttccacagcagcggcgacctgaccaggatgcaggagggcctgctgaggagccccctggtggagggcggcccaagcagcggcgcccctcctcccagcggcggcagcccagccggctccccaacctctaccgaggagggcacctctgagtccgccacccccgagagcggccctggcacctccaccgagcccagcgagggcagcgcacccggcagccctgccggcagccccacctccacagaggagggaaccagcaccgagcccagcgaaggcagcgccccaggcaccagcaccgagcctagtgagcaggagattaaacggatcaacaagatcagaagaagacttgtgaaagacagcaacaccaagaaggccggcaagacaggccccatgaaaaccctgctggttagagtgatgacacccgatctgagagagcggctggaaaacctgagaaagaagcctgaaaatatcccccagcccatcagcaatacatctagagccaacctgaataagctgctgaccgattacaccgaaatgaagaaggcgatcctgcatgtgtactgggaagagttccagaaggaccctgtgggcctgatgagccgggtggcccagcctgccagcaagaagatcgatcagaacaagctgaaacctgagatggacgagaagggcaacctgaccaccgccggctttgcctgctctcagtgtggccagcccctgttcgtgtacaagctggagcaggtgtctgagaagggcaaggcttacaccaactacttcggacggtgcaatgtggccgagcacgaaaagctgatcctgctggcccagctgaagcccgagaaggatagcgacgaagccgtgacatatagcctgggaaagtttgggcagagggccctggatttctacagcattcatgtgaccaaggagtccacccaccccgtgaagcccctggcccagatcgccggaaacagatacgcctccggacctgtgggaaaggccctgagcgacgcatgtatgggcacaatcgcctccttcctgtctaagtaccaggacatcatcatcgaacaccagaaggtggtgaagggcaaccagaagagactggagagcctgcgggagctggccggcaaggaaaacctggaataccctagcgtgaccctgccacctcagcctcacaccaaggagggcgttgatgcctacaacgaagtgatcgcccgggtgcgaatgtgggtgaacctgaacctgtggcagaagctgaagctaagcagagatgatgccaagcctctgctgagactgaagggattcccttcctttcctctggtcgagagacaggccaacgaagtggactggtgggacatggtgtgtaacgtgaagaagctgatcaacgagaaaaaggaggatggcaaggtgttttggcagaatctggctggctacaagagacaggaagccctgagaccatacctgagcagcgaggaagatcggaagaagggaaagaaattcgctcggtaccagctgggcgacctgctgctgcacctggaaaagaagcacggcgaggactggggaaaggtgtacgacgaggcctgggagcggattgacaagaaagtggaaggcctgagcaagcacatcaagctggaagaggaacggagaagcgaggacgcccagagcaaggccgccctgaccgactggctgcgggctaaggccagcttcgtgatcgagggcctgaaggaggccgacaaggacgagttctgcagatgcgagctgaagctgcagaagtggtacggggacctgcggggaaagcccttcgccatcgaagccgagaacagcatcctggacatcagcggcttcagcaagcagtacaactgtgccttcatctggcagaaggacggcgtgaagaagctgaacctgtacctgatcatcaactacttcaagggcggcaagctgcggttcaagaagatcaaacctgaagccttcgaagccaacagattctacaccgtgatcaacaaaaagagcggcgagatcgtgcccatggaggtgaacttcaacttcgacgaccccaacctgatcatcctgcctctggcctttggcaagagacagggcagagaattcatctggaacgacctgctgtccctggaaaccggcagcctgaagctggccaacggaagagtgatcgagaagacactgtacaacagaagaacccggcaggatgagcctgccctgttcgtggccctgaccttcgagcggcgggaggtcctggactcctccaatatcaaaccaatgaacctgatcggcgtggcaagaggcgaaaacatccccgccgtgatcgccctgaccgaccccgagggctgcccactgagccggtttaaggatagcctgggaaacccaacccacatcctgagaatcggcgagagctataaggagaagcagcggaccatccaggccaagaaggaggtggagcagcggagagccggcggctacagccggaagtacgccagcaaagccaagaatctggcagacgatatggtgagaaacaccgctagagatctgctgtactacgccgtgacccaggatgccatgctgatcttcgccaacctgagccggggcttcggccggcagggcaagcggaccttcatggccgagagacagtacacacggatggaggactggctgaccgccaagctggcctacgagggcctgagcaagacctacctgtccaagacactggcccagtacacctccaagacatgcagcaactgtgggtttaccatcaccagcgccgactacgacagggtgctggagaagctgaagaagacagcaacaggctggatgaccacaattaacggcaaggagctgaaggtggagggccagattacctactacaacagatacaagagacagaacgtagtcaaggacctgtccgtcgagctggatagactgagcgaagaatctgtgaacaacgacatctcctcctggacaaagggcagaagcggagaagctctgagcctcctgaagaaaagattctcccatagacccgtgcaggagaagttcgtgtgcctgaactgcggcttcgagacacacgcagccgagcaagccgccctgaacatcgccagatcctggctgttcctgcggagccaggagtacaagaaataccagacaaacaagacaaccggcaacaccgataagagagccttcgtcgagacctggcagtccttttaccggaagaagcttaaggaggtgtggaaacctgccgtgcggtctggcggatctggcggaggctcctttccaggccagcgtggtgttcgaggacgtggccgtgaacttcacccccgaggagtgggccctgctgaacaggggccagaggaagctgtacagggacgtgatgctggagacctgcaggaacctgagcgccgtgggcaaggacggcagcatccccagcctggtgttcagcgagaagcagaagttccacagcagcggcgacctgaccaggatgcaggagggcctgctgaggagccccctggtggagggatctggctccggcagcggccccaagaaaaagagaaaagtctaagctgccttctgcggggcttgccttctggccatgcccttcttctctcccttgcacctgtacctcttggtctttgaataaagcctgagtaggaaggctagcaaaaaaaaaaaaaaaaaaaaaaaaaaaaaaaaaaaaaaaaaaaaaaaaaaaaaaaaaaaaaaaaaaaaaaaaaaaaaaaa

SEQ ID NO: 15391 - RNA, 9485 nt, synthetic construct
  source 1..9485: mol_type = other RNA
aggaaataagagagaaaagaagagtaagaagaaatataagagccaccatggcccctaagaagaagcgtaaagtgagccggatggaacgcctcgtctacgaggtgcggcagaagtgcagaaacatcgaggacatctgcatctcctgcggatctctgaacgtgaccctggagcacccactgttcatcggcggcatgtgccagaactgtaaaaactgttttctggagtgtgcctatcaatacgacgatgacggctaccagagctactgcaccatctgttgcggcggaagagaggtgctgatgtgtggaaataacaactgctgccggtgcttctgcgtggaatgcgtggacctgctggtgggccccggcgccgcccaggccgctattaaggaagatccttggaactgctacatgtgcggccacaagggcacatacggcctgctgagacggagagaggactggcctagcagactgcagatgttcttcgccaataaccacgaccaggagttcgacccccctaaggtgtaccctcccgtccccgccgagaagagaaagcccatccgggtcctgagcctgttcgatggcatcgccaccggtctgctggtgctgaaggacctgggcatccaggtggataggtacattgcctccgaggtgtgcgaggactccatcaccgtgggaatggtgcgtcatcagggcaagatcatgtacgtgggcgacgtgcggagcgtgacacagaagcatatccaggagtggggccctttcgacctggtgatcggcggcagcccttgcaatgacctgagcatcgtgaacccagcccggaagggcctgtacgagggaaccggcagactgttcttcgagttttacagactgctgcacgacgcccggcctaaggaaggcgacgaccggcccttcttttggctgttcgagaatgtggtggccatgggagtcagcgacaagcgggatattagccggttcctggagagcaaccccgtgatgatcgatgccaaggaagtgagcgccgcccaccgggccagatacttctggggcaatctgcctggcatgaacagacccctggccagcaccgtgaacgacaagctggagctgcaggagtgcctggagcacggccggatcgccaagttcagcaaggtgagaaccatcaccacccgaagcaacagcatcaaacaaggcaaggaccagcactttcctgtgttcatgaacgagaaggaggacatcctgtggtgtaccgagatggagagagtgttcgggttcccagtccactacacagatgtcagcaacatgtctagactggccagacagagactgctgggaagaagctggtccgtccctgtgatcagacacctgttcgcccctctgaaggagtacttcgcctgcgtgagcagcggcaacagcaacgccaacagccggggccccagcttctctagcggcctggtgccactgtccctgagagggagccacatgggccccatggagatctacaaaaccgtgagcgcctggaagcggcagcctgtgcgcgtgctgagcctgtttcggaatatcgataaagtcctgaaaagcctgggattcctggagagcggctctggctccggcggtggcaccctgaagtacgtggaggatgtgacaaacgtggtcagacgggatgtggagaagtggggccccttcgatctggtgtacggcagcacccaacccctgggcagctcttgtgaccggtgccctggctggtacatgtttcagttccaccggatcctgcagtacgccctgccgagacaggagtcccagcggccattcttttggattttcatggacaacttgctgctgaccgaggatgaccaggaaactaccactcggttcctgcagaccgaagccgtgaccctgcaggacgtgagaggccgggactaccagaacgccatgcgggtgtggtccaacatccctggactgaaaagcaagcacgcacctctgacccctaaagaagaggagtacctgcaggcccaggtgcggagcagaagcaagctggacgcccctaaggtggatctgctggtgaagaattgcctcctgcccctgagagagtacttcaagtatttcagccagaatagtctgcccctgggaggcagcggcggcggcgccctggtgacatttgaggacgtcgccgtgcggttcacccaggaggaatgggctctgctggatccttctcagaaaatcctgtaccgggacgtgatgagagagacataccggaatctgacctccgtgggcatcaactgggaatgttgggaccttgaagcctgcttcagaagcctgggaagaaacctgagagtgcaggtggtgaagagaaagtgcgagctgaccaacagcggcccctgcgccgagggcggcccaagcagcggcgcccctcctcccagcggcggcagcccagccggctccccaacctctaccgaggagggcacctctgagtccgccacccccgagagcggccctggcacctccaccgagcccagcgagggcagcgcacccggcagccctgccggcagccccacctccacagaggagggaaccagcaccgagcccagcgaaggcagcgccccaggcaccagcaccgagcctagtgagcaggagattaaacggatcaacaagatcagaagaagacttgtgaaagacagcaacaccaagaaggccggcaagacaggccccatgaaaaccctgctggttagagtgatgacacccgatctgagagagcggctggaaaacctgagaaagaagcctgaaaatatcccccagcccatcagcaatacatctagagccaacctgaataagctgctgaccgattacaccgaaatgaagaaggcgatcctgcatgtgtactgggaagagttccagaaggaccctgtgggcctgatgagccgggtggcccagcctgccagcaagaagatcgatcagaacaagctgaaacctgagatggacgagaagggcaacctgaccaccgccggctttgcctgctctcagtgtggccagcccctgttcgtgtacaagctggagcaggtgtctgagaagggcaaggcttacaccaactacttcggacggtgcaatgtggccgagcacgaaaagctgatcctgctggcccagctgaagcccgagaaggatagcgacgaagccgtgacatatagcctgggaaagtttgggcagagggccctggatttctacagcattcatgtgaccaaggagtccacccaccccgtgaagcccctggcccagatcgccggaaacagatacgcctccggacctgtgggaaaggccctgagcgacgcatgtatgggcacaatcgcctccttcctgtctaagtaccaggacatcatcatcgaacaccagaaggtggtgaagggcaaccagaagagactggagagcctgcgggagctggccggcaaggaaaacctggaataccctagcgtgaccctgccacctcagcctcacaccaaggagggcgttgatgcctacaacgaagtgatcgcccgggtgcgaatgtgggtgaacctgaacctgtggcagaagctgaagctaagcagagatgatgccaagcctctgctgagactgaagggattcccttcctttcctctggtcgagagacaggccaacgaagtggactggtgggacatggtgtgtaacgtgaagaagctgatcaacgagaaaaaggaggatggcaaggtgttttggcagaatctggctggctacaagagacaggaagccctgagaccatacctgagcagcgaggaagatcggaagaagggaaagaaattcgctcggtaccagctgggcgacctgctgctgcacctggaaaagaagcacggcgaggactggggaaaggtgtacgacgaggcctgggagcggattgacaagaaagtggaaggcctgagcaagcacatcaagctggaagaggaacggagaagcgaggacgcccagagcaaggccgccctgaccgactggctgcgggctaaggccagcttcgtgatcgagggcctgaaggaggccgacaaggacgagttctgcagatgcgagctgaagctgcagaagtggtacggggacctgcggggaaagcccttcgccatcgaagccgagaacagcatcctggacatcagcggcttcagcaagcagtacaactgtgccttcatctggcagaaggacggcgtgaagaagctgaacctgtacctgatcatcaactacttcaagggcggcaagctgcggttcaagaagatcaaacctgaagccttcgaagccaacagattctacaccgtgatcaacaaaaagagcggcgagatcgtgcccatggaggtgaacttcaacttcgacgaccccaacctgatcatcctgcctctggcctttggcaagagacagggcagagaattcatctggaacgacctgctgtccctggaaaccggcagcctgaagctggccaacggaagagtgatcgagaagacactgtacaacagaagaacccggcaggatgagcctgccctgttcgtggccctgaccttcgagcggcgggaggtcctggactcctccaatatcaaaccaatgaacctgatcggcgtggcaagaggcgaaaacatccccgccgtgatcgccctgaccgaccccgagggctgcccactgagccggtttaaggatagcctgggaaacccaacccacatcctgagaatcggcgagagctataaggagaagcagcggaccatccaggccaagaaggaggtggagcagcggagagccggcggctacagccggaagtacgccagcaaagccaagaatctggcagacgatatggtgagaaacaccgctagagatctgctgtactacgccgtgacccaggatgccatgctgatcttcgccaacctgagccggggcttcggccggcagggcaagcggaccttcatggccgagagacagtacacacggatggaggactggctgaccgccaagctggcctacgagggcctgagcaagacctacctgtccaagacactggcccagtacacctccaagacatgcagcaactgtgggtttaccatcaccagcgccgactacgacagggtgctggagaagctgaagaagacagcaacaggctggatgaccacaattaacggcaaggagctgaaggtggagggccagattacctactacaacagatacaagagacagaacgtagtcaaggacctgtccgtcgagctggatagactgagcgaagaatctgtgaacaacgacatctcctcctggacaaagggcagaagcggagaagctctgagcctcctgaagaaaagattctcccatagacccgtgcaggagaagttcgtgtgcctgaactgcggcttcgagacacacgcagccgagcaagccgccctgaacatcgccagatcctggctgttcctgcggagccaggagtacaagaaataccagacaaacaagacaaccggcaacaccgataagagagccttcgtcgagacctggcagtccttttaccggaagaagcttaaggaggtgtggaaacctgccgtgcggtctggcggatctggcggaggctccagcctgggcagcgagctgttcagggacgtggccatcgtgttcagccaggaggagtggcagtggctggcccccgcccagagggacctgtacagggacgtgatgctggagacctacagcaacctggtgagcctgggcctggccatcagcaagcccgacgtgatcagcttcctggagcagggcaaggagccctggatggtggagagggtggccaccggcgacctgtgccccgtgctggagagcggcggcggcccaagcagcggcgcccctcctcccagcggcggcagcccagccggctccccaacctctaccgaggagggcacctctgagtccgccacccccgagagcggccctggcacctccaccgagcccagcgagggcagcgcacccggcagccctgccggcagccccacctccacagaggagggaaccagcaccgagcccagcgaaggcagcgccccaggcaccagcaccgagcctagtgagcaggagattaaacggatcaacaagatcagaagaagacttgtgaaagacagcaacaccaagaaggccggcaagacaggccccatgaaaaccctgctggttagagtgatgacacccgatctgagagagcggctggaaaacctgagaaagaagcctgaaaatatcccccagcccatcagcaatacatctagagccaacctgaataagctgctgaccgattacaccgaaatgaagaaggcgatcctgcatgtgtactgggaagagttccagaaggaccctgtgggcctgatgagccgggtggcccagcctgccagcaagaagatcgatcagaacaagctgaaacctgagatggacgagaagggcaacctgaccaccgccggctttgcctgctctcagtgtggccagcccctgttcgtgtacaagctggagcaggtgtctgagaagggcaaggcttacaccaactacttcggacggtgcaatgtggccgagcacgaaaagctgatcctgctggcccagctgaagcccgagaaggatagcgacgaagccgtgacatatagcctgggaaagtttgggcagagggccctggatttctacagcattcatgtgaccaaggagtccacccaccccgtgaagcccctggcccagatcgccggaaacagatacgcctccggacctgtgggaaaggccctgagcgacgcatgtatgggcacaatcgcctccttcctgtctaagtaccaggacatcatcatcgaacaccagaaggtggtgaagggcaaccagaagagactggagagcctgcgggagctggccggcaaggaaaacctggaataccctagcgtgaccctgccacctcagcctcacaccaaggagggcgttgatgcctacaacgaagtgatcgcccgggtgcgaatgtgggtgaacctgaacctgtggcagaagctgaagctaagcagagatgatgccaagcctctgctgagactgaagggattcccttcctttcctctggtcgagagacaggccaacgaagtggactggtgggacatggtgtgtaacgtgaagaagctgatcaacgagaaaaaggaggatggcaaggtgttttggcagaatctggctggctacaagagacaggaagccctgagaccatacctgagcagcgaggaagatcggaagaagggaaagaaattcgctcggtaccagctgggcgacctgctgctgcacctggaaaagaagcacggcgaggactggggaaaggtgtacgacgaggcctgggagcggattgacaagaaagtggaaggcctgagcaagcacatcaagctggaagaggaacggagaagcgaggacgcccagagcaaggccgccctgaccgactggctgcgggctaaggccagcttcgtgatcgagggcctgaaggaggccgacaaggacgagttctgcagatgcgagctgaagctgcagaagtggtacggggacctgcggggaaagcccttcgccatcgaagccgagaacagcatcctggacatcagcggcttcagcaagcagtacaactgtgccttcatctggcagaaggacggcgtgaagaagctgaacctgtacctgatcatcaactacttcaagggcggcaagctgcggttcaagaagatcaaacctgaagccttcgaagccaacagattctacaccgtgatcaacaaaaagagcggcgagatcgtgcccatggaggtgaacttcaacttcgacgaccccaacctgatcatcctgcctctggcctttggcaagagacagggcagagaattcatctggaacgacctgctgtccctggaaaccggcagcctgaagctggccaacggaagagtgatcgagaagacactgtacaacagaagaacccggcaggatgagcctgccctgttcgtggccctgaccttcgagcggcgggaggtcctggactcctccaatatcaaaccaatgaacctgatcggcgtggcaagaggcgaaaacatccccgccgtgatcgccctgaccgaccccgagggctgcccactgagccggtttaaggatagcctgggaaacccaacccacatcctgagaatcggcgagagctataaggagaagcagcggaccatccaggccaagaaggaggtggagcagcggagagccggcggctacagccggaagtacgccagcaaagccaagaatctggcagacgatatggtgagaaacaccgctagagatctgctgtactacgccgtgacccaggatgccatgctgatcttcgccaacctgagccggggcttcggccggcagggcaagcggaccttcatggccgagagacagtacacacggatggaggactggctgaccgccaagctggcctacgagggcctgagcaagacctacctgtccaagacactggcccagtacacctccaagacatgcagcaactgtgggtttaccatcaccagcgccgactacgacagggtgctggagaagctgaagaagacagcaacaggctggatgaccacaattaacggcaaggagctgaaggtggagggccagattacctactacaacagatacaagagacagaacgtagtcaaggacctgtccgtcgagctggatagactgagcgaagaatctgtgaacaacgacatctcctcctggacaaagggcagaagcggagaagctctgagcctcctgaagaaaagattctcccatagacccgtgcaggagaagttcgtgtgcctgaactgcggcttcgagacacacgcagccgagcaagccgccctgaacatcgccagatcctggctgttcctgcggagccaggagtacaagaaataccagacaaacaagacaaccggcaacaccgataagagagccttcgtcgagacctggcagtccttttaccggaagaagcttaaggaggtgtggaaacctgccgtgcggtctggcggatctggcggaggctcctagcctgggcagcgagctgttcagggacgtggccatcgtgttcagccaggaggagtggcagtggctggcccccgcccagagggacctgtacagggacgtgatgctggagacctacagcaacctggtgagcctgggcctggccatcagcaagcccgacgtgatcagcttcctggagcagggcaaggagccctggatggtggagagggtggccaccggcgacctgtgccccgtgctggagagcggcggatctggctccggcagcggccccaagaaaaagagaaaagtctaagctgccttctgcggggcttgccttctggccatgcccttcttctctcccttgcacctgtacctcttggtctttgaataaagcctgagtaggaaggctagcaaaaaaaaaaaaaaaaaaaaaaaaaaaaaaaaaaaaaaaaaaaaaaaaaaaaaaaaaaaaaaaaaaaaaaaaaaaaaaaa

SEQ ID NO: 15392 - RNA, 9485 nt, synthetic construct
  source 1..9485: mol_type = other RNA
aggaaataagagagaaaagaagagtaagaagaaatataagagccaccatggcccctaagaagaagcgtaaagtgagccggatggaacgcctcgtctacgaggtgcggcagaagtgcagaaacatcgaggacatctgcatctcctgcggatctctgaacgtgaccctggagcacccactgttcatcggcggcatgtgccagaactgtaaaaactgttttctggagtgtgcctatcaatacgacgatgacggctaccagagctactgcaccatctgttgcggcggaagagaggtgctgatgtgtggaaataacaactgctgccggtgcttctgcgtggaatgcgtggacctgctggtgggccccggcgccgcccaggccgctattaaggaagatccttggaactgctacatgtgcggccacaagggcacatacggcctgctgagacggagagaggactggcctagcagactgcagatgttcttcgccaataaccacgaccaggagttcgacccccctaaggtgtaccctcccgtccccgccgagaagagaaagcccatccgggtcctgagcctgttcgatggcatcgccaccggtctgctggtgctgaaggacctgggcatccaggtggataggtacattgcctccgaggtgtgcgaggactccatcaccgtgggaatggtgcgtcatcagggcaagatcatgtacgtgggcgacgtgcggagcgtgacacagaagcatatccaggagtggggccctttcgacctggtgatcggcggcagcccttgcaatgacctgagcatcgtgaacccagcccggaagggcctgtacgagggaaccggcagactgttcttcgagttttacagactgctgcacgacgcccggcctaaggaaggcgacgaccggcccttcttttggctgttcgagaatgtggtggccatgggagtcagcgacaagcgggatattagccggttcctggagagcaaccccgtgatgatcgatgccaaggaagtgagcgccgcccaccgggccagatacttctggggcaatctgcctggcatgaacagacccctggccagcaccgtgaacgacaagctggagctgcaggagtgcctggagcacggccggatcgccaagttcagcaaggtgagaaccatcaccacccgaagcaacagcatcaaacaaggcaaggaccagcactttcctgtgttcatgaacgagaaggaggacatcctgtggtgtaccgagatggagagagtgttcgggttcccagtccactacacagatgtcagcaacatgtctagactggccagacagagactgctgggaagaagctggtccgtccctgtgatcagacacctgttcgcccctctgaaggagtacttcgcctgcgtgagcagcggcaacagcaacgccaacagccggggccccagcttctctagcggcctggtgccactgtccctgagagggagccacatgggccccatggagatctacaaaaccgtgagcgcctggaagcggcagcctgtgcgcgtgctgagcctgtttcggaatatcgataaagtcctgaaaagcctgggattcctggagagcggctctggctccggcggtggcaccctgaagtacgtggaggatgtgacaaacgtggtcagacgggatgtggagaagtggggccccttcgatctggtgtacggcagcacccaacccctgggcagctcttgtgaccggtgccctggctggtacatgtttcagttccaccggatcctgcagtacgccctgccgagacaggagtcccagcggccattcttttggattttcatggacaacttgctgctgaccgaggatgaccaggaaactaccactcggttcctgcagaccgaagccgtgaccctgcaggacgtgagaggccgggactaccagaacgccatgcgggtgtggtccaacatccctggactgaaaagcaagcacgcacctctgacccctaaagaagaggagtacctgcaggcccaggtgcggagcagaagcaagctggacgcccctaaggtggatctgctggtgaagaattgcctcctgcccctgagagagtacttcaagtatttcagccagaatagtctgcccctgggaggcagcggcggcggcgccctggtgacatttgaggacgtcgccgtgcggttcacccaggaggaatgggctctgctggatccttctcagaaaatcctgtaccgggacgtgatgagagagacataccggaatctgacctccgtgggcatcaactgggaatgttgggaccttgaagcctgcttcagaagcctgggaagaaacctgagagtgcaggtggtgaagagaaagtgcgagctgaccaacagcggcccctgcgccgagggcggcccaagcagcggcgcccctcctcccagcggcggcagcccagccggctccccaacctctaccgaggagggcacctctgagtccgccacccccgagagcggccctggcacctccaccgagcccagcgagggcagcgcacccggcagccctgccggcagccccacctccacagaggagggaaccagcaccgagcccagcgaaggcagcgccccaggcaccagcaccgagcctagtgagcaggagattaaacggatcaacaagatcagaagaagacttgtgaaagacagcaacaccaagaaggccggcaagacaggccccatgaaaaccctgctggttagagtgatgacacccgatctgagagagcggctggaaaacctgagaaagaagcctgaaaatatcccccagcccatcagcaatacatctagagccaacctgaataagctgctgaccgattacaccgaaatgaagaaggcgatcctgcatgtgtactgggaagagttccagaaggaccctgtgggcctgatgagccgggtggcccagcctgccagcaagaagatcgatcagaacaagctgaaacctgagatggacgagaagggcaacctgaccaccgccggctttgcctgctctcagtgtggccagcccctgttcgtgtacaagctggagcaggtgtctgagaagggcaaggcttacaccaactacttcggacggtgcaatgtggccgagcacgaaaagctgatcctgctggcccagctgaagcccgagaaggatagcgacgaagccgtgacatatagcctgggaaagtttgggcagagggccctggatttctacagcattcatgtgaccaaggagtccacccaccccgtgaagcccctggcccagatcgccggaaacagatacgcctccggacctgtgggaaaggccctgagcgacgcatgtatgggcacaatcgcctccttcctgtctaagtaccaggacatcatcatcgaacaccagaaggtggtgaagggcaaccagaagagactggagagcctgcgggagctggccggcaaggaaaacctggaataccctagcgtgaccctgccacctcagcctcacaccaaggagggcgttgatgcctacaacgaagtgatcgcccgggtgcgaatgtgggtgaacctgaacctgtggcagaagctgaagctaagcagagatgatgccaagcctctgctgagactgaagggattcccttcctttcctctggtcgagagacaggccaacgaagtggactggtgggacatggtgtgtaacgtgaagaagctgatcaacgagaaaaaggaggatggcaaggtgttttggcagaatctggctggctacaagagacaggaagccctgagaccatacctgagcagcgaggaagatcggaagaagggaaagaaattcgctcggtaccagctgggcgacctgctgctgcacctggaaaagaagcacggcgaggactggggaaaggtgtacgacgaggcctgggagcggattgacaagaaagtggaaggcctgagcaagcacatcaagctggaagaggaacggagaagcgaggacgcccagagcaaggccgccctgaccgactggctgcgggctaaggccagcttcgtgatcgagggcctgaaggaggccgacaaggacgagttctgcagatgcgagctgaagctgcagaagtggtacggggacctgcggggaaagcccttcgccatcgaagccgagaacagcatcctggacatcagcggcttcagcaagcagtacaactgtgccttcatctggcagaaggacggcgtgaagaagctgaacctgtacctgatcatcaactacttcaagggcggcaagctgcggttcaagaagatcaaacctgaagccttcgaagccaacagattctacaccgtgatcaacaaaaagagcggcgagatcgtgcccatggaggtgaacttcaacttcgacgaccccaacctgatcatcctgcctctggcctttggcaagagacagggcagagaattcatctggaacgacctgctgtccctggaaaccggcagcctgaagctggccaacggaagagtgatcgagaagacactgtacaacagaagaacccggcaggatgagcctgccctgttcgtggccctgaccttcgagcggcgggaggtcctggactcctccaatatcaaaccaatgaacctgatcggcgtggcaagaggcgaaaacatccccgccgtgatcgccctgaccgaccccgagggctgcccactgagccggtttaaggatagcctgggaaacccaacccacatcctgagaatcggcgagagctataaggagaagcagcggaccatccaggccaagaaggaggtggagcagcggagagccggcggctacagccggaagtacgccagcaaagccaagaatctggcagacgatatggtgagaaacaccgctagagatctgctgtactacgccgtgacccaggatgccatgctgatcttcgccaacctgagccggggcttcggccggcagggcaagcggaccttcatggccgagagacagtacacacggatggaggactggctgaccgccaagctggcctacgagggcctgagcaagacctacctgtccaagacactggcccagtacacctccaagacatgcagcaactgtgggtttaccatcaccagcgccgactacgacagggtgctggagaagctgaagaagacagcaacaggctggatgaccacaattaacggcaaggagctgaaggtggagggccagattacctactacaacagatacaagagacagaacgtagtcaaggacctgtccgtcgagctggatagactgagcgaagaatctgtgaacaacgacatctcctcctggacaaagggcagaagcggagaagctctgagcctcctgaagaaaagattctcccatagacccgtgcaggagaagttcgtgtgcctgaactgcggcttcgagacacacgcagccgagcaagccgccctgaacatcgccagatcctggctgttcctgcggagccaggagtacaagaaataccagacaaacaagacaaccggcaacaccgataagagagccttcgtcgagacctggcagtccttttaccggaagaagcttaaggaggtgtggaaacctgccgtgcggtctggcggatctggcggaggctccccccaggagagcgtggccttcgacgacgtggccgtgtacttcaccaagaaggagtgggccatcatggtgcccgaccagagggccctgtacagggacgtgatgctggagaactacgaggccgtggccttcgtggccgtgccccccaccagcaagcccgccctgatcagccacctggagcagggcaaggagccctgcttcacccagccccagggcgtgctgagcaggagggactggagggccggcggcggcccaagcagcggcgcccctcctcccagcggcggcagcccagccggctccccaacctctaccgaggagggcacctctgagtccgccacccccgagagcggccctggcacctccaccgagcccagcgagggcagcgcacccggcagccctgccggcagccccacctccacagaggagggaaccagcaccgagcccagcgaaggcagcgccccaggcaccagcaccgagcctagtgagcaggagattaaacggatcaacaagatcagaagaagacttgtgaaagacagcaacaccaagaaggccggcaagacaggccccatgaaaaccctgctggttagagtgatgacacccgatctgagagagcggctggaaaacctgagaaagaagcctgaaaatatcccccagcccatcagcaatacatctagagccaacctgaataagctgctgaccgattacaccgaaatgaagaaggcgatcctgcatgtgtactgggaagagttccagaaggaccctgtgggcctgatgagccgggtggcccagcctgccagcaagaagatcgatcagaacaagctgaaacctgagatggacgagaagggcaacctgaccaccgccggctttgcctgctctcagtgtggccagcccctgttcgtgtacaagctggagcaggtgtctgagaagggcaaggcttacaccaactacttcggacggtgcaatgtggccgagcacgaaaagctgatcctgctggcccagctgaagcccgagaaggatagcgacgaagccgtgacatatagcctgggaaagtttgggcagagggccctggatttctacagcattcatgtgaccaaggagtccacccaccccgtgaagcccctggcccagatcgccggaaacagatacgcctccggacctgtgggaaaggccctgagcgacgcatgtatgggcacaatcgcctccttcctgtctaagtaccaggacatcatcatcgaacaccagaaggtggtgaagggcaaccagaagagactggagagcctgcgggagctggccggcaaggaaaacctggaataccctagcgtgaccctgccacctcagcctcacaccaaggagggcgttgatgcctacaacgaagtgatcgcccgggtgcgaatgtgggtgaacctgaacctgtggcagaagctgaagctaagcagagatgatgccaagcctctgctgagactgaagggattcccttcctttcctctggtcgagagacaggccaacgaagtggactggtgggacatggtgtgtaacgtgaagaagctgatcaacgagaaaaaggaggatggcaaggtgttttggcagaatctggctggctacaagagacaggaagccctgagaccatacctgagcagcgaggaagatcggaagaagggaaagaaattcgctcggtaccagctgggcgacctgctgctgcacctggaaaagaagcacggcgaggactggggaaaggtgtacgacgaggcctgggagcggattgacaagaaagtggaaggcctgagcaagcacatcaagctggaagaggaacggagaagcgaggacgcccagagcaaggccgccctgaccgactggctgcgggctaaggccagcttcgtgatcgagggcctgaaggaggccgacaaggacgagttctgcagatgcgagctgaagctgcagaagtggtacggggacctgcggggaaagcccttcgccatcgaagccgagaacagcatcctggacatcagcggcttcagcaagcagtacaactgtgccttcatctggcagaaggacggcgtgaagaagctgaacctgtacctgatcatcaactacttcaagggcggcaagctgcggttcaagaagatcaaacctgaagccttcgaagccaacagattctacaccgtgatcaacaaaaagagcggcgagatcgtgcccatggaggtgaacttcaacttcgacgaccccaacctgatcatcctgcctctggcctttggcaagagacagggcagagaattcatctggaacgacctgctgtccctggaaaccggcagcctgaagctggccaacggaagagtgatcgagaagacactgtacaacagaagaacccggcaggatgagcctgccctgttcgtggccctgaccttcgagcggcgggaggtcctggactcctccaatatcaaaccaatgaacctgatcggcgtggcaagaggcgaaaacatccccgccgtgatcgccctgaccgaccccgagggctgcccactgagccggtttaaggatagcctgggaaacccaacccacatcctgagaatcggcgagagctataaggagaagcagcggaccatccaggccaagaaggaggtggagcagcggagagccggcggctacagccggaagtacgccagcaaagccaagaatctggcagacgatatggtgagaaacaccgctagagatctgctgtactacgccgtgacccaggatgccatgctgatcttcgccaacctgagccggggcttcggccggcagggcaagcggaccttcatggccgagagacagtacacacggatggaggactggctgaccgccaagctggcctacgagggcctgagcaagacctacctgtccaagacactggcccagtacacctccaagacatgcagcaactgtgggtttaccatcaccagcgccgactacgacagggtgctggagaagctgaagaagacagcaacaggctggatgaccacaattaacggcaaggagctgaaggtggagggccagattacctactacaacagatacaagagacagaacgtagtcaaggacctgtccgtcgagctggatagactgagcgaagaatctgtgaacaacgacatctcctcctggacaaagggcagaagcggagaagctctgagcctcctgaagaaaagattctcccatagacccgtgcaggagaagttcgtgtgcctgaactgcggcttcgagacacacgcagccgagcaagccgccctgaacatcgccagatcctggctgttcctgcggagccaggagtacaagaaataccagacaaacaagacaaccggcaacaccgataagagagccttcgtcgagacctggcagtccttttaccggaagaagcttaaggaggtgtggaaacctgccgtgcggtctggcggatctggcggaggctcctccccaggagagcgtggccttcgacgacgtggccgtgtacttcaccaagaaggagtgggccatcatggtgcccgaccagagggccctgtacagggacgtgatgctggagaactacgaggccgtggccttcgtggccgtgccccccaccagcaagcccgccctgatcagccacctggagcagggcaaggagccctgcttcacccagccccagggcgtgctgagcaggagggactggagggccggcggatctggctccggcagcggccccaagaaaaagagaaaagtctaagctgccttctgcggggcttgccttctggccatgcccttcttctctcccttgcacctgtacctcttggtctttgaataaagcctgagtaggaaggctagcaaaaaaaaaaaaaaaaaaaaaaaaaaaaaaaaaaaaaaaaaaaaaaaaaaaaaaaaaaaaaaaaaaaaaaaaaaaaaaaa

SEQ ID NO: 15393 - RNA, 9485 nt, synthetic construct
  source 1..9485: mol_type = other RNA
aggaaataagagagaaaagaagagtaagaagaaatataagagccaccatggcccctaagaagaagcgtaaagtgagccggatggaacgcctcgtctacgaggtgcggcagaagtgcagaaacatcgaggacatctgcatctcctgcggatctctgaacgtgaccctggagcacccactgttcatcggcggcatgtgccagaactgtaaaaactgttttctggagtgtgcctatcaatacgacgatgacggctaccagagctactgcaccatctgttgcggcggaagagaggtgctgatgtgtggaaataacaactgctgccggtgcttctgcgtggaatgcgtggacctgctggtgggccccggcgccgcccaggccgctattaaggaagatccttggaactgctacatgtgcggccacaagggcacatacggcctgctgagacggagagaggactggcctagcagactgcagatgttcttcgccaataaccacgaccaggagttcgacccccctaaggtgtaccctcccgtccccgccgagaagagaaagcccatccgggtcctgagcctgttcgatggcatcgccaccggtctgctggtgctgaaggacctgggcatccaggtggataggtacattgcctccgaggtgtgcgaggactccatcaccgtgggaatggtgcgtcatcagggcaagatcatgtacgtgggcgacgtgcggagcgtgacacagaagcatatccaggagtggggccctttcgacctggtgatcggcggcagcccttgcaatgacctgagcatcgtgaacccagcccggaagggcctgtacgagggaaccggcagactgttcttcgagttttacagactgctgcacgacgcccggcctaaggaaggcgacgaccggcccttcttttggctgttcgagaatgtggtggccatgggagtcagcgacaagcgggatattagccggttcctggagagcaaccccgtgatgatcgatgccaaggaagtgagcgccgcccaccgggccagatacttctggggcaatctgcctggcatgaacagacccctggccagcaccgtgaacgacaagctggagctgcaggagtgcctggagcacggccggatcgccaagttcagcaaggtgagaaccatcaccacccgaagcaacagcatcaaacaaggcaaggaccagcactttcctgtgttcatgaacgagaaggaggacatcctgtggtgtaccgagatggagagagtgttcgggttcccagtccactacacagatgtcagcaacatgtctagactggccagacagagactgctgggaagaagctggtccgtccctgtgatcagacacctgttcgcccctctgaaggagtacttcgcctgcgtgagcagcggcaacagcaacgccaacagccggggccccagcttctctagcggcctggtgccactgtccctgagagggagccacatgggccccatggagatctacaaaaccgtgagcgcctggaagcggcagcctgtgcgcgtgctgagcctgtttcggaatatcgataaagtcctgaaaagcctgggattcctggagagcggctctggctccggcggtggcaccctgaagtacgtggaggatgtgacaaacgtggtcagacgggatgtggagaagtggggccccttcgatctggtgtacggcagcacccaacccctgggcagctcttgtgaccggtgccctggctggtacatgtttcagttccaccggatcctgcagtacgccctgccgagacaggagtcccagcggccattcttttggattttcatggacaacttgctgctgaccgaggatgaccaggaaactaccactcggttcctgcagaccgaagccgtgaccctgcaggacgtgagaggccgggactaccagaacgccatgcgggtgtggtccaacatccctggactgaaaagcaagcacgcacctctgacccctaaagaagaggagtacctgcaggcccaggtgcggagcagaagcaagctggacgcccctaaggtggatctgctggtgaagaattgcctcctgcccctgagagagtacttcaagtatttcagccagaatagtctgcccctgggaggcagcggcggcggcgccctggtgacatttgaggacgtcgccgtgcggttcacccaggaggaatgggctctgctggatccttctcagaaaatcctgtaccgggacgtgatgagagagacataccggaatctgacctccgtgggcatcaactgggaatgttgggaccttgaagcctgcttcagaagcctgggaagaaacctgagagtgcaggtggtgaagagaaagtgcgagctgaccaacagcggcccctgcgccgagggcggcccaagcagcggcgcccctcctcccagcggcggcagcccagccggctccccaacctctaccgaggagggcacctctgagtccgccacccccgagagcggccctggcacctccaccgagcccagcgagggcagcgcacccggcagccctgccggcagccccacctccacagaggagggaaccagcaccgagcccagcgaaggcagcgccccaggcaccagcaccgagcctagtgagcaggagattaaacggatcaacaagatcagaagaagacttgtgaaagacagcaacaccaagaaggccggcaagacaggccccatgaaaaccctgctggttagagtgatgacacccgatctgagagagcggctggaaaacctgagaaagaagcctgaaaatatcccccagcccatcagcaatacatctagagccaacctgaataagctgctgaccgattacaccgaaatgaagaaggcgatcctgcatgtgtactgggaagagttccagaaggaccctgtgggcctgatgagccgggtggcccagcctgccagcaagaagatcgatcagaacaagctgaaacctgagatggacgagaagggcaacctgaccaccgccggctttgcctgctctcagtgtggccagcccctgttcgtgtacaagctggagcaggtgtctgagaagggcaaggcttacaccaactacttcggacggtgcaatgtggccgagcacgaaaagctgatcctgctggcccagctgaagcccgagaaggatagcgacgaagccgtgacatatagcctgggaaagtttgggcagagggccctggatttctacagcattcatgtgaccaaggagtccacccaccccgtgaagcccctggcccagatcgccggaaacagatacgcctccggacctgtgggaaaggccctgagcgacgcatgtatgggcacaatcgcctccttcctgtctaagtaccaggacatcatcatcgaacaccagaaggtggtgaagggcaaccagaagagactggagagcctgcgggagctggccggcaaggaaaacctggaataccctagcgtgaccctgccacctcagcctcacaccaaggagggcgttgatgcctacaacgaagtgatcgcccgggtgcgaatgtgggtgaacctgaacctgtggcagaagctgaagctaagcagagatgatgccaagcctctgctgagactgaagggattcccttcctttcctctggtcgagagacaggccaacgaagtggactggtgggacatggtgtgtaacgtgaagaagctgatcaacgagaaaaaggaggatggcaaggtgttttggcagaatctggctggctacaagagacaggaagccctgagaccatacctgagcagcgaggaagatcggaagaagggaaagaaattcgctcggtaccagctgggcgacctgctgctgcacctggaaaagaagcacggcgaggactggggaaaggtgtacgacgaggcctgggagcggattgacaagaaagtggaaggcctgagcaagcacatcaagctggaagaggaacggagaagcgaggacgcccagagcaaggccgccctgaccgactggctgcgggctaaggccagcttcgtgatcgagggcctgaaggaggccgacaaggacgagttctgcagatgcgagctgaagctgcagaagtggtacggggacctgcggggaaagcccttcgccatcgaagccgagaacagcatcctggacatcagcggcttcagcaagcagtacaactgtgccttcatctggcagaaggacggcgtgaagaagctgaacctgtacctgatcatcaactacttcaagggcggcaagctgcggttcaagaagatcaaacctgaagccttcgaagccaacagattctacaccgtgatcaacaaaaagagcggcgagatcgtgcccatggaggtgaacttcaacttcgacgaccccaacctgatcatcctgcctctggcctttggcaagagacagggcagagaattcatctggaacgacctgctgtccctggaaaccggcagcctgaagctggccaacggaagagtgatcgagaagacactgtacaacagaagaacccggcaggatgagcctgccctgttcgtggccctgaccttcgagcggcgggaggtcctggactcctccaatatcaaaccaatgaacctgatcggcgtggcaagaggcgaaaacatccccgccgtgatcgccctgaccgaccccgagggctgcccactgagccggtttaaggatagcctgggaaacccaacccacatcctgagaatcggcgagagctataaggagaagcagcggaccatccaggccaagaaggaggtggagcagcggagagccggcggctacagccggaagtacgccagcaaagccaagaatctggcagacgatatggtgagaaacaccgctagagatctgctgtactacgccgtgacccaggatgccatgctgatcttcgccaacctgagccggggcttcggccggcagggcaagcggaccttcatggccgagagacagtacacacggatggaggactggctgaccgccaagctggcctacgagggcctgagcaagacctacctgtccaagacactggcccagtacacctccaagacatgcagcaactgtgggtttaccatcaccagcgccgactacgacagggtgctggagaagctgaagaagacagcaacaggctggatgaccacaattaacggcaaggagctgaaggtggagggccagattacctactacaacagatacaagagacagaacgtagtcaaggacctgtccgtcgagctggatagactgagcgaagaatctgtgaacaacgacatctcctcctggacaaagggcagaagcggagaagctctgagcctcctgaagaaaagattctcccatagacccgtgcaggagaagttcgtgtgcctgaactgcggcttcgagacacacgcagccgagcaagccgccctgaacatcgccagatcctggctgttcctgcggagccaggagtacaagaaataccagacaaacaagacaaccggcaacaccgataagagagccttcgtcgagacctggcagtccttttaccggaagaagcttaaggaggtgtggaaacctgccgtgcggtctggcggatctggcggaggctccgagcccggccccgtgaccttcggcgacgtggccgtgtacttcagcagggaggagtggggctgcctgaggcccgcccagagggccctgtacagggacgtgatgagggagacctacagccacctgggcgccctgggcgtggagggcagcaagcccgccctgatcagctgggtggaggaggaggccgagctgtggggccccgccgcccaggaccccgaggtggccaagaggcccaccgaggccgacggcggcccaagcagcggcgcccctcctcccagcggcggcagcccagccggctccccaacctctaccgaggagggcacctctgagtccgccacccccgagagcggccctggcacctccaccgagcccagcgagggcagcgcacccggcagccctgccggcagccccacctccacagaggagggaaccagcaccgagcccagcgaaggcagcgccccaggcaccagcaccgagcctagtgagcaggagattaaacggatcaacaagatcagaagaagacttgtgaaagacagcaacaccaagaaggccggcaagacaggccccatgaaaaccctgctggttagagtgatgacacccgatctgagagagcggctggaaaacctgagaaagaagcctgaaaatatcccccagcccatcagcaatacatctagagccaacctgaataagctgctgaccgattacaccgaaatgaagaaggcgatcctgcatgtgtactgggaagagttccagaaggaccctgtgggcctgatgagccgggtggcccagcctgccagcaagaagatcgatcagaacaagctgaaacctgagatggacgagaagggcaacctgaccaccgccggctttgcctgctctcagtgtggccagcccctgttcgtgtacaagctggagcaggtgtctgagaagggcaaggcttacaccaactacttcggacggtgcaatgtggccgagcacgaaaagctgatcctgctggcccagctgaagcccgagaaggatagcgacgaagccgtgacatatagcctgggaaagtttgggcagagggccctggatttctacagcattcatgtgaccaaggagtccacccaccccgtgaagcccctggcccagatcgccggaaacagatacgcctccggacctgtgggaaaggccctgagcgacgcatgtatgggcacaatcgcctccttcctgtctaagtaccaggacatcatcatcgaacaccagaaggtggtgaagggcaaccagaagagactggagagcctgcgggagctggccggcaaggaaaacctggaataccctagcgtgaccctgccacctcagcctcacaccaaggagggcgttgatgcctacaacgaagtgatcgcccgggtgcgaatgtgggtgaacctgaacctgtggcagaagctgaagctaagcagagatgatgccaagcctctgctgagactgaagggattcccttcctttcctctggtcgagagacaggccaacgaagtggactggtgggacatggtgtgtaacgtgaagaagctgatcaacgagaaaaaggaggatggcaaggtgttttggcagaatctggctggctacaagagacaggaagccctgagaccatacctgagcagcgaggaagatcggaagaagggaaagaaattcgctcggtaccagctgggcgacctgctgctgcacctggaaaagaagcacggcgaggactggggaaaggtgtacgacgaggcctgggagcggattgacaagaaagtggaaggcctgagcaagcacatcaagctggaagaggaacggagaagcgaggacgcccagagcaaggccgccctgaccgactggctgcgggctaaggccagcttcgtgatcgagggcctgaaggaggccgacaaggacgagttctgcagatgcgagctgaagctgcagaagtggtacggggacctgcggggaaagcccttcgccatcgaagccgagaacagcatcctggacatcagcggcttcagcaagcagtacaactgtgccttcatctggcagaaggacggcgtgaagaagctgaacctgtacctgatcatcaactacttcaagggcggcaagctgcggttcaagaagatcaaacctgaagccttcgaagccaacagattctacaccgtgatcaacaaaaagagcggcgagatcgtgcccatggaggtgaacttcaacttcgacgaccccaacctgatcatcctgcctctggcctttggcaagagacagggcagagaattcatctggaacgacctgctgtccctggaaaccggcagcctgaagctggccaacggaagagtgatcgagaagacactgtacaacagaagaacccggcaggatgagcctgccctgttcgtggccctgaccttcgagcggcgggaggtcctggactcctccaatatcaaaccaatgaacctgatcggcgtggcaagaggcgaaaacatccccgccgtgatcgccctgaccgaccccgagggctgcccactgagccggtttaaggatagcctgggaaacccaacccacatcctgagaatcggcgagagctataaggagaagcagcggaccatccaggccaagaaggaggtggagcagcggagagccggcggctacagccggaagtacgccagcaaagccaagaatctggcagacgatatggtgagaaacaccgctagagatctgctgtactacgccgtgacccaggatgccatgctgatcttcgccaacctgagccggggcttcggccggcagggcaagcggaccttcatggccgagagacagtacacacggatggaggactggctgaccgccaagctggcctacgagggcctgagcaagacctacctgtccaagacactggcccagtacacctccaagacatgcagcaactgtgggtttaccatcaccagcgccgactacgacagggtgctggagaagctgaagaagacagcaacaggctggatgaccacaattaacggcaaggagctgaaggtggagggccagattacctactacaacagatacaagagacagaacgtagtcaaggacctgtccgtcgagctggatagactgagcgaagaatctgtgaacaacgacatctcctcctggacaaagggcagaagcggagaagctctgagcctcctgaagaaaagattctcccatagacccgtgcaggagaagttcgtgtgcctgaactgcggcttcgagacacacgcagccgagcaagccgccctgaacatcgccagatcctggctgttcctgcggagccaggagtacaagaaataccagacaaacaagacaaccggcaacaccgataagagagccttcgtcgagacctggcagtccttttaccggaagaagcttaaggaggtgtggaaacctgccgtgcggtctggcggatctggcggaggctcctgagcccggccccgtgaccttcggcgacgtggccgtgtacttcagcagggaggagtggggctgcctgaggcccgcccagagggccctgtacagggacgtgatgagggagacctacagccacctgggcgccctgggcgtggagggcagcaagcccgccctgatcagctgggtggaggaggaggccgagctgtggggccccgccgcccaggaccccgaggtggccaagaggcccaccgaggccgacggatctggctccggcagcggccccaagaaaaagagaaaagtctaagctgccttctgcggggcttgccttctggccatgcccttcttctctcccttgcacctgtacctcttggtctttgaataaagcctgagtaggaaggctagcaaaaaaaaaaaaaaaaaaaaaaaaaaaaaaaaaaaaaaaaaaaaaaaaaaaaaaaaaaaaaaaaaaaaaaaaaaaaaaaa

SEQ ID NO: 15394 - RNA, 9485 nt, synthetic construct
  source 1..9485: mol_type = other RNA
aggaaataagagagaaaagaagagtaagaagaaatataagagccaccatggcccctaagaagaagcgtaaagtgagccggatggaacgcctcgtctacgaggtgcggcagaagtgcagaaacatcgaggacatctgcatctcctgcggatctctgaacgtgaccctggagcacccactgttcatcggcggcatgtgccagaactgtaaaaactgttttctggagtgtgcctatcaatacgacgatgacggctaccagagctactgcaccatctgttgcggcggaagagaggtgctgatgtgtggaaataacaactgctgccggtgcttctgcgtggaatgcgtggacctgctggtgggccccggcgccgcccaggccgctattaaggaagatccttggaactgctacatgtgcggccacaagggcacatacggcctgctgagacggagagaggactggcctagcagactgcagatgttcttcgccaataaccacgaccaggagttcgacccccctaaggtgtaccctcccgtccccgccgagaagagaaagcccatccgggtcctgagcctgttcgatggcatcgccaccggtctgctggtgctgaaggacctgggcatccaggtggataggtacattgcctccgaggtgtgcgaggactccatcaccgtgggaatggtgcgtcatcagggcaagatcatgtacgtgggcgacgtgcggagcgtgacacagaagcatatccaggagtggggccctttcgacctggtgatcggcggcagcccttgcaatgacctgagcatcgtgaacccagcccggaagggcctgtacgagggaaccggcagactgttcttcgagttttacagactgctgcacgacgcccggcctaaggaaggcgacgaccggcccttcttttggctgttcgagaatgtggtggccatgggagtcagcgacaagcgggatattagccggttcctggagagcaaccccgtgatgatcgatgccaaggaagtgagcgccgcccaccgggccagatacttctggggcaatctgcctggcatgaacagacccctggccagcaccgtgaacgacaagctggagctgcaggagtgcctggagcacggccggatcgccaagttcagcaaggtgagaaccatcaccacccgaagcaacagcatcaaacaaggcaaggaccagcactttcctgtgttcatgaacgagaaggaggacatcctgtggtgtaccgagatggagagagtgttcgggttcccagtccactacacagatgtcagcaacatgtctagactggccagacagagactgctgggaagaagctggtccgtccctgtgatcagacacctgttcgcccctctgaaggagtacttcgcctgcgtgagcagcggcaacagcaacgccaacagccggggccccagcttctctagcggcctggtgccactgtccctgagagggagccacatgggccccatggagatctacaaaaccgtgagcgcctggaagcggcagcctgtgcgcgtgctgagcctgtttcggaatatcgataaagtcctgaaaagcctgggattcctggagagcggctctggctccggcggtggcaccctgaagtacgtggaggatgtgacaaacgtggtcagacgggatgtggagaagtggggccccttcgatctggtgtacggcagcacccaacccctgggcagctcttgtgaccggtgccctggctggtacatgtttcagttccaccggatcctgcagtacgccctgccgagacaggagtcccagcggccattcttttggattttcatggacaacttgctgctgaccgaggatgaccaggaaactaccactcggttcctgcagaccgaagccgtgaccctgcaggacgtgagaggccgggactaccagaacgccatgcgggtgtggtccaacatccctggactgaaaagcaagcacgcacctctgacccctaaagaagaggagtacctgcaggcccaggtgcggagcagaagcaagctggacgcccctaaggtggatctgctggtgaagaattgcctcctgcccctgagagagtacttcaagtatttcagccagaatagtctgcccctgggaggcagcggcggcggcgccctggtgacatttgaggacgtcgccgtgcggttcacccaggaggaatgggctctgctggatccttctcagaaaatcctgtaccgggacgtgatgagagagacataccggaatctgacctccgtgggcatcaactgggaatgttgggaccttgaagcctgcttcagaagcctgggaagaaacctgagagtgcaggtggtgaagagaaagtgcgagctgaccaacagcggcccctgcgccgagggcggcccaagcagcggcgcccctcctcccagcggcggcagcccagccggctccccaacctctaccgaggagggcacctctgagtccgccacccccgagagcggccctggcacctccaccgagcccagcgagggcagcgcacccggcagccctgccggcagccccacctccacagaggagggaaccagcaccgagcccagcgaaggcagcgccccaggcaccagcaccgagcctagtgagcaggagattaaacggatcaacaagatcagaagaagacttgtgaaagacagcaacaccaagaaggccggcaagacaggccccatgaaaaccctgctggttagagtgatgacacccgatctgagagagcggctggaaaacctgagaaagaagcctgaaaatatcccccagcccatcagcaatacatctagagccaacctgaataagctgctgaccgattacaccgaaatgaagaaggcgatcctgcatgtgtactgggaagagttccagaaggaccctgtgggcctgatgagccgggtggcccagcctgccagcaagaagatcgatcagaacaagctgaaacctgagatggacgagaagggcaacctgaccaccgccggctttgcctgctctcagtgtggccagcccctgttcgtgtacaagctggagcaggtgtctgagaagggcaaggcttacaccaactacttcggacggtgcaatgtggccgagcacgaaaagctgatcctgctggcccagctgaagcccgagaaggatagcgacgaagccgtgacatatagcctgggaaagtttgggcagagggccctggatttctacagcattcatgtgaccaaggagtccacccaccccgtgaagcccctggcccagatcgccggaaacagatacgcctccggacctgtgggaaaggccctgagcgacgcatgtatgggcacaatcgcctccttcctgtctaagtaccaggacatcatcatcgaacaccagaaggtggtgaagggcaaccagaagagactggagagcctgcgggagctggccggcaaggaaaacctggaataccctagcgtgaccctgccacctcagcctcacaccaaggagggcgttgatgcctacaacgaagtgatcgcccgggtgcgaatgtgggtgaacctgaacctgtggcagaagctgaagctaagcagagatgatgccaagcctctgctgagactgaagggattcccttcctttcctctggtcgagagacaggccaacgaagtggactggtgggacatggtgtgtaacgtgaagaagctgatcaacgagaaaaaggaggatggcaaggtgttttggcagaatctggctggctacaagagacaggaagccctgagaccatacctgagcagcgaggaagatcggaagaagggaaagaaattcgctcggtaccagctgggcgacctgctgctgcacctggaaaagaagcacggcgaggactggggaaaggtgtacgacgaggcctgggagcggattgacaagaaagtggaaggcctgagcaagcacatcaagctggaagaggaacggagaagcgaggacgcccagagcaaggccgccctgaccgactggctgcgggctaaggccagcttcgtgatcgagggcctgaaggaggccgacaaggacgagttctgcagatgcgagctgaagctgcagaagtggtacggggacctgcggggaaagcccttcgccatcgaagccgagaacagcatcctggacatcagcggcttcagcaagcagtacaactgtgccttcatctggcagaaggacggcgtgaagaagctgaacctgtacctgatcatcaactacttcaagggcggcaagctgcggttcaagaagatcaaacctgaagccttcgaagccaacagattctacaccgtgatcaacaaaaagagcggcgagatcgtgcccatggaggtgaacttcaacttcgacgaccccaacctgatcatcctgcctctggcctttggcaagagacagggcagagaattcatctggaacgacctgctgtccctggaaaccggcagcctgaagctggccaacggaagagtgatcgagaagacactgtacaacagaagaacccggcaggatgagcctgccctgttcgtggccctgaccttcgagcggcgggaggtcctggactcctccaatatcaaaccaatgaacctgatcggcgtggcaagaggcgaaaacatccccgccgtgatcgccctgaccgaccccgagggctgcccactgagccggtttaaggatagcctgggaaacccaacccacatcctgagaatcggcgagagctataaggagaagcagcggaccatccaggccaagaaggaggtggagcagcggagagccggcggctacagccggaagtacgccagcaaagccaagaatctggcagacgatatggtgagaaacaccgctagagatctgctgtactacgccgtgacccaggatgccatgctgatcttcgccaacctgagccggggcttcggccggcagggcaagcggaccttcatggccgagagacagtacacacggatggaggactggctgaccgccaagctggcctacgagggcctgagcaagacctacctgtccaagacactggcccagtacacctccaagacatgcagcaactgtgggtttaccatcaccagcgccgactacgacagggtgctggagaagctgaagaagacagcaacaggctggatgaccacaattaacggcaaggagctgaaggtggagggccagattacctactacaacagatacaagagacagaacgtagtcaaggacctgtccgtcgagctggatagactgagcgaagaatctgtgaacaacgacatctcctcctggacaaagggcagaagcggagaagctctgagcctcctgaagaaaagattctcccatagacccgtgcaggagaagttcgtgtgcctgaactgcggcttcgagacacacgcagccgagcaagccgccctgaacatcgccagatcctggctgttcctgcggagccaggagtacaagaaataccagacaaacaagacaaccggcaacaccgataagagagccttcgtcgagacctggcagtccttttaccggaagaagcttaaggaggtgtggaaacctgccgtgcggtctggcggatctggcggaggctccttccaggagagcgtgaccttccaggacgtggccgtggacttcacctgggaggagtggggccacctgggccccgcccagaaggagctgtacagggaggtgatgctggagaactacaggaacctggtgtgcctgggcctggaggtgagcaagcccgacgtggtgtgccagctggagaggggcgaggccccctggatgcccgagggcgccgtgcccaggagctgcagccagaactggggcgccaggggcggcccaagcagcggcgcccctcctcccagcggcggcagcccagccggctccccaacctctaccgaggagggcacctctgagtccgccacccccgagagcggccctggcacctccaccgagcccagcgagggcagcgcacccggcagccctgccggcagccccacctccacagaggagggaaccagcaccgagcccagcgaaggcagcgccccaggcaccagcaccgagcctagtgagcaggagattaaacggatcaacaagatcagaagaagacttgtgaaagacagcaacaccaagaaggccggcaagacaggccccatgaaaaccctgctggttagagtgatgacacccgatctgagagagcggctggaaaacctgagaaagaagcctgaaaatatcccccagcccatcagcaatacatctagagccaacctgaataagctgctgaccgattacaccgaaatgaagaaggcgatcctgcatgtgtactgggaagagttccagaaggaccctgtgggcctgatgagccgggtggcccagcctgccagcaagaagatcgatcagaacaagctgaaacctgagatggacgagaagggcaacctgaccaccgccggctttgcctgctctcagtgtggccagcccctgttcgtgtacaagctggagcaggtgtctgagaagggcaaggcttacaccaactacttcggacggtgcaatgtggccgagcacgaaaagctgatcctgctggcccagctgaagcccgagaaggatagcgacgaagccgtgacatatagcctgggaaagtttgggcagagggccctggatttctacagcattcatgtgaccaaggagtccacccaccccgtgaagcccctggcccagatcgccggaaacagatacgcctccggacctgtgggaaaggccctgagcgacgcatgtatgggcacaatcgcctccttcctgtctaagtaccaggacatcatcatcgaacaccagaaggtggtgaagggcaaccagaagagactggagagcctgcgggagctggccggcaaggaaaacctggaataccctagcgtgaccctgccacctcagcctcacaccaaggagggcgttgatgcctacaacgaagtgatcgcccgggtgcgaatgtgggtgaacctgaacctgtggcagaagctgaagctaagcagagatgatgccaagcctctgctgagactgaagggattcccttcctttcctctggtcgagagacaggccaacgaagtggactggtgggacatggtgtgtaacgtgaagaagctgatcaacgagaaaaaggaggatggcaaggtgttttggcagaatctggctggctacaagagacaggaagccctgagaccatacctgagcagcgaggaagatcggaagaagggaaagaaattcgctcggtaccagctgggcgacctgctgctgcacctggaaaagaagcacggcgaggactggggaaaggtgtacgacgaggcctgggagcggattgacaagaaagtggaaggcctgagcaagcacatcaagctggaagaggaacggagaagcgaggacgcccagagcaaggccgccctgaccgactggctgcgggctaaggccagcttcgtgatcgagggcctgaaggaggccgacaaggacgagttctgcagatgcgagctgaagctgcagaagtggtacggggacctgcggggaaagcccttcgccatcgaagccgagaacagcatcctggacatcagcggcttcagcaagcagtacaactgtgccttcatctggcagaaggacggcgtgaagaagctgaacctgtacctgatcatcaactacttcaagggcggcaagctgcggttcaagaagatcaaacctgaagccttcgaagccaacagattctacaccgtgatcaacaaaaagagcggcgagatcgtgcccatggaggtgaacttcaacttcgacgaccccaacctgatcatcctgcctctggcctttggcaagagacagggcagagaattcatctggaacgacctgctgtccctggaaaccggcagcctgaagctggccaacggaagagtgatcgagaagacactgtacaacagaagaacccggcaggatgagcctgccctgttcgtggccctgaccttcgagcggcgggaggtcctggactcctccaatatcaaaccaatgaacctgatcggcgtggcaagaggcgaaaacatccccgccgtgatcgccctgaccgaccccgagggctgcccactgagccggtttaaggatagcctgggaaacccaacccacatcctgagaatcggcgagagctataaggagaagcagcggaccatccaggccaagaaggaggtggagcagcggagagccggcggctacagccggaagtacgccagcaaagccaagaatctggcagacgatatggtgagaaacaccgctagagatctgctgtactacgccgtgacccaggatgccatgctgatcttcgccaacctgagccggggcttcggccggcagggcaagcggaccttcatggccgagagacagtacacacggatggaggactggctgaccgccaagctggcctacgagggcctgagcaagacctacctgtccaagacactggcccagtacacctccaagacatgcagcaactgtgggtttaccatcaccagcgccgactacgacagggtgctggagaagctgaagaagacagcaacaggctggatgaccacaattaacggcaaggagctgaaggtggagggccagattacctactacaacagatacaagagacagaacgtagtcaaggacctgtccgtcgagctggatagactgagcgaagaatctgtgaacaacgacatctcctcctggacaaagggcagaagcggagaagctctgagcctcctgaagaaaagattctcccatagacccgtgcaggagaagttcgtgtgcctgaactgcggcttcgagacacacgcagccgagcaagccgccctgaacatcgccagatcctggctgttcctgcggagccaggagtacaagaaataccagacaaacaagacaaccggcaacaccgataagagagccttcgtcgagacctggcagtccttttaccggaagaagcttaaggaggtgtggaaacctgccgtgcggtctggcggatctggcggaggctcctttccaggagagcgtgaccttccaggacgtggccgtggacttcacctgggaggagtggggccacctgggccccgcccagaaggagctgtacagggaggtgatgctggagaactacaggaacctggtgtgcctgggcctggaggtgagcaagcccgacgtggtgtgccagctggagaggggcgaggccccctggatgcccgagggcgccgtgcccaggagctgcagccagaactggggcgccaggggatctggctccggcagcggccccaagaaaaagagaaaagtctaagctgccttctgcggggcttgccttctggccatgcccttcttctctcccttgcacctgtacctcttggtctttgaataaagcctgagtaggaaggctagcaaaaaaaaaaaaaaaaaaaaaaaaaaaaaaaaaaaaaaaaaaaaaaaaaaaaaaaaaaaaaaaaaaaaaaaaaaaaaaaa

SEQ ID NO: 15395 - RNA, 9485 nt, synthetic construct
  source 1..9485: mol_type = other RNA
aggaaataagagagaaaagaagagtaagaagaaatataagagccaccatggcccctaagaagaagcgtaaagtgagccggatggaacgcctcgtctacgaggtgcggcagaagtgcagaaacatcgaggacatctgcatctcctgcggatctctgaacgtgaccctggagcacccactgttcatcggcggcatgtgccagaactgtaaaaactgttttctggagtgtgcctatcaatacgacgatgacggctaccagagctactgcaccatctgttgcggcggaagagaggtgctgatgtgtggaaataacaactgctgccggtgcttctgcgtggaatgcgtggacctgctggtgggccccggcgccgcccaggccgctattaaggaagatccttggaactgctacatgtgcggccacaagggcacatacggcctgctgagacggagagaggactggcctagcagactgcagatgttcttcgccaataaccacgaccaggagttcgacccccctaaggtgtaccctcccgtccccgccgagaagagaaagcccatccgggtcctgagcctgttcgatggcatcgccaccggtctgctggtgctgaaggacctgggcatccaggtggataggtacattgcctccgaggtgtgcgaggactccatcaccgtgggaatggtgcgtcatcagggcaagatcatgtacgtgggcgacgtgcggagcgtgacacagaagcatatccaggagtggggccctttcgacctggtgatcggcggcagcccttgcaatgacctgagcatcgtgaacccagcccggaagggcctgtacgagggaaccggcagactgttcttcgagttttacagactgctgcacgacgcccggcctaaggaaggcgacgaccggcccttcttttggctgttcgagaatgtggtggccatgggagtcagcgacaagcgggatattagccggttcctggagagcaaccccgtgatgatcgatgccaaggaagtgagcgccgcccaccgggccagatacttctggggcaatctgcctggcatgaacagacccctggccagcaccgtgaacgacaagctggagctgcaggagtgcctggagcacggccggatcgccaagttcagcaaggtgagaaccatcaccacccgaagcaacagcatcaaacaaggcaaggaccagcactttcctgtgttcatgaacgagaaggaggacatcctgtggtgtaccgagatggagagagtgttcgggttcccagtccactacacagatgtcagcaacatgtctagactggccagacagagactgctgggaagaagctggtccgtccctgtgatcagacacctgttcgcccctctgaaggagtacttcgcctgcgtgagcagcggcaacagcaacgccaacagccggggccccagcttctctagcggcctggtgccactgtccctgagagggagccacatgggccccatggagatctacaaaaccgtgagcgcctggaagcggcagcctgtgcgcgtgctgagcctgtttcggaatatcgataaagtcctgaaaagcctgggattcctggagagcggctctggctccggcggtggcaccctgaagtacgtggaggatgtgacaaacgtggtcagacgggatgtggagaagtggggccccttcgatctggtgtacggcagcacccaacccctgggcagctcttgtgaccggtgccctggctggtacatgtttcagttccaccggatcctgcagtacgccctgccgagacaggagtcccagcggccattcttttggattttcatggacaacttgctgctgaccgaggatgaccaggaaactaccactcggttcctgcagaccgaagccgtgaccctgcaggacgtgagaggccgggactaccagaacgccatgcgggtgtggtccaacatccctggactgaaaagcaagcacgcacctctgacccctaaagaagaggagtacctgcaggcccaggtgcggagcagaagcaagctggacgcccctaaggtggatctgctggtgaagaattgcctcctgcccctgagagagtacttcaagtatttcagccagaatagtctgcccctgggaggcagcggcggcggcgccctggtgacatttgaggacgtcgccgtgcggttcacccaggaggaatgggctctgctggatccttctcagaaaatcctgtaccgggacgtgatgagagagacataccggaatctgacctccgtgggcatcaactgggaatgttgggaccttgaagcctgcttcagaagcctgggaagaaacctgagagtgcaggtggtgaagagaaagtgcgagctgaccaacagcggcccctgcgccgagggcggcccaagcagcggcgcccctcctcccagcggcggcagcccagccggctccccaacctctaccgaggagggcacctctgagtccgccacccccgagagcggccctggcacctccaccgagcccagcgagggcagcgcacccggcagccctgccggcagccccacctccacagaggagggaaccagcaccgagcccagcgaaggcagcgccccaggcaccagcaccgagcctagtgagcaggagattaaacggatcaacaagatcagaagaagacttgtgaaagacagcaacaccaagaaggccggcaagacaggccccatgaaaaccctgctggttagagtgatgacacccgatctgagagagcggctggaaaacctgagaaagaagcctgaaaatatcccccagcccatcagcaatacatctagagccaacctgaataagctgctgaccgattacaccgaaatgaagaaggcgatcctgcatgtgtactgggaagagttccagaaggaccctgtgggcctgatgagccgggtggcccagcctgccagcaagaagatcgatcagaacaagctgaaacctgagatggacgagaagggcaacctgaccaccgccggctttgcctgctctcagtgtggccagcccctgttcgtgtacaagctggagcaggtgtctgagaagggcaaggcttacaccaactacttcggacggtgcaatgtggccgagcacgaaaagctgatcctgctggcccagctgaagcccgagaaggatagcgacgaagccgtgacatatagcctgggaaagtttgggcagagggccctggatttctacagcattcatgtgaccaaggagtccacccaccccgtgaagcccctggcccagatcgccggaaacagatacgcctccggacctgtgggaaaggccctgagcgacgcatgtatgggcacaatcgcctccttcctgtctaagtaccaggacatcatcatcgaacaccagaaggtggtgaagggcaaccagaagagactggagagcctgcgggagctggccggcaaggaaaacctggaataccctagcgtgaccctgccacctcagcctcacaccaaggagggcgttgatgcctacaacgaagtgatcgcccgggtgcgaatgtgggtgaacctgaacctgtggcagaagctgaagctaagcagagatgatgccaagcctctgctgagactgaagggattcccttcctttcctctggtcgagagacaggccaacgaagtggactggtgggacatggtgtgtaacgtgaagaagctgatcaacgagaaaaaggaggatggcaaggtgttttggcagaatctggctggctacaagagacaggaagccctgagaccatacctgagcagcgaggaagatcggaagaagggaaagaaattcgctcggtaccagctgggcgacctgctgctgcacctggaaaagaagcacggcgaggactggggaaaggtgtacgacgaggcctgggagcggattgacaagaaagtggaaggcctgagcaagcacatcaagctggaagaggaacggagaagcgaggacgcccagagcaaggccgccctgaccgactggctgcgggctaaggccagcttcgtgatcgagggcctgaaggaggccgacaaggacgagttctgcagatgcgagctgaagctgcagaagtggtacggggacctgcggggaaagcccttcgccatcgaagccgagaacagcatcctggacatcagcggcttcagcaagcagtacaactgtgccttcatctggcagaaggacggcgtgaagaagctgaacctgtacctgatcatcaactacttcaagggcggcaagctgcggttcaagaagatcaaacctgaagccttcgaagccaacagattctacaccgtgatcaacaaaaagagcggcgagatcgtgcccatggaggtgaacttcaacttcgacgaccccaacctgatcatcctgcctctggcctttggcaagagacagggcagagaattcatctggaacgacctgctgtccctggaaaccggcagcctgaagctggccaacggaagagtgatcgagaagacactgtacaacagaagaacccggcaggatgagcctgccctgttcgtggccctgaccttcgagcggcgggaggtcctggactcctccaatatcaaaccaatgaacctgatcggcgtggcaagaggcgaaaacatccccgccgtgatcgccctgaccgaccccgagggctgcccactgagccggtttaaggatagcctgggaaacccaacccacatcctgagaatcggcgagagctataaggagaagcagcggaccatccaggccaagaaggaggtggagcagcggagagccggcggctacagccggaagtacgccagcaaagccaagaatctggcagacgatatggtgagaaacaccgctagagatctgctgtactacgccgtgacccaggatgccatgctgatcttcgccaacctgagccggggcttcggccggcagggcaagcggaccttcatggccgagagacagtacacacggatggaggactggctgaccgccaagctggcctacgagggcctgagcaagacctacctgtccaagacactggcccagtacacctccaagacatgcagcaactgtgggtttaccatcaccagcgccgactacgacagggtgctggagaagctgaagaagacagcaacaggctggatgaccacaattaacggcaaggagctgaaggtggagggccagattacctactacaacagatacaagagacagaacgtagtcaaggacctgtccgtcgagctggatagactgagcgaagaatctgtgaacaacgacatctcctcctggacaaagggcagaagcggagaagctctgagcctcctgaagaaaagattctcccatagacccgtgcaggagaagttcgtgtgcctgaactgcggcttcgagacacacgcagccgagcaagccgccctgaacatcgccagatcctggctgttcctgcggagccaggagtacaagaaataccagacaaacaagacaaccggcaacaccgataagagagccttcgtcgagacctggcagtccttttaccggaagaagcttaaggaggtgtggaaacctgccgtgcggtctggcggatctggcggaggctccagccaggagagcgtggccttcgaggacgtggccgtgtacttcaccaccaaggagtgggccatcatggtgcccgccgagagggccctgtacagggacgtgatgctggagaactacgaggccgtggccttcgtggccgtgccccccaccagcaagcccgccctggtgagccacctggagcagggcaaggagagctgcttcatcaggccccccggcgtgctgagcaggagcgactggagggccggcggcggcccaagcagcggcgcccctcctcccagcggcggcagcccagccggctccccaacctctaccgaggagggcacctctgagtccgccacccccgagagcggccctggcacctccaccgagcccagcgagggcagcgcacccggcagccctgccggcagccccacctccacagaggagggaaccagcaccgagcccagcgaaggcagcgccccaggcaccagcaccgagcctagtgagcaggagattaaacggatcaacaagatcagaagaagacttgtgaaagacagcaacaccaagaaggccggcaagacaggccccatgaaaaccctgctggttagagtgatgacacccgatctgagagagcggctggaaaacctgagaaagaagcctgaaaatatcccccagcccatcagcaatacatctagagccaacctgaataagctgctgaccgattacaccgaaatgaagaaggcgatcctgcatgtgtactgggaagagttccagaaggaccctgtgggcctgatgagccgggtggcccagcctgccagcaagaagatcgatcagaacaagctgaaacctgagatggacgagaagggcaacctgaccaccgccggctttgcctgctctcagtgtggccagcccctgttcgtgtacaagctggagcaggtgtctgagaagggcaaggcttacaccaactacttcggacggtgcaatgtggccgagcacgaaaagctgatcctgctggcccagctgaagcccgagaaggatagcgacgaagccgtgacatatagcctgggaaagtttgggcagagggccctggatttctacagcattcatgtgaccaaggagtccacccaccccgtgaagcccctggcccagatcgccggaaacagatacgcctccggacctgtgggaaaggccctgagcgacgcatgtatgggcacaatcgcctccttcctgtctaagtaccaggacatcatcatcgaacaccagaaggtggtgaagggcaaccagaagagactggagagcctgcgggagctggccggcaaggaaaacctggaataccctagcgtgaccctgccacctcagcctcacaccaaggagggcgttgatgcctacaacgaagtgatcgcccgggtgcgaatgtgggtgaacctgaacctgtggcagaagctgaagctaagcagagatgatgccaagcctctgctgagactgaagggattcccttcctttcctctggtcgagagacaggccaacgaagtggactggtgggacatggtgtgtaacgtgaagaagctgatcaacgagaaaaaggaggatggcaaggtgttttggcagaatctggctggctacaagagacaggaagccctgagaccatacctgagcagcgaggaagatcggaagaagggaaagaaattcgctcggtaccagctgggcgacctgctgctgcacctggaaaagaagcacggcgaggactggggaaaggtgtacgacgaggcctgggagcggattgacaagaaagtggaaggcctgagcaagcacatcaagctggaagaggaacggagaagcgaggacgcccagagcaaggccgccctgaccgactggctgcgggctaaggccagcttcgtgatcgagggcctgaaggaggccgacaaggacgagttctgcagatgcgagctgaagctgcagaagtggtacggggacctgcggggaaagcccttcgccatcgaagccgagaacagcatcctggacatcagcggcttcagcaagcagtacaactgtgccttcatctggcagaaggacggcgtgaagaagctgaacctgtacctgatcatcaactacttcaagggcggcaagctgcggttcaagaagatcaaacctgaagccttcgaagccaacagattctacaccgtgatcaacaaaaagagcggcgagatcgtgcccatggaggtgaacttcaacttcgacgaccccaacctgatcatcctgcctctggcctttggcaagagacagggcagagaattcatctggaacgacctgctgtccctggaaaccggcagcctgaagctggccaacggaagagtgatcgagaagacactgtacaacagaagaacccggcaggatgagcctgccctgttcgtggccctgaccttcgagcggcgggaggtcctggactcctccaatatcaaaccaatgaacctgatcggcgtggcaagaggcgaaaacatccccgccgtgatcgccctgaccgaccccgagggctgcccactgagccggtttaaggatagcctgggaaacccaacccacatcctgagaatcggcgagagctataaggagaagcagcggaccatccaggccaagaaggaggtggagcagcggagagccggcggctacagccggaagtacgccagcaaagccaagaatctggcagacgatatggtgagaaacaccgctagagatctgctgtactacgccgtgacccaggatgccatgctgatcttcgccaacctgagccggggcttcggccggcagggcaagcggaccttcatggccgagagacagtacacacggatggaggactggctgaccgccaagctggcctacgagggcctgagcaagacctacctgtccaagacactggcccagtacacctccaagacatgcagcaactgtgggtttaccatcaccagcgccgactacgacagggtgctggagaagctgaagaagacagcaacaggctggatgaccacaattaacggcaaggagctgaaggtggagggccagattacctactacaacagatacaagagacagaacgtagtcaaggacctgtccgtcgagctggatagactgagcgaagaatctgtgaacaacgacatctcctcctggacaaagggcagaagcggagaagctctgagcctcctgaagaaaagattctcccatagacccgtgcaggagaagttcgtgtgcctgaactgcggcttcgagacacacgcagccgagcaagccgccctgaacatcgccagatcctggctgttcctgcggagccaggagtacaagaaataccagacaaacaagacaaccggcaacaccgataagagagccttcgtcgagacctggcagtccttttaccggaagaagcttaaggaggtgtggaaacctgccgtgcggtctggcggatctggcggaggctcctagccaggagagcgtggccttcgaggacgtggccgtgtacttcaccaccaaggagtgggccatcatggtgcccgccgagagggccctgtacagggacgtgatgctggagaactacgaggccgtggccttcgtggccgtgccccccaccagcaagcccgccctggtgagccacctggagcagggcaaggagagctgcttcatcaggccccccggcgtgctgagcaggagcgactggagggccggcggatctggctccggcagcggccccaagaaaaagagaaaagtctaagctgccttctgcggggcttgccttctggccatgcccttcttctctcccttgcacctgtacctcttggtctttgaataaagcctgagtaggaaggctagcaaaaaaaaaaaaaaaaaaaaaaaaaaaaaaaaaaaaaaaaaaaaaaaaaaaaaaaaaaaaaaaaaaaaaaaaaaaaaaaa

SEQ ID NO: 15396 - RNA, 9485 nt, synthetic construct
  source 1..9485: mol_type = other RNA
aggaaataagagagaaaagaagagtaagaagaaatataagagccaccatggcccctaagaagaagcgtaaagtgagccggatggaacgcctcgtctacgaggtgcggcagaagtgcagaaacatcgaggacatctgcatctcctgcggatctctgaacgtgaccctggagcacccactgttcatcggcggcatgtgccagaactgtaaaaactgttttctggagtgtgcctatcaatacgacgatgacggctaccagagctactgcaccatctgttgcggcggaagagaggtgctgatgtgtggaaataacaactgctgccggtgcttctgcgtggaatgcgtggacctgctggtgggccccggcgccgcccaggccgctattaaggaagatccttggaactgctacatgtgcggccacaagggcacatacggcctgctgagacggagagaggactggcctagcagactgcagatgttcttcgccaataaccacgaccaggagttcgacccccctaaggtgtaccctcccgtccccgccgagaagagaaagcccatccgggtcctgagcctgttcgatggcatcgccaccggtctgctggtgctgaaggacctgggcatccaggtggataggtacattgcctccgaggtgtgcgaggactccatcaccgtgggaatggtgcgtcatcagggcaagatcatgtacgtgggcgacgtgcggagcgtgacacagaagcatatccaggagtggggccctttcgacctggtgatcggcggcagcccttgcaatgacctgagcatcgtgaacccagcccggaagggcctgtacgagggaaccggcagactgttcttcgagttttacagactgctgcacgacgcccggcctaaggaaggcgacgaccggcccttcttttggctgttcgagaatgtggtggccatgggagtcagcgacaagcgggatattagccggttcctggagagcaaccccgtgatgatcgatgccaaggaagtgagcgccgcccaccgggccagatacttctggggcaatctgcctggcatgaacagacccctggccagcaccgtgaacgacaagctggagctgcaggagtgcctggagcacggccggatcgccaagttcagcaaggtgagaaccatcaccacccgaagcaacagcatcaaacaaggcaaggaccagcactttcctgtgttcatgaacgagaaggaggacatcctgtggtgtaccgagatggagagagtgttcgggttcccagtccactacacagatgtcagcaacatgtctagactggccagacagagactgctgggaagaagctggtccgtccctgtgatcagacacctgttcgcccctctgaaggagtacttcgcctgcgtgagcagcggcaacagcaacgccaacagccggggccccagcttctctagcggcctggtgccactgtccctgagagggagccacatgggccccatggagatctacaaaaccgtgagcgcctggaagcggcagcctgtgcgcgtgctgagcctgtttcggaatatcgataaagtcctgaaaagcctgggattcctggagagcggctctggctccggcggtggcaccctgaagtacgtggaggatgtgacaaacgtggtcagacgggatgtggagaagtggggccccttcgatctggtgtacggcagcacccaacccctgggcagctcttgtgaccggtgccctggctggtacatgtttcagttccaccggatcctgcagtacgccctgccgagacaggagtcccagcggccattcttttggattttcatggacaacttgctgctgaccgaggatgaccaggaaactaccactcggttcctgcagaccgaagccgtgaccctgcaggacgtgagaggccgggactaccagaacgccatgcgggtgtggtccaacatccctggactgaaaagcaagcacgcacctctgacccctaaagaagaggagtacctgcaggcccaggtgcggagcagaagcaagctggacgcccctaaggtggatctgctggtgaagaattgcctcctgcccctgagagagtacttcaagtatttcagccagaatagtctgcccctgggaggcagcggcggcggcgccctggtgacatttgaggacgtcgccgtgcggttcacccaggaggaatgggctctgctggatccttctcagaaaatcctgtaccgggacgtgatgagagagacataccggaatctgacctccgtgggcatcaactgggaatgttgggaccttgaagcctgcttcagaagcctgggaagaaacctgagagtgcaggtggtgaagagaaagtgcgagctgaccaacagcggcccctgcgccgagggcggcccaagcagcggcgcccctcctcccagcggcggcagcccagccggctccccaacctctaccgaggagggcacctctgagtccgccacccccgagagcggccctggcacctccaccgagcccagcgagggcagcgcacccggcagccctgccggcagccccacctccacagaggagggaaccagcaccgagcccagcgaaggcagcgccccaggcaccagcaccgagcctagtgagcaggagattaaacggatcaacaagatcagaagaagacttgtgaaagacagcaacaccaagaaggccggcaagacaggccccatgaaaaccctgctggttagagtgatgacacccgatctgagagagcggctggaaaacctgagaaagaagcctgaaaatatcccccagcccatcagcaatacatctagagccaacctgaataagctgctgaccgattacaccgaaatgaagaaggcgatcctgcatgtgtactgggaagagttccagaaggaccctgtgggcctgatgagccgggtggcccagcctgccagcaagaagatcgatcagaacaagctgaaacctgagatggacgagaagggcaacctgaccaccgccggctttgcctgctctcagtgtggccagcccctgttcgtgtacaagctggagcaggtgtctgagaagggcaaggcttacaccaactacttcggacggtgcaatgtggccgagcacgaaaagctgatcctgctggcccagctgaagcccgagaaggatagcgacgaagccgtgacatatagcctgggaaagtttgggcagagggccctggatttctacagcattcatgtgaccaaggagtccacccaccccgtgaagcccctggcccagatcgccggaaacagatacgcctccggacctgtgggaaaggccctgagcgacgcatgtatgggcacaatcgcctccttcctgtctaagtaccaggacatcatcatcgaacaccagaaggtggtgaagggcaaccagaagagactggagagcctgcgggagctggccggcaaggaaaacctggaataccctagcgtgaccctgccacctcagcctcacaccaaggagggcgttgatgcctacaacgaagtgatcgcccgggtgcgaatgtgggtgaacctgaacctgtggcagaagctgaagctaagcagagatgatgccaagcctctgctgagactgaagggattcccttcctttcctctggtcgagagacaggccaacgaagtggactggtgggacatggtgtgtaacgtgaagaagctgatcaacgagaaaaaggaggatggcaaggtgttttggcagaatctggctggctacaagagacaggaagccctgagaccatacctgagcagcgaggaagatcggaagaagggaaagaaattcgctcggtaccagctgggcgacctgctgctgcacctggaaaagaagcacggcgaggactggggaaaggtgtacgacgaggcctgggagcggattgacaagaaagtggaaggcctgagcaagcacatcaagctggaagaggaacggagaagcgaggacgcccagagcaaggccgccctgaccgactggctgcgggctaaggccagcttcgtgatcgagggcctgaaggaggccgacaaggacgagttctgcagatgcgagctgaagctgcagaagtggtacggggacctgcggggaaagcccttcgccatcgaagccgagaacagcatcctggacatcagcggcttcagcaagcagtacaactgtgccttcatctggcagaaggacggcgtgaagaagctgaacctgtacctgatcatcaactacttcaagggcggcaagctgcggttcaagaagatcaaacctgaagccttcgaagccaacagattctacaccgtgatcaacaaaaagagcggcgagatcgtgcccatggaggtgaacttcaacttcgacgaccccaacctgatcatcctgcctctggcctttggcaagagacagggcagagaattcatctggaacgacctgctgtccctggaaaccggcagcctgaagctggccaacggaagagtgatcgagaagacactgtacaacagaagaacccggcaggatgagcctgccctgttcgtggccctgaccttcgagcggcgggaggtcctggactcctccaatatcaaaccaatgaacctgatcggcgtggcaagaggcgaaaacatccccgccgtgatcgccctgaccgaccccgagggctgcccactgagccggtttaaggatagcctgggaaacccaacccacatcctgagaatcggcgagagctataaggagaagcagcggaccatccaggccaagaaggaggtggagcagcggagagccggcggctacagccggaagtacgccagcaaagccaagaatctggcagacgatatggtgagaaacaccgctagagatctgctgtactacgccgtgacccaggatgccatgctgatcttcgccaacctgagccggggcttcggccggcagggcaagcggaccttcatggccgagagacagtacacacggatggaggactggctgaccgccaagctggcctacgagggcctgagcaagacctacctgtccaagacactggcccagtacacctccaagacatgcagcaactgtgggtttaccatcaccagcgccgactacgacagggtgctggagaagctgaagaagacagcaacaggctggatgaccacaattaacggcaaggagctgaaggtggagggccagattacctactacaacagatacaagagacagaacgtagtcaaggacctgtccgtcgagctggatagactgagcgaagaatctgtgaacaacgacatctcctcctggacaaagggcagaagcggagaagctctgagcctcctgaagaaaagattctcccatagacccgtgcaggagaagttcgtgtgcctgaactgcggcttcgagacacacgcagccgagcaagccgccctgaacatcgccagatcctggctgttcctgcggagccaggagtacaagaaataccagacaaacaagacaaccggcaacaccgataagagagccttcgtcgagacctggcagtccttttaccggaagaagcttaaggaggtgtggaaacctgccgtgcggtctggcggatctggcggaggctccaggcccggcgccgtgagcttcgccgacgtggccgtgtacttcagccccgaggagtggggctgcctgaggcccgcccagagggccctgtacagggacgtgatgagggagacctacggccacctgggcgccctgggcttcgccggccccaagcccgccctgatcagctggctggagaggaagaaggaggtgtggagccccgaggccgaggaccccgaggccggcgccaggcaccccggcagcggcggcggcccaagcagcggcgcccctcctcccagcggcggcagcccagccggctccccaacctctaccgaggagggcacctctgagtccgccacccccgagagcggccctggcacctccaccgagcccagcgagggcagcgcacccggcagccctgccggcagccccacctccacagaggagggaaccagcaccgagcccagcgaaggcagcgccccaggcaccagcaccgagcctagtgagcaggagattaaacggatcaacaagatcagaagaagacttgtgaaagacagcaacaccaagaaggccggcaagacaggccccatgaaaaccctgctggttagagtgatgacacccgatctgagagagcggctggaaaacctgagaaagaagcctgaaaatatcccccagcccatcagcaatacatctagagccaacctgaataagctgctgaccgattacaccgaaatgaagaaggcgatcctgcatgtgtactgggaagagttccagaaggaccctgtgggcctgatgagccgggtggcccagcctgccagcaagaagatcgatcagaacaagctgaaacctgagatggacgagaagggcaacctgaccaccgccggctttgcctgctctcagtgtggccagcccctgttcgtgtacaagctggagcaggtgtctgagaagggcaaggcttacaccaactacttcggacggtgcaatgtggccgagcacgaaaagctgatcctgctggcccagctgaagcccgagaaggatagcgacgaagccgtgacatatagcctgggaaagtttgggcagagggccctggatttctacagcattcatgtgaccaaggagtccacccaccccgtgaagcccctggcccagatcgccggaaacagatacgcctccggacctgtgggaaaggccctgagcgacgcatgtatgggcacaatcgcctccttcctgtctaagtaccaggacatcatcatcgaacaccagaaggtggtgaagggcaaccagaagagactggagagcctgcgggagctggccggcaaggaaaacctggaataccctagcgtgaccctgccacctcagcctcacaccaaggagggcgttgatgcctacaacgaagtgatcgcccgggtgcgaatgtgggtgaacctgaacctgtggcagaagctgaagctaagcagagatgatgccaagcctctgctgagactgaagggattcccttcctttcctctggtcgagagacaggccaacgaagtggactggtgggacatggtgtgtaacgtgaagaagctgatcaacgagaaaaaggaggatggcaaggtgttttggcagaatctggctggctacaagagacaggaagccctgagaccatacctgagcagcgaggaagatcggaagaagggaaagaaattcgctcggtaccagctgggcgacctgctgctgcacctggaaaagaagcacggcgaggactggggaaaggtgtacgacgaggcctgggagcggattgacaagaaagtggaaggcctgagcaagcacatcaagctggaagaggaacggagaagcgaggacgcccagagcaaggccgccctgaccgactggctgcgggctaaggccagcttcgtgatcgagggcctgaaggaggccgacaaggacgagttctgcagatgcgagctgaagctgcagaagtggtacggggacctgcggggaaagcccttcgccatcgaagccgagaacagcatcctggacatcagcggcttcagcaagcagtacaactgtgccttcatctggcagaaggacggcgtgaagaagctgaacctgtacctgatcatcaactacttcaagggcggcaagctgcggttcaagaagatcaaacctgaagccttcgaagccaacagattctacaccgtgatcaacaaaaagagcggcgagatcgtgcccatggaggtgaacttcaacttcgacgaccccaacctgatcatcctgcctctggcctttggcaagagacagggcagagaattcatctggaacgacctgctgtccctggaaaccggcagcctgaagctggccaacggaagagtgatcgagaagacactgtacaacagaagaacccggcaggatgagcctgccctgttcgtggccctgaccttcgagcggcgggaggtcctggactcctccaatatcaaaccaatgaacctgatcggcgtggcaagaggcgaaaacatccccgccgtgatcgccctgaccgaccccgagggctgcccactgagccggtttaaggatagcctgggaaacccaacccacatcctgagaatcggcgagagctataaggagaagcagcggaccatccaggccaagaaggaggtggagcagcggagagccggcggctacagccggaagtacgccagcaaagccaagaatctggcagacgatatggtgagaaacaccgctagagatctgctgtactacgccgtgacccaggatgccatgctgatcttcgccaacctgagccggggcttcggccggcagggcaagcggaccttcatggccgagagacagtacacacggatggaggactggctgaccgccaagctggcctacgagggcctgagcaagacctacctgtccaagacactggcccagtacacctccaagacatgcagcaactgtgggtttaccatcaccagcgccgactacgacagggtgctggagaagctgaagaagacagcaacaggctggatgaccacaattaacggcaaggagctgaaggtggagggccagattacctactacaacagatacaagagacagaacgtagtcaaggacctgtccgtcgagctggatagactgagcgaagaatctgtgaacaacgacatctcctcctggacaaagggcagaagcggagaagctctgagcctcctgaagaaaagattctcccatagacccgtgcaggagaagttcgtgtgcctgaactgcggcttcgagacacacgcagccgagcaagccgccctgaacatcgccagatcctggctgttcctgcggagccaggagtacaagaaataccagacaaacaagacaaccggcaacaccgataagagagccttcgtcgagacctggcagtccttttaccggaagaagcttaaggaggtgtggaaacctgccgtgcggtctggcggatctggcggaggctcctaggcccggcgccgtgagcttcgccgacgtggccgtgtacttcagccccgaggagtggggctgcctgaggcccgcccagagggccctgtacagggacgtgatgagggagacctacggccacctgggcgccctgggcttcgccggccccaagcccgccctgatcagctggctggagaggaagaaggaggtgtggagccccgaggccgaggaccccgaggccggcgccaggcaccccggcagcggcggatctggctccggcagcggccccaagaaaaagagaaaagtctaagctgccttctgcggggcttgccttctggccatgcccttcttctctcccttgcacctgtacctcttggtctttgaataaagcctgagtaggaaggctagcaaaaaaaaaaaaaaaaaaaaaaaaaaaaaaaaaaaaaaaaaaaaaaaaaaaaaaaaaaaaaaaaaaaaaaaaaaaaaaaa

SEQ ID NO: 15397 - RNA, 9485 nt, synthetic construct
  source 1..9485: mol_type = other RNA
aggaaataagagagaaaagaagagtaagaagaaatataagagccaccatggcccctaagaagaagcgtaaagtgagccggatggaacgcctcgtctacgaggtgcggcagaagtgcagaaacatcgaggacatctgcatctcctgcggatctctgaacgtgaccctggagcacccactgttcatcggcggcatgtgccagaactgtaaaaactgttttctggagtgtgcctatcaatacgacgatgacggctaccagagctactgcaccatctgttgcggcggaagagaggtgctgatgtgtggaaataacaactgctgccggtgcttctgcgtggaatgcgtggacctgctggtgggccccggcgccgcccaggccgctattaaggaagatccttggaactgctacatgtgcggccacaagggcacatacggcctgctgagacggagagaggactggcctagcagactgcagatgttcttcgccaataaccacgaccaggagttcgacccccctaaggtgtaccctcccgtccccgccgagaagagaaagcccatccgggtcctgagcctgttcgatggcatcgccaccggtctgctggtgctgaaggacctgggcatccaggtggataggtacattgcctccgaggtgtgcgaggactccatcaccgtgggaatggtgcgtcatcagggcaagatcatgtacgtgggcgacgtgcggagcgtgacacagaagcatatccaggagtggggccctttcgacctggtgatcggcggcagcccttgcaatgacctgagcatcgtgaacccagcccggaagggcctgtacgagggaaccggcagactgttcttcgagttttacagactgctgcacgacgcccggcctaaggaaggcgacgaccggcccttcttttggctgttcgagaatgtggtggccatgggagtcagcgacaagcgggatattagccggttcctggagagcaaccccgtgatgatcgatgccaaggaagtgagcgccgcccaccgggccagatacttctggggcaatctgcctggcatgaacagacccctggccagcaccgtgaacgacaagctggagctgcaggagtgcctggagcacggccggatcgccaagttcagcaaggtgagaaccatcaccacccgaagcaacagcatcaaacaaggcaaggaccagcactttcctgtgttcatgaacgagaaggaggacatcctgtggtgtaccgagatggagagagtgttcgggttcccagtccactacacagatgtcagcaacatgtctagactggccagacagagactgctgggaagaagctggtccgtccctgtgatcagacacctgttcgcccctctgaaggagtacttcgcctgcgtgagcagcggcaacagcaacgccaacagccggggccccagcttctctagcggcctggtgccactgtccctgagagggagccacatgggccccatggagatctacaaaaccgtgagcgcctggaagcggcagcctgtgcgcgtgctgagcctgtttcggaatatcgataaagtcctgaaaagcctgggattcctggagagcggctctggctccggcggtggcaccctgaagtacgtggaggatgtgacaaacgtggtcagacgggatgtggagaagtggggccccttcgatctggtgtacggcagcacccaacccctgggcagctcttgtgaccggtgccctggctggtacatgtttcagttccaccggatcctgcagtacgccctgccgagacaggagtcccagcggccattcttttggattttcatggacaacttgctgctgaccgaggatgaccaggaaactaccactcggttcctgcagaccgaagccgtgaccctgcaggacgtgagaggccgggactaccagaacgccatgcgggtgtggtccaacatccctggactgaaaagcaagcacgcacctctgacccctaaagaagaggagtacctgcaggcccaggtgcggagcagaagcaagctggacgcccctaaggtggatctgctggtgaagaattgcctcctgcccctgagagagtacttcaagtatttcagccagaatagtctgcccctgggaggcagcggcggcggcgccctggtgacatttgaggacgtcgccgtgcggttcacccaggaggaatgggctctgctggatccttctcagaaaatcctgtaccgggacgtgatgagagagacataccggaatctgacctccgtgggcatcaactgggaatgttgggaccttgaagcctgcttcagaagcctgggaagaaacctgagagtgcaggtggtgaagagaaagtgcgagctgaccaacagcggcccctgcgccgagggcggcccaagcagcggcgcccctcctcccagcggcggcagcccagccggctccccaacctctaccgaggagggcacctctgagtccgccacccccgagagcggccctggcacctccaccgagcccagcgagggcagcgcacccggcagccctgccggcagccccacctccacagaggagggaaccagcaccgagcccagcgaaggcagcgccccaggcaccagcaccgagcctagtgagcaggagattaaacggatcaacaagatcagaagaagacttgtgaaagacagcaacaccaagaaggccggcaagacaggccccatgaaaaccctgctggttagagtgatgacacccgatctgagagagcggctggaaaacctgagaaagaagcctgaaaatatcccccagcccatcagcaatacatctagagccaacctgaataagctgctgaccgattacaccgaaatgaagaaggcgatcctgcatgtgtactgggaagagttccagaaggaccctgtgggcctgatgagccgggtggcccagcctgccagcaagaagatcgatcagaacaagctgaaacctgagatggacgagaagggcaacctgaccaccgccggctttgcctgctctcagtgtggccagcccctgttcgtgtacaagctggagcaggtgtctgagaagggcaaggcttacaccaactacttcggacggtgcaatgtggccgagcacgaaaagctgatcctgctggcccagctgaagcccgagaaggatagcgacgaagccgtgacatatagcctgggaaagtttgggcagagggccctggatttctacagcattcatgtgaccaaggagtccacccaccccgtgaagcccctggcccagatcgccggaaacagatacgcctccggacctgtgggaaaggccctgagcgacgcatgtatgggcacaatcgcctccttcctgtctaagtaccaggacatcatcatcgaacaccagaaggtggtgaagggcaaccagaagagactggagagcctgcgggagctggccggcaaggaaaacctggaataccctagcgtgaccctgccacctcagcctcacaccaaggagggcgttgatgcctacaacgaagtgatcgcccgggtgcgaatgtgggtgaacctgaacctgtggcagaagctgaagctaagcagagatgatgccaagcctctgctgagactgaagggattcccttcctttcctctggtcgagagacaggccaacgaagtggactggtgggacatggtgtgtaacgtgaagaagctgatcaacgagaaaaaggaggatggcaaggtgttttggcagaatctggctggctacaagagacaggaagccctgagaccatacctgagcagcgaggaagatcggaagaagggaaagaaattcgctcggtaccagctgggcgacctgctgctgcacctggaaaagaagcacggcgaggactggggaaaggtgtacgacgaggcctgggagcggattgacaagaaagtggaaggcctgagcaagcacatcaagctggaagaggaacggagaagcgaggacgcccagagcaaggccgccctgaccgactggctgcgggctaaggccagcttcgtgatcgagggcctgaaggaggccgacaaggacgagttctgcagatgcgagctgaagctgcagaagtggtacggggacctgcggggaaagcccttcgccatcgaagccgagaacagcatcctggacatcagcggcttcagcaagcagtacaactgtgccttcatctggcagaaggacggcgtgaagaagctgaacctgtacctgatcatcaactacttcaagggcggcaagctgcggttcaagaagatcaaacctgaagccttcgaagccaacagattctacaccgtgatcaacaaaaagagcggcgagatcgtgcccatggaggtgaacttcaacttcgacgaccccaacctgatcatcctgcctctggcctttggcaagagacagggcagagaattcatctggaacgacctgctgtccctggaaaccggcagcctgaagctggccaacggaagagtgatcgagaagacactgtacaacagaagaacccggcaggatgagcctgccctgttcgtggccctgaccttcgagcggcgggaggtcctggactcctccaatatcaaaccaatgaacctgatcggcgtggcaagaggcgaaaacatccccgccgtgatcgccctgaccgaccccgagggctgcccactgagccggtttaaggatagcctgggaaacccaacccacatcctgagaatcggcgagagctataaggagaagcagcggaccatccaggccaagaaggaggtggagcagcggagagccggcggctacagccggaagtacgccagcaaagccaagaatctggcagacgatatggtgagaaacaccgctagagatctgctgtactacgccgtgacccaggatgccatgctgatcttcgccaacctgagccggggcttcggccggcagggcaagcggaccttcatggccgagagacagtacacacggatggaggactggctgaccgccaagctggcctacgagggcctgagcaagacctacctgtccaagacactggcccagtacacctccaagacatgcagcaactgtgggtttaccatcaccagcgccgactacgacagggtgctggagaagctgaagaagacagcaacaggctggatgaccacaattaacggcaaggagctgaaggtggagggccagattacctactacaacagatacaagagacagaacgtagtcaaggacctgtccgtcgagctggatagactgagcgaagaatctgtgaacaacgacatctcctcctggacaaagggcagaagcggagaagctctgagcctcctgaagaaaagattctcccatagacccgtgcaggagaagttcgtgtgcctgaactgcggcttcgagacacacgcagccgagcaagccgccctgaacatcgccagatcctggctgttcctgcggagccaggagtacaagaaataccagacaaacaagacaaccggcaacaccgataagagagccttcgtcgagacctggcagtccttttaccggaagaagcttaaggaggtgtggaaacctgccgtgcggtctggcggatctggcggaggctccagccaggagagcgtgaccttcagggacgtggccatcgacttcagccaggaggagtgggagtggctgcagcccgcccagagggacctgtacaggcacgtgatgctggagaactacagccacctggtgagcctgggcctgaacatcagcaagccctacgtggtgagcctgctggagcagggcaagggcccctggctggagaagggcgacgtgaggagggacctgttcagcgagagccacggcgagggcggcccaagcagcggcgcccctcctcccagcggcggcagcccagccggctccccaacctctaccgaggagggcacctctgagtccgccacccccgagagcggccctggcacctccaccgagcccagcgagggcagcgcacccggcagccctgccggcagccccacctccacagaggagggaaccagcaccgagcccagcgaaggcagcgccccaggcaccagcaccgagcctagtgagcaggagattaaacggatcaacaagatcagaagaagacttgtgaaagacagcaacaccaagaaggccggcaagacaggccccatgaaaaccctgctggttagagtgatgacacccgatctgagagagcggctggaaaacctgagaaagaagcctgaaaatatcccccagcccatcagcaatacatctagagccaacctgaataagctgctgaccgattacaccgaaatgaagaaggcgatcctgcatgtgtactgggaagagttccagaaggaccctgtgggcctgatgagccgggtggcccagcctgccagcaagaagatcgatcagaacaagctgaaacctgagatggacgagaagggcaacctgaccaccgccggctttgcctgctctcagtgtggccagcccctgttcgtgtacaagctggagcaggtgtctgagaagggcaaggcttacaccaactacttcggacggtgcaatgtggccgagcacgaaaagctgatcctgctggcccagctgaagcccgagaaggatagcgacgaagccgtgacatatagcctgggaaagtttgggcagagggccctggatttctacagcattcatgtgaccaaggagtccacccaccccgtgaagcccctggcccagatcgccggaaacagatacgcctccggacctgtgggaaaggccctgagcgacgcatgtatgggcacaatcgcctccttcctgtctaagtaccaggacatcatcatcgaacaccagaaggtggtgaagggcaaccagaagagactggagagcctgcgggagctggccggcaaggaaaacctggaataccctagcgtgaccctgccacctcagcctcacaccaaggagggcgttgatgcctacaacgaagtgatcgcccgggtgcgaatgtgggtgaacctgaacctgtggcagaagctgaagctaagcagagatgatgccaagcctctgctgagactgaagggattcccttcctttcctctggtcgagagacaggccaacgaagtggactggtgggacatggtgtgtaacgtgaagaagctgatcaacgagaaaaaggaggatggcaaggtgttttggcagaatctggctggctacaagagacaggaagccctgagaccatacctgagcagcgaggaagatcggaagaagggaaagaaattcgctcggtaccagctgggcgacctgctgctgcacctggaaaagaagcacggcgaggactggggaaaggtgtacgacgaggcctgggagcggattgacaagaaagtggaaggcctgagcaagcacatcaagctggaagaggaacggagaagcgaggacgcccagagcaaggccgccctgaccgactggctgcgggctaaggccagcttcgtgatcgagggcctgaaggaggccgacaaggacgagttctgcagatgcgagctgaagctgcagaagtggtacggggacctgcggggaaagcccttcgccatcgaagccgagaacagcatcctggacatcagcggcttcagcaagcagtacaactgtgccttcatctggcagaaggacggcgtgaagaagctgaacctgtacctgatcatcaactacttcaagggcggcaagctgcggttcaagaagatcaaacctgaagccttcgaagccaacagattctacaccgtgatcaacaaaaagagcggcgagatcgtgcccatggaggtgaacttcaacttcgacgaccccaacctgatcatcctgcctctggcctttggcaagagacagggcagagaattcatctggaacgacctgctgtccctggaaaccggcagcctgaagctggccaacggaagagtgatcgagaagacactgtacaacagaagaacccggcaggatgagcctgccctgttcgtggccctgaccttcgagcggcgggaggtcctggactcctccaatatcaaaccaatgaacctgatcggcgtggcaagaggcgaaaacatccccgccgtgatcgccctgaccgaccccgagggctgcccactgagccggtttaaggatagcctgggaaacccaacccacatcctgagaatcggcgagagctataaggagaagcagcggaccatccaggccaagaaggaggtggagcagcggagagccggcggctacagccggaagtacgccagcaaagccaagaatctggcagacgatatggtgagaaacaccgctagagatctgctgtactacgccgtgacccaggatgccatgctgatcttcgccaacctgagccggggcttcggccggcagggcaagcggaccttcatggccgagagacagtacacacggatggaggactggctgaccgccaagctggcctacgagggcctgagcaagacctacctgtccaagacactggcccagtacacctccaagacatgcagcaactgtgggtttaccatcaccagcgccgactacgacagggtgctggagaagctgaagaagacagcaacaggctggatgaccacaattaacggcaaggagctgaaggtggagggccagattacctactacaacagatacaagagacagaacgtagtcaaggacctgtccgtcgagctggatagactgagcgaagaatctgtgaacaacgacatctcctcctggacaaagggcagaagcggagaagctctgagcctcctgaagaaaagattctcccatagacccgtgcaggagaagttcgtgtgcctgaactgcggcttcgagacacacgcagccgagcaagccgccctgaacatcgccagatcctggctgttcctgcggagccaggagtacaagaaataccagacaaacaagacaaccggcaacaccgataagagagccttcgtcgagacctggcagtccttttaccggaagaagcttaaggaggtgtggaaacctgccgtgcggtctggcggatctggcggaggctcctagccaggagagcgtgaccttcagggacgtggccatcgacttcagccaggaggagtgggagtggctgcagcccgcccagagggacctgtacaggcacgtgatgctggagaactacagccacctggtgagcctgggcctgaacatcagcaagccctacgtggtgagcctgctggagcagggcaagggcccctggctggagaagggcgacgtgaggagggacctgttcagcgagagccacggcgagggatctggctccggcagcggccccaagaaaaagagaaaagtctaagctgccttctgcggggcttgccttctggccatgcccttcttctctcccttgcacctgtacctcttggtctttgaataaagcctgagtaggaaggctagcaaaaaaaaaaaaaaaaaaaaaaaaaaaaaaaaaaaaaaaaaaaaaaaaaaaaaaaaaaaaaaaaaaaaaaaaaaaaaaaa

SEQ ID NO: 15398 - RNA, 9485 nt, synthetic construct
  source 1..9485: mol_type = other RNA
aggaaataagagagaaaagaagagtaagaagaaatataagagccaccatggcccctaagaagaagcgtaaagtgagccggatggaacgcctcgtctacgaggtgcggcagaagtgcagaaacatcgaggacatctgcatctcctgcggatctctgaacgtgaccctggagcacccactgttcatcggcggcatgtgccagaactgtaaaaactgttttctggagtgtgcctatcaatacgacgatgacggctaccagagctactgcaccatctgttgcggcggaagagaggtgctgatgtgtggaaataacaactgctgccggtgcttctgcgtggaatgcgtggacctgctggtgggccccggcgccgcccaggccgctattaaggaagatccttggaactgctacatgtgcggccacaagggcacatacggcctgctgagacggagagaggactggcctagcagactgcagatgttcttcgccaataaccacgaccaggagttcgacccccctaaggtgtaccctcccgtccccgccgagaagagaaagcccatccgggtcctgagcctgttcgatggcatcgccaccggtctgctggtgctgaaggacctgggcatccaggtggataggtacattgcctccgaggtgtgcgaggactccatcaccgtgggaatggtgcgtcatcagggcaagatcatgtacgtgggcgacgtgcggagcgtgacacagaagcatatccaggagtggggccctttcgacctggtgatcggcggcagcccttgcaatgacctgagcatcgtgaacccagcccggaagggcctgtacgagggaaccggcagactgttcttcgagttttacagactgctgcacgacgcccggcctaaggaaggcgacgaccggcccttcttttggctgttcgagaatgtggtggccatgggagtcagcgacaagcgggatattagccggttcctggagagcaaccccgtgatgatcgatgccaaggaagtgagcgccgcccaccgggccagatacttctggggcaatctgcctggcatgaacagacccctggccagcaccgtgaacgacaagctggagctgcaggagtgcctggagcacggccggatcgccaagttcagcaaggtgagaaccatcaccacccgaagcaacagcatcaaacaaggcaaggaccagcactttcctgtgttcatgaacgagaaggaggacatcctgtggtgtaccgagatggagagagtgttcgggttcccagtccactacacagatgtcagcaacatgtctagactggccagacagagactgctgggaagaagctggtccgtccctgtgatcagacacctgttcgcccctctgaaggagtacttcgcctgcgtgagcagcggcaacagcaacgccaacagccggggccccagcttctctagcggcctggtgccactgtccctgagagggagccacatgggccccatggagatctacaaaaccgtgagcgcctggaagcggcagcctgtgcgcgtgctgagcctgtttcggaatatcgataaagtcctgaaaagcctgggattcctggagagcggctctggctccggcggtggcaccctgaagtacgtggaggatgtgacaaacgtggtcagacgggatgtggagaagtggggccccttcgatctggtgtacggcagcacccaacccctgggcagctcttgtgaccggtgccctggctggtacatgtttcagttccaccggatcctgcagtacgccctgccgagacaggagtcccagcggccattcttttggattttcatggacaacttgctgctgaccgaggatgaccaggaaactaccactcggttcctgcagaccgaagccgtgaccctgcaggacgtgagaggccgggactaccagaacgccatgcgggtgtggtccaacatccctggactgaaaagcaagcacgcacctctgacccctaaagaagaggagtacctgcaggcccaggtgcggagcagaagcaagctggacgcccctaaggtggatctgctggtgaagaattgcctcctgcccctgagagagtacttcaagtatttcagccagaatagtctgcccctgggaggcagcggcggcggcgccctggtgacatttgaggacgtcgccgtgcggttcacccaggaggaatgggctctgctggatccttctcagaaaatcctgtaccgggacgtgatgagagagacataccggaatctgacctccgtgggcatcaactgggaatgttgggaccttgaagcctgcttcagaagcctgggaagaaacctgagagtgcaggtggtgaagagaaagtgcgagctgaccaacagcggcccctgcgccgagggcggcccaagcagcggcgcccctcctcccagcggcggcagcccagccggctccccaacctctaccgaggagggcacctctgagtccgccacccccgagagcggccctggcacctccaccgagcccagcgagggcagcgcacccggcagccctgccggcagccccacctccacagaggagggaaccagcaccgagcccagcgaaggcagcgccccaggcaccagcaccgagcctagtgagcaggagattaaacggatcaacaagatcagaagaagacttgtgaaagacagcaacaccaagaaggccggcaagacaggccccatgaaaaccctgctggttagagtgatgacacccgatctgagagagcggctggaaaacctgagaaagaagcctgaaaatatcccccagcccatcagcaatacatctagagccaacctgaataagctgctgaccgattacaccgaaatgaagaaggcgatcctgcatgtgtactgggaagagttccagaaggaccctgtgggcctgatgagccgggtggcccagcctgccagcaagaagatcgatcagaacaagctgaaacctgagatggacgagaagggcaacctgaccaccgccggctttgcctgctctcagtgtggccagcccctgttcgtgtacaagctggagcaggtgtctgagaagggcaaggcttacaccaactacttcggacggtgcaatgtggccgagcacgaaaagctgatcctgctggcccagctgaagcccgagaaggatagcgacgaagccgtgacatatagcctgggaaagtttgggcagagggccctggatttctacagcattcatgtgaccaaggagtccacccaccccgtgaagcccctggcccagatcgccggaaacagatacgcctccggacctgtgggaaaggccctgagcgacgcatgtatgggcacaatcgcctccttcctgtctaagtaccaggacatcatcatcgaacaccagaaggtggtgaagggcaaccagaagagactggagagcctgcgggagctggccggcaaggaaaacctggaataccctagcgtgaccctgccacctcagcctcacaccaaggagggcgttgatgcctacaacgaagtgatcgcccgggtgcgaatgtgggtgaacctgaacctgtggcagaagctgaagctaagcagagatgatgccaagcctctgctgagactgaagggattcccttcctttcctctggtcgagagacaggccaacgaagtggactggtgggacatggtgtgtaacgtgaagaagctgatcaacgagaaaaaggaggatggcaaggtgttttggcagaatctggctggctacaagagacaggaagccctgagaccatacctgagcagcgaggaagatcggaagaagggaaagaaattcgctcggtaccagctgggcgacctgctgctgcacctggaaaagaagcacggcgaggactggggaaaggtgtacgacgaggcctgggagcggattgacaagaaagtggaaggcctgagcaagcacatcaagctggaagaggaacggagaagcgaggacgcccagagcaaggccgccctgaccgactggctgcgggctaaggccagcttcgtgatcgagggcctgaaggaggccgacaaggacgagttctgcagatgcgagctgaagctgcagaagtggtacggggacctgcggggaaagcccttcgccatcgaagccgagaacagcatcctggacatcagcggcttcagcaagcagtacaactgtgccttcatctggcagaaggacggcgtgaagaagctgaacctgtacctgatcatcaactacttcaagggcggcaagctgcggttcaagaagatcaaacctgaagccttcgaagccaacagattctacaccgtgatcaacaaaaagagcggcgagatcgtgcccatggaggtgaacttcaacttcgacgaccccaacctgatcatcctgcctctggcctttggcaagagacagggcagagaattcatctggaacgacctgctgtccctggaaaccggcagcctgaagctggccaacggaagagtgatcgagaagacactgtacaacagaagaacccggcaggatgagcctgccctgttcgtggccctgaccttcgagcggcgggaggtcctggactcctccaatatcaaaccaatgaacctgatcggcgtggcaagaggcgaaaacatccccgccgtgatcgccctgaccgaccccgagggctgcccactgagccggtttaaggatagcctgggaaacccaacccacatcctgagaatcggcgagagctataaggagaagcagcggaccatccaggccaagaaggaggtggagcagcggagagccggcggctacagccggaagtacgccagcaaagccaagaatctggcagacgatatggtgagaaacaccgctagagatctgctgtactacgccgtgacccaggatgccatgctgatcttcgccaacctgagccggggcttcggccggcagggcaagcggaccttcatggccgagagacagtacacacggatggaggactggctgaccgccaagctggcctacgagggcctgagcaagacctacctgtccaagacactggcccagtacacctccaagacatgcagcaactgtgggtttaccatcaccagcgccgactacgacagggtgctggagaagctgaagaagacagcaacaggctggatgaccacaattaacggcaaggagctgaaggtggagggccagattacctactacaacagatacaagagacagaacgtagtcaaggacctgtccgtcgagctggatagactgagcgaagaatctgtgaacaacgacatctcctcctggacaaagggcagaagcggagaagctctgagcctcctgaagaaaagattctcccatagacccgtgcaggagaagttcgtgtgcctgaactgcggcttcgagacacacgcagccgagcaagccgccctgaacatcgccagatcctggctgttcctgcggagccaggagtacaagaaataccagacaaacaagacaaccggcaacaccgataagagagccttcgtcgagacctggcagtccttttaccggaagaagcttaaggaggtgtggaaacctgccgtgcggtctggcggatctggcggaggctccgaggagctgcccgtggtgttcgaggacgtggccgtgtacttcaccagggaggagtggggcgccctggacaagtggcagaaggagctgtacagggacgtgatgcagatgaactacgagctgctggccagcctgggccccgccgccgccaagcccgacctgatcagcaagctggagaggagggccgccccctggatcagggacccccacggccccaagctgggcaagggcaggcccccccccggcggcggcccaagcagcggcgcccctcctcccagcggcggcagcccagccggctccccaacctctaccgaggagggcacctctgagtccgccacccccgagagcggccctggcacctccaccgagcccagcgagggcagcgcacccggcagccctgccggcagccccacctccacagaggagggaaccagcaccgagcccagcgaaggcagcgccccaggcaccagcaccgagcctagtgagcaggagattaaacggatcaacaagatcagaagaagacttgtgaaagacagcaacaccaagaaggccggcaagacaggccccatgaaaaccctgctggttagagtgatgacacccgatctgagagagcggctggaaaacctgagaaagaagcctgaaaatatcccccagcccatcagcaatacatctagagccaacctgaataagctgctgaccgattacaccgaaatgaagaaggcgatcctgcatgtgtactgggaagagttccagaaggaccctgtgggcctgatgagccgggtggcccagcctgccagcaagaagatcgatcagaacaagctgaaacctgagatggacgagaagggcaacctgaccaccgccggctttgcctgctctcagtgtggccagcccctgttcgtgtacaagctggagcaggtgtctgagaagggcaaggcttacaccaactacttcggacggtgcaatgtggccgagcacgaaaagctgatcctgctggcccagctgaagcccgagaaggatagcgacgaagccgtgacatatagcctgggaaagtttgggcagagggccctggatttctacagcattcatgtgaccaaggagtccacccaccccgtgaagcccctggcccagatcgccggaaacagatacgcctccggacctgtgggaaaggccctgagcgacgcatgtatgggcacaatcgcctccttcctgtctaagtaccaggacatcatcatcgaacaccagaaggtggtgaagggcaaccagaagagactggagagcctgcgggagctggccggcaaggaaaacctggaataccctagcgtgaccctgccacctcagcctcacaccaaggagggcgttgatgcctacaacgaagtgatcgcccgggtgcgaatgtgggtgaacctgaacctgtggcagaagctgaagctaagcagagatgatgccaagcctctgctgagactgaagggattcccttcctttcctctggtcgagagacaggccaacgaagtggactggtgggacatggtgtgtaacgtgaagaagctgatcaacgagaaaaaggaggatggcaaggtgttttggcagaatctggctggctacaagagacaggaagccctgagaccatacctgagcagcgaggaagatcggaagaagggaaagaaattcgctcggtaccagctgggcgacctgctgctgcacctggaaaagaagcacggcgaggactggggaaaggtgtacgacgaggcctgggagcggattgacaagaaagtggaaggcctgagcaagcacatcaagctggaagaggaacggagaagcgaggacgcccagagcaaggccgccctgaccgactggctgcgggctaaggccagcttcgtgatcgagggcctgaaggaggccgacaaggacgagttctgcagatgcgagctgaagctgcagaagtggtacggggacctgcggggaaagcccttcgccatcgaagccgagaacagcatcctggacatcagcggcttcagcaagcagtacaactgtgccttcatctggcagaaggacggcgtgaagaagctgaacctgtacctgatcatcaactacttcaagggcggcaagctgcggttcaagaagatcaaacctgaagccttcgaagccaacagattctacaccgtgatcaacaaaaagagcggcgagatcgtgcccatggaggtgaacttcaacttcgacgaccccaacctgatcatcctgcctctggcctttggcaagagacagggcagagaattcatctggaacgacctgctgtccctggaaaccggcagcctgaagctggccaacggaagagtgatcgagaagacactgtacaacagaagaacccggcaggatgagcctgccctgttcgtggccctgaccttcgagcggcgggaggtcctggactcctccaatatcaaaccaatgaacctgatcggcgtggcaagaggcgaaaacatccccgccgtgatcgccctgaccgaccccgagggctgcccactgagccggtttaaggatagcctgggaaacccaacccacatcctgagaatcggcgagagctataaggagaagcagcggaccatccaggccaagaaggaggtggagcagcggagagccggcggctacagccggaagtacgccagcaaagccaagaatctggcagacgatatggtgagaaacaccgctagagatctgctgtactacgccgtgacccaggatgccatgctgatcttcgccaacctgagccggggcttcggccggcagggcaagcggaccttcatggccgagagacagtacacacggatggaggactggctgaccgccaagctggcctacgagggcctgagcaagacctacctgtccaagacactggcccagtacacctccaagacatgcagcaactgtgggtttaccatcaccagcgccgactacgacagggtgctggagaagctgaagaagacagcaacaggctggatgaccacaattaacggcaaggagctgaaggtggagggccagattacctactacaacagatacaagagacagaacgtagtcaaggacctgtccgtcgagctggatagactgagcgaagaatctgtgaacaacgacatctcctcctggacaaagggcagaagcggagaagctctgagcctcctgaagaaaagattctcccatagacccgtgcaggagaagttcgtgtgcctgaactgcggcttcgagacacacgcagccgagcaagccgccctgaacatcgccagatcctggctgttcctgcggagccaggagtacaagaaataccagacaaacaagacaaccggcaacaccgataagagagccttcgtcgagacctggcagtccttttaccggaagaagcttaaggaggtgtggaaacctgccgtgcggtctggcggatctggcggaggctcctgaggagctgcccgtggtgttcgaggacgtggccgtgtacttcaccagggaggagtggggcgccctggacaagtggcagaaggagctgtacagggacgtgatgcagatgaactacgagctgctggccagcctgggccccgccgccgccaagcccgacctgatcagcaagctggagaggagggccgccccctggatcagggacccccacggccccaagctgggcaagggcaggcccccccccggcggatctggctccggcagcggccccaagaaaaagagaaaagtctaagctgccttctgcggggcttgccttctggccatgcccttcttctctcccttgcacctgtacctcttggtctttgaataaagcctgagtaggaaggctagcaaaaaaaaaaaaaaaaaaaaaaaaaaaaaaaaaaaaaaaaaaaaaaaaaaaaaaaaaaaaaaaaaaaaaaaaaaaaaaaa

SEQ ID NO: 15399 - RNA, 9485 nt, synthetic construct
  source 1..9485: mol_type = other RNA
aggaaataagagagaaaagaagagtaagaagaaatataagagccaccatggcccctaagaagaagcgtaaagtgagccggatggaacgcctcgtctacgaggtgcggcagaagtgcagaaacatcgaggacatctgcatctcctgcggatctctgaacgtgaccctggagcacccactgttcatcggcggcatgtgccagaactgtaaaaactgttttctggagtgtgcctatcaatacgacgatgacggctaccagagctactgcaccatctgttgcggcggaagagaggtgctgatgtgtggaaataacaactgctgccggtgcttctgcgtggaatgcgtggacctgctggtgggccccggcgccgcccaggccgctattaaggaagatccttggaactgctacatgtgcggccacaagggcacatacggcctgctgagacggagagaggactggcctagcagactgcagatgttcttcgccaataaccacgaccaggagttcgacccccctaaggtgtaccctcccgtccccgccgagaagagaaagcccatccgggtcctgagcctgttcgatggcatcgccaccggtctgctggtgctgaaggacctgggcatccaggtggataggtacattgcctccgaggtgtgcgaggactccatcaccgtgggaatggtgcgtcatcagggcaagatcatgtacgtgggcgacgtgcggagcgtgacacagaagcatatccaggagtggggccctttcgacctggtgatcggcggcagcccttgcaatgacctgagcatcgtgaacccagcccggaagggcctgtacgagggaaccggcagactgttcttcgagttttacagactgctgcacgacgcccggcctaaggaaggcgacgaccggcccttcttttggctgttcgagaatgtggtggccatgggagtcagcgacaagcgggatattagccggttcctggagagcaaccccgtgatgatcgatgccaaggaagtgagcgccgcccaccgggccagatacttctggggcaatctgcctggcatgaacagacccctggccagcaccgtgaacgacaagctggagctgcaggagtgcctggagcacggccggatcgccaagttcagcaaggtgagaaccatcaccacccgaagcaacagcatcaaacaaggcaaggaccagcactttcctgtgttcatgaacgagaaggaggacatcctgtggtgtaccgagatggagagagtgttcgggttcccagtccactacacagatgtcagcaacatgtctagactggccagacagagactgctgggaagaagctggtccgtccctgtgatcagacacctgttcgcccctctgaaggagtacttcgcctgcgtgagcagcggcaacagcaacgccaacagccggggccccagcttctctagcggcctggtgccactgtccctgagagggagccacatgggccccatggagatctacaaaaccgtgagcgcctggaagcggcagcctgtgcgcgtgctgagcctgtttcggaatatcgataaagtcctgaaaagcctgggattcctggagagcggctctggctccggcggtggcaccctgaagtacgtggaggatgtgacaaacgtggtcagacgggatgtggagaagtggggccccttcgatctggtgtacggcagcacccaacccctgggcagctcttgtgaccggtgccctggctggtacatgtttcagttccaccggatcctgcagtacgccctgccgagacaggagtcccagcggccattcttttggattttcatggacaacttgctgctgaccgaggatgaccaggaaactaccactcggttcctgcagaccgaagccgtgaccctgcaggacgtgagaggccgggactaccagaacgccatgcgggtgtggtccaacatccctggactgaaaagcaagcacgcacctctgacccctaaagaagaggagtacctgcaggcccaggtgcggagcagaagcaagctggacgcccctaaggtggatctgctggtgaagaattgcctcctgcccctgagagagtacttcaagtatttcagccagaatagtctgcccctgggaggcagcggcggcggcgccctggtgacatttgaggacgtcgccgtgcggttcacccaggaggaatgggctctgctggatccttctcagaaaatcctgtaccgggacgtgatgagagagacataccggaatctgacctccgtgggcatcaactgggaatgttgggaccttgaagcctgcttcagaagcctgggaagaaacctgagagtgcaggtggtgaagagaaagtgcgagctgaccaacagcggcccctgcgccgagggcggcccaagcagcggcgcccctcctcccagcggcggcagcccagccggctccccaacctctaccgaggagggcacctctgagtccgccacccccgagagcggccctggcacctccaccgagcccagcgagggcagcgcacccggcagccctgccggcagccccacctccacagaggagggaaccagcaccgagcccagcgaaggcagcgccccaggcaccagcaccgagcctagtgagcaggagattaaacggatcaacaagatcagaagaagacttgtgaaagacagcaacaccaagaaggccggcaagacaggccccatgaaaaccctgctggttagagtgatgacacccgatctgagagagcggctggaaaacctgagaaagaagcctgaaaatatcccccagcccatcagcaatacatctagagccaacctgaataagctgctgaccgattacaccgaaatgaagaaggcgatcctgcatgtgtactgggaagagttccagaaggaccctgtgggcctgatgagccgggtggcccagcctgccagcaagaagatcgatcagaacaagctgaaacctgagatggacgagaagggcaacctgaccaccgccggctttgcctgctctcagtgtggccagcccctgttcgtgtacaagctggagcaggtgtctgagaagggcaaggcttacaccaactacttcggacggtgcaatgtggccgagcacgaaaagctgatcctgctggcccagctgaagcccgagaaggatagcgacgaagccgtgacatatagcctgggaaagtttgggcagagggccctggatttctacagcattcatgtgaccaaggagtccacccaccccgtgaagcccctggcccagatcgccggaaacagatacgcctccggacctgtgggaaaggccctgagcgacgcatgtatgggcacaatcgcctccttcctgtctaagtaccaggacatcatcatcgaacaccagaaggtggtgaagggcaaccagaagagactggagagcctgcgggagctggccggcaaggaaaacctggaataccctagcgtgaccctgccacctcagcctcacaccaaggagggcgttgatgcctacaacgaagtgatcgcccgggtgcgaatgtgggtgaacctgaacctgtggcagaagctgaagctaagcagagatgatgccaagcctctgctgagactgaagggattcccttcctttcctctggtcgagagacaggccaacgaagtggactggtgggacatggtgtgtaacgtgaagaagctgatcaacgagaaaaaggaggatggcaaggtgttttggcagaatctggctggctacaagagacaggaagccctgagaccatacctgagcagcgaggaagatcggaagaagggaaagaaattcgctcggtaccagctgggcgacctgctgctgcacctggaaaagaagcacggcgaggactggggaaaggtgtacgacgaggcctgggagcggattgacaagaaagtggaaggcctgagcaagcacatcaagctggaagaggaacggagaagcgaggacgcccagagcaaggccgccctgaccgactggctgcgggctaaggccagcttcgtgatcgagggcctgaaggaggccgacaaggacgagttctgcagatgcgagctgaagctgcagaagtggtacggggacctgcggggaaagcccttcgccatcgaagccgagaacagcatcctggacatcagcggcttcagcaagcagtacaactgtgccttcatctggcagaaggacggcgtgaagaagctgaacctgtacctgatcatcaactacttcaagggcggcaagctgcggttcaagaagatcaaacctgaagccttcgaagccaacagattctacaccgtgatcaacaaaaagagcggcgagatcgtgcccatggaggtgaacttcaacttcgacgaccccaacctgatcatcctgcctctggcctttggcaagagacagggcagagaattcatctggaacgacctgctgtccctggaaaccggcagcctgaagctggccaacggaagagtgatcgagaagacactgtacaacagaagaacccggcaggatgagcctgccctgttcgtggccctgaccttcgagcggcgggaggtcctggactcctccaatatcaaaccaatgaacctgatcggcgtggcaagaggcgaaaacatccccgccgtgatcgccctgaccgaccccgagggctgcccactgagccggtttaaggatagcctgggaaacccaacccacatcctgagaatcggcgagagctataaggagaagcagcggaccatccaggccaagaaggaggtggagcagcggagagccggcggctacagccggaagtacgccagcaaagccaagaatctggcagacgatatggtgagaaacaccgctagagatctgctgtactacgccgtgacccaggatgccatgctgatcttcgccaacctgagccggggcttcggccggcagggcaagcggaccttcatggccgagagacagtacacacggatggaggactggctgaccgccaagctggcctacgagggcctgagcaagacctacctgtccaagacactggcccagtacacctccaagacatgcagcaactgtgggtttaccatcaccagcgccgactacgacagggtgctggagaagctgaagaagacagcaacaggctggatgaccacaattaacggcaaggagctgaaggtggagggccagattacctactacaacagatacaagagacagaacgtagtcaaggacctgtccgtcgagctggatagactgagcgaagaatctgtgaacaacgacatctcctcctggacaaagggcagaagcggagaagctctgagcctcctgaagaaaagattctcccatagacccgtgcaggagaagttcgtgtgcctgaactgcggcttcgagacacacgcagccgagcaagccgccctgaacatcgccagatcctggctgttcctgcggagccaggagtacaagaaataccagacaaacaagacaaccggcaacaccgataagagagccttcgtcgagacctggcagtccttttaccggaagaagcttaaggaggtgtggaaacctgccgtgcggtctggcggatctggcggaggctccatgatgttccaggacagcgtggccttcgaggacgtggccgtgaccttcacccaggaggagtgggccctgctggaccccagccagaagaacctgtacagggacgtgatgcaggagaccttcaggaacctggccagcatcggcaagaagtggaagccccagaacatctacgtggagtacgagaacctgaggaggaacctgaggatcgtgggcgagaggctgttcgagagcaaggagggccaccagggcggcccaagcagcggcgcccctcctcccagcggcggcagcccagccggctccccaacctctaccgaggagggcacctctgagtccgccacccccgagagcggccctggcacctccaccgagcccagcgagggcagcgcacccggcagccctgccggcagccccacctccacagaggagggaaccagcaccgagcccagcgaaggcagcgccccaggcaccagcaccgagcctagtgagcaggagattaaacggatcaacaagatcagaagaagacttgtgaaagacagcaacaccaagaaggccggcaagacaggccccatgaaaaccctgctggttagagtgatgacacccgatctgagagagcggctggaaaacctgagaaagaagcctgaaaatatcccccagcccatcagcaatacatctagagccaacctgaataagctgctgaccgattacaccgaaatgaagaaggcgatcctgcatgtgtactgggaagagttccagaaggaccctgtgggcctgatgagccgggtggcccagcctgccagcaagaagatcgatcagaacaagctgaaacctgagatggacgagaagggcaacctgaccaccgccggctttgcctgctctcagtgtggccagcccctgttcgtgtacaagctggagcaggtgtctgagaagggcaaggcttacaccaactacttcggacggtgcaatgtggccgagcacgaaaagctgatcctgctggcccagctgaagcccgagaaggatagcgacgaagccgtgacatatagcctgggaaagtttgggcagagggccctggatttctacagcattcatgtgaccaaggagtccacccaccccgtgaagcccctggcccagatcgccggaaacagatacgcctccggacctgtgggaaaggccctgagcgacgcatgtatgggcacaatcgcctccttcctgtctaagtaccaggacatcatcatcgaacaccagaaggtggtgaagggcaaccagaagagactggagagcctgcgggagctggccggcaaggaaaacctggaataccctagcgtgaccctgccacctcagcctcacaccaaggagggcgttgatgcctacaacgaagtgatcgcccgggtgcgaatgtgggtgaacctgaacctgtggcagaagctgaagctaagcagagatgatgccaagcctctgctgagactgaagggattcccttcctttcctctggtcgagagacaggccaacgaagtggactggtgggacatggtgtgtaacgtgaagaagctgatcaacgagaaaaaggaggatggcaaggtgttttggcagaatctggctggctacaagagacaggaagccctgagaccatacctgagcagcgaggaagatcggaagaagggaaagaaattcgctcggtaccagctgggcgacctgctgctgcacctggaaaagaagcacggcgaggactggggaaaggtgtacgacgaggcctgggagcggattgacaagaaagtggaaggcctgagcaagcacatcaagctggaagaggaacggagaagcgaggacgcccagagcaaggccgccctgaccgactggctgcgggctaaggccagcttcgtgatcgagggcctgaaggaggccgacaaggacgagttctgcagatgcgagctgaagctgcagaagtggtacggggacctgcggggaaagcccttcgccatcgaagccgagaacagcatcctggacatcagcggcttcagcaagcagtacaactgtgccttcatctggcagaaggacggcgtgaagaagctgaacctgtacctgatcatcaactacttcaagggcggcaagctgcggttcaagaagatcaaacctgaagccttcgaagccaacagattctacaccgtgatcaacaaaaagagcggcgagatcgtgcccatggaggtgaacttcaacttcgacgaccccaacctgatcatcctgcctctggcctttggcaagagacagggcagagaattcatctggaacgacctgctgtccctggaaaccggcagcctgaagctggccaacggaagagtgatcgagaagacactgtacaacagaagaacccggcaggatgagcctgccctgttcgtggccctgaccttcgagcggcgggaggtcctggactcctccaatatcaaaccaatgaacctgatcggcgtggcaagaggcgaaaacatccccgccgtgatcgccctgaccgaccccgagggctgcccactgagccggtttaaggatagcctgggaaacccaacccacatcctgagaatcggcgagagctataaggagaagcagcggaccatccaggccaagaaggaggtggagcagcggagagccggcggctacagccggaagtacgccagcaaagccaagaatctggcagacgatatggtgagaaacaccgctagagatctgctgtactacgccgtgacccaggatgccatgctgatcttcgccaacctgagccggggcttcggccggcagggcaagcggaccttcatggccgagagacagtacacacggatggaggactggctgaccgccaagctggcctacgagggcctgagcaagacctacctgtccaagacactggcccagtacacctccaagacatgcagcaactgtgggtttaccatcaccagcgccgactacgacagggtgctggagaagctgaagaagacagcaacaggctggatgaccacaattaacggcaaggagctgaaggtggagggccagattacctactacaacagatacaagagacagaacgtagtcaaggacctgtccgtcgagctggatagactgagcgaagaatctgtgaacaacgacatctcctcctggacaaagggcagaagcggagaagctctgagcctcctgaagaaaagattctcccatagacccgtgcaggagaagttcgtgtgcctgaactgcggcttcgagacacacgcagccgagcaagccgccctgaacatcgccagatcctggctgttcctgcggagccaggagtacaagaaataccagacaaacaagacaaccggcaacaccgataagagagccttcgtcgagacctggcagtccttttaccggaagaagcttaaggaggtgtggaaacctgccgtgcggtctggcggatctggcggaggctcctatgatgttccaggacagcgtggccttcgaggacgtggccgtgaccttcacccaggaggagtgggccctgctggaccccagccagaagaacctgtacagggacgtgatgcaggagaccttcaggaacctggccagcatcggcaagaagtggaagccccagaacatctacgtggagtacgagaacctgaggaggaacctgaggatcgtgggcgagaggctgttcgagagcaaggagggccaccagggatctggctccggcagcggccccaagaaaaagagaaaagtctaagctgccttctgcggggcttgccttctggccatgcccttcttctctcccttgcacctgtacctcttggtctttgaataaagcctgagtaggaaggctagcaaaaaaaaaaaaaaaaaaaaaaaaaaaaaaaaaaaaaaaaaaaaaaaaaaaaaaaaaaaaaaaaaaaaaaaaaaaaaaaa

SEQ ID NO: 15400 - RNA, 9485 nt, synthetic construct
  source 1..9485: mol_type = other RNA
aggaaataagagagaaaagaagagtaagaagaaatataagagccaccatggcccctaagaagaagcgtaaagtgagccggatggaacgcctcgtctacgaggtgcggcagaagtgcagaaacatcgaggacatctgcatctcctgcggatctctgaacgtgaccctggagcacccactgttcatcggcggcatgtgccagaactgtaaaaactgttttctggagtgtgcctatcaatacgacgatgacggctaccagagctactgcaccatctgttgcggcggaagagaggtgctgatgtgtggaaataacaactgctgccggtgcttctgcgtggaatgcgtggacctgctggtgggccccggcgccgcccaggccgctattaaggaagatccttggaactgctacatgtgcggccacaagggcacatacggcctgctgagacggagagaggactggcctagcagactgcagatgttcttcgccaataaccacgaccaggagttcgacccccctaaggtgtaccctcccgtccccgccgagaagagaaagcccatccgggtcctgagcctgttcgatggcatcgccaccggtctgctggtgctgaaggacctgggcatccaggtggataggtacattgcctccgaggtgtgcgaggactccatcaccgtgggaatggtgcgtcatcagggcaagatcatgtacgtgggcgacgtgcggagcgtgacacagaagcatatccaggagtggggccctttcgacctggtgatcggcggcagcccttgcaatgacctgagcatcgtgaacccagcccggaagggcctgtacgagggaaccggcagactgttcttcgagttttacagactgctgcacgacgcccggcctaaggaaggcgacgaccggcccttcttttggctgttcgagaatgtggtggccatgggagtcagcgacaagcgggatattagccggttcctggagagcaaccccgtgatgatcgatgccaaggaagtgagcgccgcccaccgggccagatacttctggggcaatctgcctggcatgaacagacccctggccagcaccgtgaacgacaagctggagctgcaggagtgcctggagcacggccggatcgccaagttcagcaaggtgagaaccatcaccacccgaagcaacagcatcaaacaaggcaaggaccagcactttcctgtgttcatgaacgagaaggaggacatcctgtggtgtaccgagatggagagagtgttcgggttcccagtccactacacagatgtcagcaacatgtctagactggccagacagagactgctgggaagaagctggtccgtccctgtgatcagacacctgttcgcccctctgaaggagtacttcgcctgcgtgagcagcggcaacagcaacgccaacagccggggccccagcttctctagcggcctggtgccactgtccctgagagggagccacatgggccccatggagatctacaaaaccgtgagcgcctggaagcggcagcctgtgcgcgtgctgagcctgtttcggaatatcgataaagtcctgaaaagcctgggattcctggagagcggctctggctccggcggtggcaccctgaagtacgtggaggatgtgacaaacgtggtcagacgggatgtggagaagtggggccccttcgatctggtgtacggcagcacccaacccctgggcagctcttgtgaccggtgccctggctggtacatgtttcagttccaccggatcctgcagtacgccctgccgagacaggagtcccagcggccattcttttggattttcatggacaacttgctgctgaccgaggatgaccaggaaactaccactcggttcctgcagaccgaagccgtgaccctgcaggacgtgagaggccgggactaccagaacgccatgcgggtgtggtccaacatccctggactgaaaagcaagcacgcacctctgacccctaaagaagaggagtacctgcaggcccaggtgcggagcagaagcaagctggacgcccctaaggtggatctgctggtgaagaattgcctcctgcccctgagagagtacttcaagtatttcagccagaatagtctgcccctgggaggcagcggcggcggcgccctggtgacatttgaggacgtcgccgtgcggttcacccaggaggaatgggctctgctggatccttctcagaaaatcctgtaccgggacgtgatgagagagacataccggaatctgacctccgtgggcatcaactgggaatgttgggaccttgaagcctgcttcagaagcctgggaagaaacctgagagtgcaggtggtgaagagaaagtgcgagctgaccaacagcggcccctgcgccgagggcggcccaagcagcggcgcccctcctcccagcggcggcagcccagccggctccccaacctctaccgaggagggcacctctgagtccgccacccccgagagcggccctggcacctccaccgagcccagcgagggcagcgcacccggcagccctgccggcagccccacctccacagaggagggaaccagcaccgagcccagcgaaggcagcgccccaggcaccagcaccgagcctagtgagcaggagattaaacggatcaacaagatcagaagaagacttgtgaaagacagcaacaccaagaaggccggcaagacaggccccatgaaaaccctgctggttagagtgatgacacccgatctgagagagcggctggaaaacctgagaaagaagcctgaaaatatcccccagcccatcagcaatacatctagagccaacctgaataagctgctgaccgattacaccgaaatgaagaaggcgatcctgcatgtgtactgggaagagttccagaaggaccctgtgggcctgatgagccgggtggcccagcctgccagcaagaagatcgatcagaacaagctgaaacctgagatggacgagaagggcaacctgaccaccgccggctttgcctgctctcagtgtggccagcccctgttcgtgtacaagctggagcaggtgtctgagaagggcaaggcttacaccaactacttcggacggtgcaatgtggccgagcacgaaaagctgatcctgctggcccagctgaagcccgagaaggatagcgacgaagccgtgacatatagcctgggaaagtttgggcagagggccctggatttctacagcattcatgtgaccaaggagtccacccaccccgtgaagcccctggcccagatcgccggaaacagatacgcctccggacctgtgggaaaggccctgagcgacgcatgtatgggcacaatcgcctccttcctgtctaagtaccaggacatcatcatcgaacaccagaaggtggtgaagggcaaccagaagagactggagagcctgcgggagctggccggcaaggaaaacctggaataccctagcgtgaccctgccacctcagcctcacaccaaggagggcgttgatgcctacaacgaagtgatcgcccgggtgcgaatgtgggtgaacctgaacctgtggcagaagctgaagctaagcagagatgatgccaagcctctgctgagactgaagggattcccttcctttcctctggtcgagagacaggccaacgaagtggactggtgggacatggtgtgtaacgtgaagaagctgatcaacgagaaaaaggaggatggcaaggtgttttggcagaatctggctggctacaagagacaggaagccctgagaccatacctgagcagcgaggaagatcggaagaagggaaagaaattcgctcggtaccagctgggcgacctgctgctgcacctggaaaagaagcacggcgaggactggggaaaggtgtacgacgaggcctgggagcggattgacaagaaagtggaaggcctgagcaagcacatcaagctggaagaggaacggagaagcgaggacgcccagagcaaggccgccctgaccgactggctgcgggctaaggccagcttcgtgatcgagggcctgaaggaggccgacaaggacgagttctgcagatgcgagctgaagctgcagaagtggtacggggacctgcggggaaagcccttcgccatcgaagccgagaacagcatcctggacatcagcggcttcagcaagcagtacaactgtgccttcatctggcagaaggacggcgtgaagaagctgaacctgtacctgatcatcaactacttcaagggcggcaagctgcggttcaagaagatcaaacctgaagccttcgaagccaacagattctacaccgtgatcaacaaaaagagcggcgagatcgtgcccatggaggtgaacttcaacttcgacgaccccaacctgatcatcctgcctctggcctttggcaagagacagggcagagaattcatctggaacgacctgctgtccctggaaaccggcagcctgaagctggccaacggaagagtgatcgagaagacactgtacaacagaagaacccggcaggatgagcctgccctgttcgtggccctgaccttcgagcggcgggaggtcctggactcctccaatatcaaaccaatgaacctgatcggcgtggcaagaggcgaaaacatccccgccgtgatcgccctgaccgaccccgagggctgcccactgagccggtttaaggatagcctgggaaacccaacccacatcctgagaatcggcgagagctataaggagaagcagcggaccatccaggccaagaaggaggtggagcagcggagagccggcggctacagccggaagtacgccagcaaagccaagaatctggcagacgatatggtgagaaacaccgctagagatctgctgtactacgccgtgacccaggatgccatgctgatcttcgccaacctgagccggggcttcggccggcagggcaagcggaccttcatggccgagagacagtacacacggatggaggactggctgaccgccaagctggcctacgagggcctgagcaagacctacctgtccaagacactggcccagtacacctccaagacatgcagcaactgtgggtttaccatcaccagcgccgactacgacagggtgctggagaagctgaagaagacagcaacaggctggatgaccacaattaacggcaaggagctgaaggtggagggccagattacctactacaacagatacaagagacagaacgtagtcaaggacctgtccgtcgagctggatagactgagcgaagaatctgtgaacaacgacatctcctcctggacaaagggcagaagcggagaagctctgagcctcctgaagaaaagattctcccatagacccgtgcaggagaagttcgtgtgcctgaactgcggcttcgagacacacgcagccgagcaagccgccctgaacatcgccagatcctggctgttcctgcggagccaggagtacaagaaataccagacaaacaagacaaccggcaacaccgataagagagccttcgtcgagacctggcagtccttttaccggaagaagcttaaggaggtgtggaaacctgccgtgcggtctggcggatctggcggaggctccgacagcgtggccttcgaggacgtggccgtgaacttcacccaggaggagtgggccctgctggacaggagccagaagaagctgtacagggaggtgatgcaggagaccctgaggaacctgaccagcatcggcaagacctggagcaaccagaacgccgaggagaggcaccagaaccccaggaggaacctgaggaggctgatcggcgagaggctgttccagagcaaggagagccaccagcacgccgagggcggcccaagcagcggcgcccctcctcccagcggcggcagcccagccggctccccaacctctaccgaggagggcacctctgagtccgccacccccgagagcggccctggcacctccaccgagcccagcgagggcagcgcacccggcagccctgccggcagccccacctccacagaggagggaaccagcaccgagcccagcgaaggcagcgccccaggcaccagcaccgagcctagtgagcaggagattaaacggatcaacaagatcagaagaagacttgtgaaagacagcaacaccaagaaggccggcaagacaggccccatgaaaaccctgctggttagagtgatgacacccgatctgagagagcggctggaaaacctgagaaagaagcctgaaaatatcccccagcccatcagcaatacatctagagccaacctgaataagctgctgaccgattacaccgaaatgaagaaggcgatcctgcatgtgtactgggaagagttccagaaggaccctgtgggcctgatgagccgggtggcccagcctgccagcaagaagatcgatcagaacaagctgaaacctgagatggacgagaagggcaacctgaccaccgccggctttgcctgctctcagtgtggccagcccctgttcgtgtacaagctggagcaggtgtctgagaagggcaaggcttacaccaactacttcggacggtgcaatgtggccgagcacgaaaagctgatcctgctggcccagctgaagcccgagaaggatagcgacgaagccgtgacatatagcctgggaaagtttgggcagagggccctggatttctacagcattcatgtgaccaaggagtccacccaccccgtgaagcccctggcccagatcgccggaaacagatacgcctccggacctgtgggaaaggccctgagcgacgcatgtatgggcacaatcgcctccttcctgtctaagtaccaggacatcatcatcgaacaccagaaggtggtgaagggcaaccagaagagactggagagcctgcgggagctggccggcaaggaaaacctggaataccctagcgtgaccctgccacctcagcctcacaccaaggagggcgttgatgcctacaacgaagtgatcgcccgggtgcgaatgtgggtgaacctgaacctgtggcagaagctgaagctaagcagagatgatgccaagcctctgctgagactgaagggattcccttcctttcctctggtcgagagacaggccaacgaagtggactggtgggacatggtgtgtaacgtgaagaagctgatcaacgagaaaaaggaggatggcaaggtgttttggcagaatctggctggctacaagagacaggaagccctgagaccatacctgagcagcgaggaagatcggaagaagggaaagaaattcgctcggtaccagctgggcgacctgctgctgcacctggaaaagaagcacggcgaggactggggaaaggtgtacgacgaggcctgggagcggattgacaagaaagtggaaggcctgagcaagcacatcaagctggaagaggaacggagaagcgaggacgcccagagcaaggccgccctgaccgactggctgcgggctaaggccagcttcgtgatcgagggcctgaaggaggccgacaaggacgagttctgcagatgcgagctgaagctgcagaagtggtacggggacctgcggggaaagcccttcgccatcgaagccgagaacagcatcctggacatcagcggcttcagcaagcagtacaactgtgccttcatctggcagaaggacggcgtgaagaagctgaacctgtacctgatcatcaactacttcaagggcggcaagctgcggttcaagaagatcaaacctgaagccttcgaagccaacagattctacaccgtgatcaacaaaaagagcggcgagatcgtgcccatggaggtgaacttcaacttcgacgaccccaacctgatcatcctgcctctggcctttggcaagagacagggcagagaattcatctggaacgacctgctgtccctggaaaccggcagcctgaagctggccaacggaagagtgatcgagaagacactgtacaacagaagaacccggcaggatgagcctgccctgttcgtggccctgaccttcgagcggcgggaggtcctggactcctccaatatcaaaccaatgaacctgatcggcgtggcaagaggcgaaaacatccccgccgtgatcgccctgaccgaccccgagggctgcccactgagccggtttaaggatagcctgggaaacccaacccacatcctgagaatcggcgagagctataaggagaagcagcggaccatccaggccaagaaggaggtggagcagcggagagccggcggctacagccggaagtacgccagcaaagccaagaatctggcagacgatatggtgagaaacaccgctagagatctgctgtactacgccgtgacccaggatgccatgctgatcttcgccaacctgagccggggcttcggccggcagggcaagcggaccttcatggccgagagacagtacacacggatggaggactggctgaccgccaagctggcctacgagggcctgagcaagacctacctgtccaagacactggcccagtacacctccaagacatgcagcaactgtgggtttaccatcaccagcgccgactacgacagggtgctggagaagctgaagaagacagcaacaggctggatgaccacaattaacggcaaggagctgaaggtggagggccagattacctactacaacagatacaagagacagaacgtagtcaaggacctgtccgtcgagctggatagactgagcgaagaatctgtgaacaacgacatctcctcctggacaaagggcagaagcggagaagctctgagcctcctgaagaaaagattctcccatagacccgtgcaggagaagttcgtgtgcctgaactgcggcttcgagacacacgcagccgagcaagccgccctgaacatcgccagatcctggctgttcctgcggagccaggagtacaagaaataccagacaaacaagacaaccggcaacaccgataagagagccttcgtcgagacctggcagtccttttaccggaagaagcttaaggaggtgtggaaacctgccgtgcggtctggcggatctggcggaggctcctgacagcgtggccttcgaggacgtggccgtgaacttcacccaggaggagtgggccctgctggacaggagccagaagaagctgtacagggaggtgatgcaggagaccctgaggaacctgaccagcatcggcaagacctggagcaaccagaacgccgaggagaggcaccagaaccccaggaggaacctgaggaggctgatcggcgagaggctgttccagagcaaggagagccaccagcacgccgagggatctggctccggcagcggccccaagaaaaagagaaaagtctaagctgccttctgcggggcttgccttctggccatgcccttcttctctcccttgcacctgtacctcttggtctttgaataaagcctgagtaggaaggctagcaaaaaaaaaaaaaaaaaaaaaaaaaaaaaaaaaaaaaaaaaaaaaaaaaaaaaaaaaaaaaaaaaaaaaaaaaaaaaaaa

SEQ ID NO: 15401 - RNA, 9485 nt, synthetic construct
  source 1..9485: mol_type = other RNA
aggaaataagagagaaaagaagagtaagaagaaatataagagccaccatggcccctaagaagaagcgtaaagtgagccggatggaacgcctcgtctacgaggtgcggcagaagtgcagaaacatcgaggacatctgcatctcctgcggatctctgaacgtgaccctggagcacccactgttcatcggcggcatgtgccagaactgtaaaaactgttttctggagtgtgcctatcaatacgacgatgacggctaccagagctactgcaccatctgttgcggcggaagagaggtgctgatgtgtggaaataacaactgctgccggtgcttctgcgtggaatgcgtggacctgctggtgggccccggcgccgcccaggccgctattaaggaagatccttggaactgctacatgtgcggccacaagggcacatacggcctgctgagacggagagaggactggcctagcagactgcagatgttcttcgccaataaccacgaccaggagttcgacccccctaaggtgtaccctcccgtccccgccgagaagagaaagcccatccgggtcctgagcctgttcgatggcatcgccaccggtctgctggtgctgaaggacctgggcatccaggtggataggtacattgcctccgaggtgtgcgaggactccatcaccgtgggaatggtgcgtcatcagggcaagatcatgtacgtgggcgacgtgcggagcgtgacacagaagcatatccaggagtggggccctttcgacctggtgatcggcggcagcccttgcaatgacctgagcatcgtgaacccagcccggaagggcctgtacgagggaaccggcagactgttcttcgagttttacagactgctgcacgacgcccggcctaaggaaggcgacgaccggcccttcttttggctgttcgagaatgtggtggccatgggagtcagcgacaagcgggatattagccggttcctggagagcaaccccgtgatgatcgatgccaaggaagtgagcgccgcccaccgggccagatacttctggggcaatctgcctggcatgaacagacccctggccagcaccgtgaacgacaagctggagctgcaggagtgcctggagcacggccggatcgccaagttcagcaaggtgagaaccatcaccacccgaagcaacagcatcaaacaaggcaaggaccagcactttcctgtgttcatgaacgagaaggaggacatcctgtggtgtaccgagatggagagagtgttcgggttcccagtccactacacagatgtcagcaacatgtctagactggccagacagagactgctgggaagaagctggtccgtccctgtgatcagacacctgttcgcccctctgaaggagtacttcgcctgcgtgagcagcggcaacagcaacgccaacagccggggccccagcttctctagcggcctggtgccactgtccctgagagggagccacatgggccccatggagatctacaaaaccgtgagcgcctggaagcggcagcctgtgcgcgtgctgagcctgtttcggaatatcgataaagtcctgaaaagcctgggattcctggagagcggctctggctccggcggtggcaccctgaagtacgtggaggatgtgacaaacgtggtcagacgggatgtggagaagtggggccccttcgatctggtgtacggcagcacccaacccctgggcagctcttgtgaccggtgccctggctggtacatgtttcagttccaccggatcctgcagtacgccctgccgagacaggagtcccagcggccattcttttggattttcatggacaacttgctgctgaccgaggatgaccaggaaactaccactcggttcctgcagaccgaagccgtgaccctgcaggacgtgagaggccgggactaccagaacgccatgcgggtgtggtccaacatccctggactgaaaagcaagcacgcacctctgacccctaaagaagaggagtacctgcaggcccaggtgcggagcagaagcaagctggacgcccctaaggtggatctgctggtgaagaattgcctcctgcccctgagagagtacttcaagtatttcagccagaatagtctgcccctgggaggcagcggcggcggcgccctggtgacatttgaggacgtcgccgtgcggttcacccaggaggaatgggctctgctggatccttctcagaaaatcctgtaccgggacgtgatgagagagacataccggaatctgacctccgtgggcatcaactgggaatgttgggaccttgaagcctgcttcagaagcctgggaagaaacctgagagtgcaggtggtgaagagaaagtgcgagctgaccaacagcggcccctgcgccgagggcggcccaagcagcggcgcccctcctcccagcggcggcagcccagccggctccccaacctctaccgaggagggcacctctgagtccgccacccccgagagcggccctggcacctccaccgagcccagcgagggcagcgcacccggcagccctgccggcagccccacctccacagaggagggaaccagcaccgagcccagcgaaggcagcgccccaggcaccagcaccgagcctagtgagcaggagattaaacggatcaacaagatcagaagaagacttgtgaaagacagcaacaccaagaaggccggcaagacaggccccatgaaaaccctgctggttagagtgatgacacccgatctgagagagcggctggaaaacctgagaaagaagcctgaaaatatcccccagcccatcagcaatacatctagagccaacctgaataagctgctgaccgattacaccgaaatgaagaaggcgatcctgcatgtgtactgggaagagttccagaaggaccctgtgggcctgatgagccgggtggcccagcctgccagcaagaagatcgatcagaacaagctgaaacctgagatggacgagaagggcaacctgaccaccgccggctttgcctgctctcagtgtggccagcccctgttcgtgtacaagctggagcaggtgtctgagaagggcaaggcttacaccaactacttcggacggtgcaatgtggccgagcacgaaaagctgatcctgctggcccagctgaagcccgagaaggatagcgacgaagccgtgacatatagcctgggaaagtttgggcagagggccctggatttctacagcattcatgtgaccaaggagtccacccaccccgtgaagcccctggcccagatcgccggaaacagatacgcctccggacctgtgggaaaggccctgagcgacgcatgtatgggcacaatcgcctccttcctgtctaagtaccaggacatcatcatcgaacaccagaaggtggtgaagggcaaccagaagagactggagagcctgcgggagctggccggcaaggaaaacctggaataccctagcgtgaccctgccacctcagcctcacaccaaggagggcgttgatgcctacaacgaagtgatcgcccgggtgcgaatgtgggtgaacctgaacctgtggcagaagctgaagctaagcagagatgatgccaagcctctgctgagactgaagggattcccttcctttcctctggtcgagagacaggccaacgaagtggactggtgggacatggtgtgtaacgtgaagaagctgatcaacgagaaaaaggaggatggcaaggtgttttggcagaatctggctggctacaagagacaggaagccctgagaccatacctgagcagcgaggaagatcggaagaagggaaagaaattcgctcggtaccagctgggcgacctgctgctgcacctggaaaagaagcacggcgaggactggggaaaggtgtacgacgaggcctgggagcggattgacaagaaagtggaaggcctgagcaagcacatcaagctggaagaggaacggagaagcgaggacgcccagagcaaggccgccctgaccgactggctgcgggctaaggccagcttcgtgatcgagggcctgaaggaggccgacaaggacgagttctgcagatgcgagctgaagctgcagaagtggtacggggacctgcggggaaagcccttcgccatcgaagccgagaacagcatcctggacatcagcggcttcagcaagcagtacaactgtgccttcatctggcagaaggacggcgtgaagaagctgaacctgtacctgatcatcaactacttcaagggcggcaagctgcggttcaagaagatcaaacctgaagccttcgaagccaacagattctacaccgtgatcaacaaaaagagcggcgagatcgtgcccatggaggtgaacttcaacttcgacgaccccaacctgatcatcctgcctctggcctttggcaagagacagggcagagaattcatctggaacgacctgctgtccctggaaaccggcagcctgaagctggccaacggaagagtgatcgagaagacactgtacaacagaagaacccggcaggatgagcctgccctgttcgtggccctgaccttcgagcggcgggaggtcctggactcctccaatatcaaaccaatgaacctgatcggcgtggcaagaggcgaaaacatccccgccgtgatcgccctgaccgaccccgagggctgcccactgagccggtttaaggatagcctgggaaacccaacccacatcctgagaatcggcgagagctataaggagaagcagcggaccatccaggccaagaaggaggtggagcagcggagagccggcggctacagccggaagtacgccagcaaagccaagaatctggcagacgatatggtgagaaacaccgctagagatctgctgtactacgccgtgacccaggatgccatgctgatcttcgccaacctgagccggggcttcggccggcagggcaagcggaccttcatggccgagagacagtacacacggatggaggactggctgaccgccaagctggcctacgagggcctgagcaagacctacctgtccaagacactggcccagtacacctccaagacatgcagcaactgtgggtttaccatcaccagcgccgactacgacagggtgctggagaagctgaagaagacagcaacaggctggatgaccacaattaacggcaaggagctgaaggtggagggccagattacctactacaacagatacaagagacagaacgtagtcaaggacctgtccgtcgagctggatagactgagcgaagaatctgtgaacaacgacatctcctcctggacaaagggcagaagcggagaagctctgagcctcctgaagaaaagattctcccatagacccgtgcaggagaagttcgtgtgcctgaactgcggcttcgagacacacgcagccgagcaagccgccctgaacatcgccagatcctggctgttcctgcggagccaggagtacaagaaataccagacaaacaagacaaccggcaacaccgataagagagccttcgtcgagacctggcagtccttttaccggaagaagcttaaggaggtgtggaaacctgccgtgcggtctggcggatctggcggaggctccttccagggcagcgtgatgttcagcgacgtgagcatcgacttcagccaggaggagtgggagtacctggacctggagcagagggccctgtacagggacgtgatgctggagaactacagcaacctggtgagcctgggctgcttcatcagcaagcccgacgtgatcagcctgctggagcagggcaaggagccctggaaggtggtgaggaagggcaagaggaggtaccccgacctggagaccaggtacggcggcccaagcagcggcgcccctcctcccagcggcggcagcccagccggctccccaacctctaccgaggagggcacctctgagtccgccacccccgagagcggccctggcacctccaccgagcccagcgagggcagcgcacccggcagccctgccggcagccccacctccacagaggagggaaccagcaccgagcccagcgaaggcagcgccccaggcaccagcaccgagcctagtgagcaggagattaaacggatcaacaagatcagaagaagacttgtgaaagacagcaacaccaagaaggccggcaagacaggccccatgaaaaccctgctggttagagtgatgacacccgatctgagagagcggctggaaaacctgagaaagaagcctgaaaatatcccccagcccatcagcaatacatctagagccaacctgaataagctgctgaccgattacaccgaaatgaagaaggcgatcctgcatgtgtactgggaagagttccagaaggaccctgtgggcctgatgagccgggtggcccagcctgccagcaagaagatcgatcagaacaagctgaaacctgagatggacgagaagggcaacctgaccaccgccggctttgcctgctctcagtgtggccagcccctgttcgtgtacaagctggagcaggtgtctgagaagggcaaggcttacaccaactacttcggacggtgcaatgtggccgagcacgaaaagctgatcctgctggcccagctgaagcccgagaaggatagcgacgaagccgtgacatatagcctgggaaagtttgggcagagggccctggatttctacagcattcatgtgaccaaggagtccacccaccccgtgaagcccctggcccagatcgccggaaacagatacgcctccggacctgtgggaaaggccctgagcgacgcatgtatgggcacaatcgcctccttcctgtctaagtaccaggacatcatcatcgaacaccagaaggtggtgaagggcaaccagaagagactggagagcctgcgggagctggccggcaaggaaaacctggaataccctagcgtgaccctgccacctcagcctcacaccaaggagggcgttgatgcctacaacgaagtgatcgcccgggtgcgaatgtgggtgaacctgaacctgtggcagaagctgaagctaagcagagatgatgccaagcctctgctgagactgaagggattcccttcctttcctctggtcgagagacaggccaacgaagtggactggtgggacatggtgtgtaacgtgaagaagctgatcaacgagaaaaaggaggatggcaaggtgttttggcagaatctggctggctacaagagacaggaagccctgagaccatacctgagcagcgaggaagatcggaagaagggaaagaaattcgctcggtaccagctgggcgacctgctgctgcacctggaaaagaagcacggcgaggactggggaaaggtgtacgacgaggcctgggagcggattgacaagaaagtggaaggcctgagcaagcacatcaagctggaagaggaacggagaagcgaggacgcccagagcaaggccgccctgaccgactggctgcgggctaaggccagcttcgtgatcgagggcctgaaggaggccgacaaggacgagttctgcagatgcgagctgaagctgcagaagtggtacggggacctgcggggaaagcccttcgccatcgaagccgagaacagcatcctggacatcagcggcttcagcaagcagtacaactgtgccttcatctggcagaaggacggcgtgaagaagctgaacctgtacctgatcatcaactacttcaagggcggcaagctgcggttcaagaagatcaaacctgaagccttcgaagccaacagattctacaccgtgatcaacaaaaagagcggcgagatcgtgcccatggaggtgaacttcaacttcgacgaccccaacctgatcatcctgcctctggcctttggcaagagacagggcagagaattcatctggaacgacctgctgtccctggaaaccggcagcctgaagctggccaacggaagagtgatcgagaagacactgtacaacagaagaacccggcaggatgagcctgccctgttcgtggccctgaccttcgagcggcgggaggtcctggactcctccaatatcaaaccaatgaacctgatcggcgtggcaagaggcgaaaacatccccgccgtgatcgccctgaccgaccccgagggctgcccactgagccggtttaaggatagcctgggaaacccaacccacatcctgagaatcggcgagagctataaggagaagcagcggaccatccaggccaagaaggaggtggagcagcggagagccggcggctacagccggaagtacgccagcaaagccaagaatctggcagacgatatggtgagaaacaccgctagagatctgctgtactacgccgtgacccaggatgccatgctgatcttcgccaacctgagccggggcttcggccggcagggcaagcggaccttcatggccgagagacagtacacacggatggaggactggctgaccgccaagctggcctacgagggcctgagcaagacctacctgtccaagacactggcccagtacacctccaagacatgcagcaactgtgggtttaccatcaccagcgccgactacgacagggtgctggagaagctgaagaagacagcaacaggctggatgaccacaattaacggcaaggagctgaaggtggagggccagattacctactacaacagatacaagagacagaacgtagtcaaggacctgtccgtcgagctggatagactgagcgaagaatctgtgaacaacgacatctcctcctggacaaagggcagaagcggagaagctctgagcctcctgaagaaaagattctcccatagacccgtgcaggagaagttcgtgtgcctgaactgcggcttcgagacacacgcagccgagcaagccgccctgaacatcgccagatcctggctgttcctgcggagccaggagtacaagaaataccagacaaacaagacaaccggcaacaccgataagagagccttcgtcgagacctggcagtccttttaccggaagaagcttaaggaggtgtggaaacctgccgtgcggtctggcggatctggcggaggctcctttccagggcagcgtgatgttcagcgacgtgagcatcgacttcagccaggaggagtgggagtacctggacctggagcagagggccctgtacagggacgtgatgctggagaactacagcaacctggtgagcctgggctgcttcatcagcaagcccgacgtgatcagcctgctggagcagggcaaggagccctggaaggtggtgaggaagggcaagaggaggtaccccgacctggagaccaggtacggatctggctccggcagcggccccaagaaaaagagaaaagtctaagctgccttctgcggggcttgccttctggccatgcccttcttctctcccttgcacctgtacctcttggtctttgaataaagcctgagtaggaaggctagcaaaaaaaaaaaaaaaaaaaaaaaaaaaaaaaaaaaaaaaaaaaaaaaaaaaaaaaaaaaaaaaaaaaaaaaaaaaaaaaa

SEQ ID NO: 15402 - RNA, 9485 nt, synthetic construct
  source 1..9485: mol_type = other RNA
aggaaataagagagaaaagaagagtaagaagaaatataagagccaccatggcccctaagaagaagcgtaaagtgagccggatggaacgcctcgtctacgaggtgcggcagaagtgcagaaacatcgaggacatctgcatctcctgcggatctctgaacgtgaccctggagcacccactgttcatcggcggcatgtgccagaactgtaaaaactgttttctggagtgtgcctatcaatacgacgatgacggctaccagagctactgcaccatctgttgcggcggaagagaggtgctgatgtgtggaaataacaactgctgccggtgcttctgcgtggaatgcgtggacctgctggtgggccccggcgccgcccaggccgctattaaggaagatccttggaactgctacatgtgcggccacaagggcacatacggcctgctgagacggagagaggactggcctagcagactgcagatgttcttcgccaataaccacgaccaggagttcgacccccctaaggtgtaccctcccgtccccgccgagaagagaaagcccatccgggtcctgagcctgttcgatggcatcgccaccggtctgctggtgctgaaggacctgggcatccaggtggataggtacattgcctccgaggtgtgcgaggactccatcaccgtgggaatggtgcgtcatcagggcaagatcatgtacgtgggcgacgtgcggagcgtgacacagaagcatatccaggagtggggccctttcgacctggtgatcggcggcagcccttgcaatgacctgagcatcgtgaacccagcccggaagggcctgtacgagggaaccggcagactgttcttcgagttttacagactgctgcacgacgcccggcctaaggaaggcgacgaccggcccttcttttggctgttcgagaatgtggtggccatgggagtcagcgacaagcgggatattagccggttcctggagagcaaccccgtgatgatcgatgccaaggaagtgagcgccgcccaccgggccagatacttctggggcaatctgcctggcatgaacagacccctggccagcaccgtgaacgacaagctggagctgcaggagtgcctggagcacggccggatcgccaagttcagcaaggtgagaaccatcaccacccgaagcaacagcatcaaacaaggcaaggaccagcactttcctgtgttcatgaacgagaaggaggacatcctgtggtgtaccgagatggagagagtgttcgggttcccagtccactacacagatgtcagcaacatgtctagactggccagacagagactgctgggaagaagctggtccgtccctgtgatcagacacctgttcgcccctctgaaggagtacttcgcctgcgtgagcagcggcaacagcaacgccaacagccggggccccagcttctctagcggcctggtgccactgtccctgagagggagccacatgggccccatggagatctacaaaaccgtgagcgcctggaagcggcagcctgtgcgcgtgctgagcctgtttcggaatatcgataaagtcctgaaaagcctgggattcctggagagcggctctggctccggcggtggcaccctgaagtacgtggaggatgtgacaaacgtggtcagacgggatgtggagaagtggggccccttcgatctggtgtacggcagcacccaacccctgggcagctcttgtgaccggtgccctggctggtacatgtttcagttccaccggatcctgcagtacgccctgccgagacaggagtcccagcggccattcttttggattttcatggacaacttgctgctgaccgaggatgaccaggaaactaccactcggttcctgcagaccgaagccgtgaccctgcaggacgtgagaggccgggactaccagaacgccatgcgggtgtggtccaacatccctggactgaaaagcaagcacgcacctctgacccctaaagaagaggagtacctgcaggcccaggtgcggagcagaagcaagctggacgcccctaaggtggatctgctggtgaagaattgcctcctgcccctgagagagtacttcaagtatttcagccagaatagtctgcccctgggaggcagcggcggcggcgccctggtgacatttgaggacgtcgccgtgcggttcacccaggaggaatgggctctgctggatccttctcagaaaatcctgtaccgggacgtgatgagagagacataccggaatctgacctccgtgggcatcaactgggaatgttgggaccttgaagcctgcttcagaagcctgggaagaaacctgagagtgcaggtggtgaagagaaagtgcgagctgaccaacagcggcccctgcgccgagggcggcccaagcagcggcgcccctcctcccagcggcggcagcccagccggctccccaacctctaccgaggagggcacctctgagtccgccacccccgagagcggccctggcacctccaccgagcccagcgagggcagcgcacccggcagccctgccggcagccccacctccacagaggagggaaccagcaccgagcccagcgaaggcagcgccccaggcaccagcaccgagcctagtgagcaggagattaaacggatcaacaagatcagaagaagacttgtgaaagacagcaacaccaagaaggccggcaagacaggccccatgaaaaccctgctggttagagtgatgacacccgatctgagagagcggctggaaaacctgagaaagaagcctgaaaatatcccccagcccatcagcaatacatctagagccaacctgaataagctgctgaccgattacaccgaaatgaagaaggcgatcctgcatgtgtactgggaagagttccagaaggaccctgtgggcctgatgagccgggtggcccagcctgccagcaagaagatcgatcagaacaagctgaaacctgagatggacgagaagggcaacctgaccaccgccggctttgcctgctctcagtgtggccagcccctgttcgtgtacaagctggagcaggtgtctgagaagggcaaggcttacaccaactacttcggacggtgcaatgtggccgagcacgaaaagctgatcctgctggcccagctgaagcccgagaaggatagcgacgaagccgtgacatatagcctgggaaagtttgggcagagggccctggatttctacagcattcatgtgaccaaggagtccacccaccccgtgaagcccctggcccagatcgccggaaacagatacgcctccggacctgtgggaaaggccctgagcgacgcatgtatgggcacaatcgcctccttcctgtctaagtaccaggacatcatcatcgaacaccagaaggtggtgaagggcaaccagaagagactggagagcctgcgggagctggccggcaaggaaaacctggaataccctagcgtgaccctgccacctcagcctcacaccaaggagggcgttgatgcctacaacgaagtgatcgcccgggtgcgaatgtgggtgaacctgaacctgtggcagaagctgaagctaagcagagatgatgccaagcctctgctgagactgaagggattcccttcctttcctctggtcgagagacaggccaacgaagtggactggtgggacatggtgtgtaacgtgaagaagctgatcaacgagaaaaaggaggatggcaaggtgttttggcagaatctggctggctacaagagacaggaagccctgagaccatacctgagcagcgaggaagatcggaagaagggaaagaaattcgctcggtaccagctgggcgacctgctgctgcacctggaaaagaagcacggcgaggactggggaaaggtgtacgacgaggcctgggagcggattgacaagaaagtggaaggcctgagcaagcacatcaagctggaagaggaacggagaagcgaggacgcccagagcaaggccgccctgaccgactggctgcgggctaaggccagcttcgtgatcgagggcctgaaggaggccgacaaggacgagttctgcagatgcgagctgaagctgcagaagtggtacggggacctgcggggaaagcccttcgccatcgaagccgagaacagcatcctggacatcagcggcttcagcaagcagtacaactgtgccttcatctggcagaaggacggcgtgaagaagctgaacctgtacctgatcatcaactacttcaagggcggcaagctgcggttcaagaagatcaaacctgaagccttcgaagccaacagattctacaccgtgatcaacaaaaagagcggcgagatcgtgcccatggaggtgaacttcaacttcgacgaccccaacctgatcatcctgcctctggcctttggcaagagacagggcagagaattcatctggaacgacctgctgtccctggaaaccggcagcctgaagctggccaacggaagagtgatcgagaagacactgtacaacagaagaacccggcaggatgagcctgccctgttcgtggccctgaccttcgagcggcgggaggtcctggactcctccaatatcaaaccaatgaacctgatcggcgtggcaagaggcgaaaacatccccgccgtgatcgccctgaccgaccccgagggctgcccactgagccggtttaaggatagcctgggaaacccaacccacatcctgagaatcggcgagagctataaggagaagcagcggaccatccaggccaagaaggaggtggagcagcggagagccggcggctacagccggaagtacgccagcaaagccaagaatctggcagacgatatggtgagaaacaccgctagagatctgctgtactacgccgtgacccaggatgccatgctgatcttcgccaacctgagccggggcttcggccggcagggcaagcggaccttcatggccgagagacagtacacacggatggaggactggctgaccgccaagctggcctacgagggcctgagcaagacctacctgtccaagacactggcccagtacacctccaagacatgcagcaactgtgggtttaccatcaccagcgccgactacgacagggtgctggagaagctgaagaagacagcaacaggctggatgaccacaattaacggcaaggagctgaaggtggagggccagattacctactacaacagatacaagagacagaacgtagtcaaggacctgtccgtcgagctggatagactgagcgaagaatctgtgaacaacgacatctcctcctggacaaagggcagaagcggagaagctctgagcctcctgaagaaaagattctcccatagacccgtgcaggagaagttcgtgtgcctgaactgcggcttcgagacacacgcagccgagcaagccgccctgaacatcgccagatcctggctgttcctgcggagccaggagtacaagaaataccagacaaacaagacaaccggcaacaccgataagagagccttcgtcgagacctggcagtccttttaccggaagaagcttaaggaggtgtggaaacctgccgtgcggtctggcggatctggcggaggctccagccagagcctggtgaccttcggcgacgtggccgtggagttcagccccgaggagtgggagtggctggacagcgcccagaggagcctgtacaggagcgtgatgctggagaactacaggagcctggtgagcctgggcctgtgcgtgagcaagcccaagatgatcagcagcctggagcagaggaaggagccctgggtggccaagaggaccctgaccaggggcggctgccccgacagcagggccctgggcggcccaagcagcggcgcccctcctcccagcggcggcagcccagccggctccccaacctctaccgaggagggcacctctgagtccgccacccccgagagcggccctggcacctccaccgagcccagcgagggcagcgcacccggcagccctgccggcagccccacctccacagaggagggaaccagcaccgagcccagcgaaggcagcgccccaggcaccagcaccgagcctagtgagcaggagattaaacggatcaacaagatcagaagaagacttgtgaaagacagcaacaccaagaaggccggcaagacaggccccatgaaaaccctgctggttagagtgatgacacccgatctgagagagcggctggaaaacctgagaaagaagcctgaaaatatcccccagcccatcagcaatacatctagagccaacctgaataagctgctgaccgattacaccgaaatgaagaaggcgatcctgcatgtgtactgggaagagttccagaaggaccctgtgggcctgatgagccgggtggcccagcctgccagcaagaagatcgatcagaacaagctgaaacctgagatggacgagaagggcaacctgaccaccgccggctttgcctgctctcagtgtggccagcccctgttcgtgtacaagctggagcaggtgtctgagaagggcaaggcttacaccaactacttcggacggtgcaatgtggccgagcacgaaaagctgatcctgctggcccagctgaagcccgagaaggatagcgacgaagccgtgacatatagcctgggaaagtttgggcagagggccctggatttctacagcattcatgtgaccaaggagtccacccaccccgtgaagcccctggcccagatcgccggaaacagatacgcctccggacctgtgggaaaggccctgagcgacgcatgtatgggcacaatcgcctccttcctgtctaagtaccaggacatcatcatcgaacaccagaaggtggtgaagggcaaccagaagagactggagagcctgcgggagctggccggcaaggaaaacctggaataccctagcgtgaccctgccacctcagcctcacaccaaggagggcgttgatgcctacaacgaagtgatcgcccgggtgcgaatgtgggtgaacctgaacctgtggcagaagctgaagctaagcagagatgatgccaagcctctgctgagactgaagggattcccttcctttcctctggtcgagagacaggccaacgaagtggactggtgggacatggtgtgtaacgtgaagaagctgatcaacgagaaaaaggaggatggcaaggtgttttggcagaatctggctggctacaagagacaggaagccctgagaccatacctgagcagcgaggaagatcggaagaagggaaagaaattcgctcggtaccagctgggcgacctgctgctgcacctggaaaagaagcacggcgaggactggggaaaggtgtacgacgaggcctgggagcggattgacaagaaagtggaaggcctgagcaagcacatcaagctggaagaggaacggagaagcgaggacgcccagagcaaggccgccctgaccgactggctgcgggctaaggccagcttcgtgatcgagggcctgaaggaggccgacaaggacgagttctgcagatgcgagctgaagctgcagaagtggtacggggacctgcggggaaagcccttcgccatcgaagccgagaacagcatcctggacatcagcggcttcagcaagcagtacaactgtgccttcatctggcagaaggacggcgtgaagaagctgaacctgtacctgatcatcaactacttcaagggcggcaagctgcggttcaagaagatcaaacctgaagccttcgaagccaacagattctacaccgtgatcaacaaaaagagcggcgagatcgtgcccatggaggtgaacttcaacttcgacgaccccaacctgatcatcctgcctctggcctttggcaagagacagggcagagaattcatctggaacgacctgctgtccctggaaaccggcagcctgaagctggccaacggaagagtgatcgagaagacactgtacaacagaagaacccggcaggatgagcctgccctgttcgtggccctgaccttcgagcggcgggaggtcctggactcctccaatatcaaaccaatgaacctgatcggcgtggcaagaggcgaaaacatccccgccgtgatcgccctgaccgaccccgagggctgcccactgagccggtttaaggatagcctgggaaacccaacccacatcctgagaatcggcgagagctataaggagaagcagcggaccatccaggccaagaaggaggtggagcagcggagagccggcggctacagccggaagtacgccagcaaagccaagaatctggcagacgatatggtgagaaacaccgctagagatctgctgtactacgccgtgacccaggatgccatgctgatcttcgccaacctgagccggggcttcggccggcagggcaagcggaccttcatggccgagagacagtacacacggatggaggactggctgaccgccaagctggcctacgagggcctgagcaagacctacctgtccaagacactggcccagtacacctccaagacatgcagcaactgtgggtttaccatcaccagcgccgactacgacagggtgctggagaagctgaagaagacagcaacaggctggatgaccacaattaacggcaaggagctgaaggtggagggccagattacctactacaacagatacaagagacagaacgtagtcaaggacctgtccgtcgagctggatagactgagcgaagaatctgtgaacaacgacatctcctcctggacaaagggcagaagcggagaagctctgagcctcctgaagaaaagattctcccatagacccgtgcaggagaagttcgtgtgcctgaactgcggcttcgagacacacgcagccgagcaagccgccctgaacatcgccagatcctggctgttcctgcggagccaggagtacaagaaataccagacaaacaagacaaccggcaacaccgataagagagccttcgtcgagacctggcagtccttttaccggaagaagcttaaggaggtgtggaaacctgccgtgcggtctggcggatctggcggaggctcctagccagagcctggtgaccttcggcgacgtggccgtggagttcagccccgaggagtgggagtggctggacagcgcccagaggagcctgtacaggagcgtgatgctggagaactacaggagcctggtgagcctgggcctgtgcgtgagcaagcccaagatgatcagcagcctggagcagaggaaggagccctgggtggccaagaggaccctgaccaggggcggctgccccgacagcagggccctgggatctggctccggcagcggccccaagaaaaagagaaaagtctaagctgccttctgcggggcttgccttctggccatgcccttcttctctcccttgcacctgtacctcttggtctttgaataaagcctgagtaggaaggctagcaaaaaaaaaaaaaaaaaaaaaaaaaaaaaaaaaaaaaaaaaaaaaaaaaaaaaaaaaaaaaaaaaaaaaaaaaaaaaaaa

SEQ ID NO: 15403 - RNA, 9485 nt, synthetic construct
  source 1..9485: mol_type = other RNA
aggaaataagagagaaaagaagagtaagaagaaatataagagccaccatggcccctaagaagaagcgtaaagtgagccggatggaacgcctcgtctacgaggtgcggcagaagtgcagaaacatcgaggacatctgcatctcctgcggatctctgaacgtgaccctggagcacccactgttcatcggcggcatgtgccagaactgtaaaaactgttttctggagtgtgcctatcaatacgacgatgacggctaccagagctactgcaccatctgttgcggcggaagagaggtgctgatgtgtggaaataacaactgctgccggtgcttctgcgtggaatgcgtggacctgctggtgggccccggcgccgcccaggccgctattaaggaagatccttggaactgctacatgtgcggccacaagggcacatacggcctgctgagacggagagaggactggcctagcagactgcagatgttcttcgccaataaccacgaccaggagttcgacccccctaaggtgtaccctcccgtccccgccgagaagagaaagcccatccgggtcctgagcctgttcgatggcatcgccaccggtctgctggtgctgaaggacctgggcatccaggtggataggtacattgcctccgaggtgtgcgaggactccatcaccgtgggaatggtgcgtcatcagggcaagatcatgtacgtgggcgacgtgcggagcgtgacacagaagcatatccaggagtggggccctttcgacctggtgatcggcggcagcccttgcaatgacctgagcatcgtgaacccagcccggaagggcctgtacgagggaaccggcagactgttcttcgagttttacagactgctgcacgacgcccggcctaaggaaggcgacgaccggcccttcttttggctgttcgagaatgtggtggccatgggagtcagcgacaagcgggatattagccggttcctggagagcaaccccgtgatgatcgatgccaaggaagtgagcgccgcccaccgggccagatacttctggggcaatctgcctggcatgaacagacccctggccagcaccgtgaacgacaagctggagctgcaggagtgcctggagcacggccggatcgccaagttcagcaaggtgagaaccatcaccacccgaagcaacagcatcaaacaaggcaaggaccagcactttcctgtgttcatgaacgagaaggaggacatcctgtggtgtaccgagatggagagagtgttcgggttcccagtccactacacagatgtcagcaacatgtctagactggccagacagagactgctgggaagaagctggtccgtccctgtgatcagacacctgttcgcccctctgaaggagtacttcgcctgcgtgagcagcggcaacagcaacgccaacagccggggccccagcttctctagcggcctggtgccactgtccctgagagggagccacatgggccccatggagatctacaaaaccgtgagcgcctggaagcggcagcctgtgcgcgtgctgagcctgtttcggaatatcgataaagtcctgaaaagcctgggattcctggagagcggctctggctccggcggtggcaccctgaagtacgtggaggatgtgacaaacgtggtcagacgggatgtggagaagtggggccccttcgatctggtgtacggcagcacccaacccctgggcagctcttgtgaccggtgccctggctggtacatgtttcagttccaccggatcctgcagtacgccctgccgagacaggagtcccagcggccattcttttggattttcatggacaacttgctgctgaccgaggatgaccaggaaactaccactcggttcctgcagaccgaagccgtgaccctgcaggacgtgagaggccgggactaccagaacgccatgcgggtgtggtccaacatccctggactgaaaagcaagcacgcacctctgacccctaaagaagaggagtacctgcaggcccaggtgcggagcagaagcaagctggacgcccctaaggtggatctgctggtgaagaattgcctcctgcccctgagagagtacttcaagtatttcagccagaatagtctgcccctgggaggcagcggcggcggcgccctggtgacatttgaggacgtcgccgtgcggttcacccaggaggaatgggctctgctggatccttctcagaaaatcctgtaccgggacgtgatgagagagacataccggaatctgacctccgtgggcatcaactgggaatgttgggaccttgaagcctgcttcagaagcctgggaagaaacctgagagtgcaggtggtgaagagaaagtgcgagctgaccaacagcggcccctgcgccgagggcggcccaagcagcggcgcccctcctcccagcggcggcagcccagccggctccccaacctctaccgaggagggcacctctgagtccgccacccccgagagcggccctggcacctccaccgagcccagcgagggcagcgcacccggcagccctgccggcagccccacctccacagaggagggaaccagcaccgagcccagcgaaggcagcgccccaggcaccagcaccgagcctagtgagcaggagattaaacggatcaacaagatcagaagaagacttgtgaaagacagcaacaccaagaaggccggcaagacaggccccatgaaaaccctgctggttagagtgatgacacccgatctgagagagcggctggaaaacctgagaaagaagcctgaaaatatcccccagcccatcagcaatacatctagagccaacctgaataagctgctgaccgattacaccgaaatgaagaaggcgatcctgcatgtgtactgggaagagttccagaaggaccctgtgggcctgatgagccgggtggcccagcctgccagcaagaagatcgatcagaacaagctgaaacctgagatggacgagaagggcaacctgaccaccgccggctttgcctgctctcagtgtggccagcccctgttcgtgtacaagctggagcaggtgtctgagaagggcaaggcttacaccaactacttcggacggtgcaatgtggccgagcacgaaaagctgatcctgctggcccagctgaagcccgagaaggatagcgacgaagccgtgacatatagcctgggaaagtttgggcagagggccctggatttctacagcattcatgtgaccaaggagtccacccaccccgtgaagcccctggcccagatcgccggaaacagatacgcctccggacctgtgggaaaggccctgagcgacgcatgtatgggcacaatcgcctccttcctgtctaagtaccaggacatcatcatcgaacaccagaaggtggtgaagggcaaccagaagagactggagagcctgcgggagctggccggcaaggaaaacctggaataccctagcgtgaccctgccacctcagcctcacaccaaggagggcgttgatgcctacaacgaagtgatcgcccgggtgcgaatgtgggtgaacctgaacctgtggcagaagctgaagctaagcagagatgatgccaagcctctgctgagactgaagggattcccttcctttcctctggtcgagagacaggccaacgaagtggactggtgggacatggtgtgtaacgtgaagaagctgatcaacgagaaaaaggaggatggcaaggtgttttggcagaatctggctggctacaagagacaggaagccctgagaccatacctgagcagcgaggaagatcggaagaagggaaagaaattcgctcggtaccagctgggcgacctgctgctgcacctggaaaagaagcacggcgaggactggggaaaggtgtacgacgaggcctgggagcggattgacaagaaagtggaaggcctgagcaagcacatcaagctggaagaggaacggagaagcgaggacgcccagagcaaggccgccctgaccgactggctgcgggctaaggccagcttcgtgatcgagggcctgaaggaggccgacaaggacgagttctgcagatgcgagctgaagctgcagaagtggtacggggacctgcggggaaagcccttcgccatcgaagccgagaacagcatcctggacatcagcggcttcagcaagcagtacaactgtgccttcatctggcagaaggacggcgtgaagaagctgaacctgtacctgatcatcaactacttcaagggcggcaagctgcggttcaagaagatcaaacctgaagccttcgaagccaacagattctacaccgtgatcaacaaaaagagcggcgagatcgtgcccatggaggtgaacttcaacttcgacgaccccaacctgatcatcctgcctctggcctttggcaagagacagggcagagaattcatctggaacgacctgctgtccctggaaaccggcagcctgaagctggccaacggaagagtgatcgagaagacactgtacaacagaagaacccggcaggatgagcctgccctgttcgtggccctgaccttcgagcggcgggaggtcctggactcctccaatatcaaaccaatgaacctgatcggcgtggcaagaggcgaaaacatccccgccgtgatcgccctgaccgaccccgagggctgcccactgagccggtttaaggatagcctgggaaacccaacccacatcctgagaatcggcgagagctataaggagaagcagcggaccatccaggccaagaaggaggtggagcagcggagagccggcggctacagccggaagtacgccagcaaagccaagaatctggcagacgatatggtgagaaacaccgctagagatctgctgtactacgccgtgacccaggatgccatgctgatcttcgccaacctgagccggggcttcggccggcagggcaagcggaccttcatggccgagagacagtacacacggatggaggactggctgaccgccaagctggcctacgagggcctgagcaagacctacctgtccaagacactggcccagtacacctccaagacatgcagcaactgtgggtttaccatcaccagcgccgactacgacagggtgctggagaagctgaagaagacagcaacaggctggatgaccacaattaacggcaaggagctgaaggtggagggccagattacctactacaacagatacaagagacagaacgtagtcaaggacctgtccgtcgagctggatagactgagcgaagaatctgtgaacaacgacatctcctcctggacaaagggcagaagcggagaagctctgagcctcctgaagaaaagattctcccatagacccgtgcaggagaagttcgtgtgcctgaactgcggcttcgagacacacgcagccgagcaagccgccctgaacatcgccagatcctggctgttcctgcggagccaggagtacaagaaataccagacaaacaagacaaccggcaacaccgataagagagccttcgtcgagacctggcagtccttttaccggaagaagcttaaggaggtgtggaaacctgccgtgcggtctggcggatctggcggaggctccagccaggagagcgtggccttcgaggacgtggccgtgtacttcaccaccaaggagtgggccatcatggtgcccgccgagagggccctgtacagggacgtgatgctggagaactacgaggccgtggccttcgtggtgccccccaccagcaagcccgccctgatcagccacctggagcagggcaaggagagctgcttcatcaggccccagggcgtgctgagcaggagcgactggagggccggcctgggcggcccaagcagcggcgcccctcctcccagcggcggcagcccagccggctccccaacctctaccgaggagggcacctctgagtccgccacccccgagagcggccctggcacctccaccgagcccagcgagggcagcgcacccggcagccctgccggcagccccacctccacagaggagggaaccagcaccgagcccagcgaaggcagcgccccaggcaccagcaccgagcctagtgagcaggagattaaacggatcaacaagatcagaagaagacttgtgaaagacagcaacaccaagaaggccggcaagacaggccccatgaaaaccctgctggttagagtgatgacacccgatctgagagagcggctggaaaacctgagaaagaagcctgaaaatatcccccagcccatcagcaatacatctagagccaacctgaataagctgctgaccgattacaccgaaatgaagaaggcgatcctgcatgtgtactgggaagagttccagaaggaccctgtgggcctgatgagccgggtggcccagcctgccagcaagaagatcgatcagaacaagctgaaacctgagatggacgagaagggcaacctgaccaccgccggctttgcctgctctcagtgtggccagcccctgttcgtgtacaagctggagcaggtgtctgagaagggcaaggcttacaccaactacttcggacggtgcaatgtggccgagcacgaaaagctgatcctgctggcccagctgaagcccgagaaggatagcgacgaagccgtgacatatagcctgggaaagtttgggcagagggccctggatttctacagcattcatgtgaccaaggagtccacccaccccgtgaagcccctggcccagatcgccggaaacagatacgcctccggacctgtgggaaaggccctgagcgacgcatgtatgggcacaatcgcctccttcctgtctaagtaccaggacatcatcatcgaacaccagaaggtggtgaagggcaaccagaagagactggagagcctgcgggagctggccggcaaggaaaacctggaataccctagcgtgaccctgccacctcagcctcacaccaaggagggcgttgatgcctacaacgaagtgatcgcccgggtgcgaatgtgggtgaacctgaacctgtggcagaagctgaagctaagcagagatgatgccaagcctctgctgagactgaagggattcccttcctttcctctggtcgagagacaggccaacgaagtggactggtgggacatggtgtgtaacgtgaagaagctgatcaacgagaaaaaggaggatggcaaggtgttttggcagaatctggctggctacaagagacaggaagccctgagaccatacctgagcagcgaggaagatcggaagaagggaaagaaattcgctcggtaccagctgggcgacctgctgctgcacctggaaaagaagcacggcgaggactggggaaaggtgtacgacgaggcctgggagcggattgacaagaaagtggaaggcctgagcaagcacatcaagctggaagaggaacggagaagcgaggacgcccagagcaaggccgccctgaccgactggctgcgggctaaggccagcttcgtgatcgagggcctgaaggaggccgacaaggacgagttctgcagatgcgagctgaagctgcagaagtggtacggggacctgcggggaaagcccttcgccatcgaagccgagaacagcatcctggacatcagcggcttcagcaagcagtacaactgtgccttcatctggcagaaggacggcgtgaagaagctgaacctgtacctgatcatcaactacttcaagggcggcaagctgcggttcaagaagatcaaacctgaagccttcgaagccaacagattctacaccgtgatcaacaaaaagagcggcgagatcgtgcccatggaggtgaacttcaacttcgacgaccccaacctgatcatcctgcctctggcctttggcaagagacagggcagagaattcatctggaacgacctgctgtccctggaaaccggcagcctgaagctggccaacggaagagtgatcgagaagacactgtacaacagaagaacccggcaggatgagcctgccctgttcgtggccctgaccttcgagcggcgggaggtcctggactcctccaatatcaaaccaatgaacctgatcggcgtggcaagaggcgaaaacatccccgccgtgatcgccctgaccgaccccgagggctgcccactgagccggtttaaggatagcctgggaaacccaacccacatcctgagaatcggcgagagctataaggagaagcagcggaccatccaggccaagaaggaggtggagcagcggagagccggcggctacagccggaagtacgccagcaaagccaagaatctggcagacgatatggtgagaaacaccgctagagatctgctgtactacgccgtgacccaggatgccatgctgatcttcgccaacctgagccggggcttcggccggcagggcaagcggaccttcatggccgagagacagtacacacggatggaggactggctgaccgccaagctggcctacgagggcctgagcaagacctacctgtccaagacactggcccagtacacctccaagacatgcagcaactgtgggtttaccatcaccagcgccgactacgacagggtgctggagaagctgaagaagacagcaacaggctggatgaccacaattaacggcaaggagctgaaggtggagggccagattacctactacaacagatacaagagacagaacgtagtcaaggacctgtccgtcgagctggatagactgagcgaagaatctgtgaacaacgacatctcctcctggacaaagggcagaagcggagaagctctgagcctcctgaagaaaagattctcccatagacccgtgcaggagaagttcgtgtgcctgaactgcggcttcgagacacacgcagccgagcaagccgccctgaacatcgccagatcctggctgttcctgcggagccaggagtacaagaaataccagacaaacaagacaaccggcaacaccgataagagagccttcgtcgagacctggcagtccttttaccggaagaagcttaaggaggtgtggaaacctgccgtgcggtctggcggatctggcggaggctcctagccaggagagcgtggccttcgaggacgtggccgtgtacttcaccaccaaggagtgggccatcatggtgcccgccgagagggccctgtacagggacgtgatgctggagaactacgaggccgtggccttcgtggtgccccccaccagcaagcccgccctgatcagccacctggagcagggcaaggagagctgcttcatcaggccccagggcgtgctgagcaggagcgactggagggccggcctgggatctggctccggcagcggccccaagaaaaagagaaaagtctaagctgccttctgcggggcttgccttctggccatgcccttcttctctcccttgcacctgtacctcttggtctttgaataaagcctgagtaggaaggctagcaaaaaaaaaaaaaaaaaaaaaaaaaaaaaaaaaaaaaaaaaaaaaaaaaaaaaaaaaaaaaaaaaaaaaaaaaaaaaaaa

SEQ ID NO: 15404 - RNA, 9485 nt, synthetic construct
  source 1..9485: mol_type = other RNA
aggaaataagagagaaaagaagagtaagaagaaatataagagccaccatggcccctaagaagaagcgtaaagtgagccggatggaacgcctcgtctacgaggtgcggcagaagtgcagaaacatcgaggacatctgcatctcctgcggatctctgaacgtgaccctggagcacccactgttcatcggcggcatgtgccagaactgtaaaaactgttttctggagtgtgcctatcaatacgacgatgacggctaccagagctactgcaccatctgttgcggcggaagagaggtgctgatgtgtggaaataacaactgctgccggtgcttctgcgtggaatgcgtggacctgctggtgggccccggcgccgcccaggccgctattaaggaagatccttggaactgctacatgtgcggccacaagggcacatacggcctgctgagacggagagaggactggcctagcagactgcagatgttcttcgccaataaccacgaccaggagttcgacccccctaaggtgtaccctcccgtccccgccgagaagagaaagcccatccgggtcctgagcctgttcgatggcatcgccaccggtctgctggtgctgaaggacctgggcatccaggtggataggtacattgcctccgaggtgtgcgaggactccatcaccgtgggaatggtgcgtcatcagggcaagatcatgtacgtgggcgacgtgcggagcgtgacacagaagcatatccaggagtggggccctttcgacctggtgatcggcggcagcccttgcaatgacctgagcatcgtgaacccagcccggaagggcctgtacgagggaaccggcagactgttcttcgagttttacagactgctgcacgacgcccggcctaaggaaggcgacgaccggcccttcttttggctgttcgagaatgtggtggccatgggagtcagcgacaagcgggatattagccggttcctggagagcaaccccgtgatgatcgatgccaaggaagtgagcgccgcccaccgggccagatacttctggggcaatctgcctggcatgaacagacccctggccagcaccgtgaacgacaagctggagctgcaggagtgcctggagcacggccggatcgccaagttcagcaaggtgagaaccatcaccacccgaagcaacagcatcaaacaaggcaaggaccagcactttcctgtgttcatgaacgagaaggaggacatcctgtggtgtaccgagatggagagagtgttcgggttcccagtccactacacagatgtcagcaacatgtctagactggccagacagagactgctgggaagaagctggtccgtccctgtgatcagacacctgttcgcccctctgaaggagtacttcgcctgcgtgagcagcggcaacagcaacgccaacagccggggccccagcttctctagcggcctggtgccactgtccctgagagggagccacatgggccccatggagatctacaaaaccgtgagcgcctggaagcggcagcctgtgcgcgtgctgagcctgtttcggaatatcgataaagtcctgaaaagcctgggattcctggagagcggctctggctccggcggtggcaccctgaagtacgtggaggatgtgacaaacgtggtcagacgggatgtggagaagtggggccccttcgatctggtgtacggcagcacccaacccctgggcagctcttgtgaccggtgccctggctggtacatgtttcagttccaccggatcctgcagtacgccctgccgagacaggagtcccagcggccattcttttggattttcatggacaacttgctgctgaccgaggatgaccaggaaactaccactcggttcctgcagaccgaagccgtgaccctgcaggacgtgagaggccgggactaccagaacgccatgcgggtgtggtccaacatccctggactgaaaagcaagcacgcacctctgacccctaaagaagaggagtacctgcaggcccaggtgcggagcagaagcaagctggacgcccctaaggtggatctgctggtgaagaattgcctcctgcccctgagagagtacttcaagtatttcagccagaatagtctgcccctgggaggcagcggcggcggcgccctggtgacatttgaggacgtcgccgtgcggttcacccaggaggaatgggctctgctggatccttctcagaaaatcctgtaccgggacgtgatgagagagacataccggaatctgacctccgtgggcatcaactgggaatgttgggaccttgaagcctgcttcagaagcctgggaagaaacctgagagtgcaggtggtgaagagaaagtgcgagctgaccaacagcggcccctgcgccgagggcggcccaagcagcggcgcccctcctcccagcggcggcagcccagccggctccccaacctctaccgaggagggcacctctgagtccgccacccccgagagcggccctggcacctccaccgagcccagcgagggcagcgcacccggcagccctgccggcagccccacctccacagaggagggaaccagcaccgagcccagcgaaggcagcgccccaggcaccagcaccgagcctagtgagcaggagattaaacggatcaacaagatcagaagaagacttgtgaaagacagcaacaccaagaaggccggcaagacaggccccatgaaaaccctgctggttagagtgatgacacccgatctgagagagcggctggaaaacctgagaaagaagcctgaaaatatcccccagcccatcagcaatacatctagagccaacctgaataagctgctgaccgattacaccgaaatgaagaaggcgatcctgcatgtgtactgggaagagttccagaaggaccctgtgggcctgatgagccgggtggcccagcctgccagcaagaagatcgatcagaacaagctgaaacctgagatggacgagaagggcaacctgaccaccgccggctttgcctgctctcagtgtggccagcccctgttcgtgtacaagctggagcaggtgtctgagaagggcaaggcttacaccaactacttcggacggtgcaatgtggccgagcacgaaaagctgatcctgctggcccagctgaagcccgagaaggatagcgacgaagccgtgacatatagcctgggaaagtttgggcagagggccctggatttctacagcattcatgtgaccaaggagtccacccaccccgtgaagcccctggcccagatcgccggaaacagatacgcctccggacctgtgggaaaggccctgagcgacgcatgtatgggcacaatcgcctccttcctgtctaagtaccaggacatcatcatcgaacaccagaaggtggtgaagggcaaccagaagagactggagagcctgcgggagctggccggcaaggaaaacctggaataccctagcgtgaccctgccacctcagcctcacaccaaggagggcgttgatgcctacaacgaagtgatcgcccgggtgcgaatgtgggtgaacctgaacctgtggcagaagctgaagctaagcagagatgatgccaagcctctgctgagactgaagggattcccttcctttcctctggtcgagagacaggccaacgaagtggactggtgggacatggtgtgtaacgtgaagaagctgatcaacgagaaaaaggaggatggcaaggtgttttggcagaatctggctggctacaagagacaggaagccctgagaccatacctgagcagcgaggaagatcggaagaagggaaagaaattcgctcggtaccagctgggcgacctgctgctgcacctggaaaagaagcacggcgaggactggggaaaggtgtacgacgaggcctgggagcggattgacaagaaagtggaaggcctgagcaagcacatcaagctggaagaggaacggagaagcgaggacgcccagagcaaggccgccctgaccgactggctgcgggctaaggccagcttcgtgatcgagggcctgaaggaggccgacaaggacgagttctgcagatgcgagctgaagctgcagaagtggtacggggacctgcggggaaagcccttcgccatcgaagccgagaacagcatcctggacatcagcggcttcagcaagcagtacaactgtgccttcatctggcagaaggacggcgtgaagaagctgaacctgtacctgatcatcaactacttcaagggcggcaagctgcggttcaagaagatcaaacctgaagccttcgaagccaacagattctacaccgtgatcaacaaaaagagcggcgagatcgtgcccatggaggtgaacttcaacttcgacgaccccaacctgatcatcctgcctctggcctttggcaagagacagggcagagaattcatctggaacgacctgctgtccctggaaaccggcagcctgaagctggccaacggaagagtgatcgagaagacactgtacaacagaagaacccggcaggatgagcctgccctgttcgtggccctgaccttcgagcggcgggaggtcctggactcctccaatatcaaaccaatgaacctgatcggcgtggcaagaggcgaaaacatccccgccgtgatcgccctgaccgaccccgagggctgcccactgagccggtttaaggatagcctgggaaacccaacccacatcctgagaatcggcgagagctataaggagaagcagcggaccatccaggccaagaaggaggtggagcagcggagagccggcggctacagccggaagtacgccagcaaagccaagaatctggcagacgatatggtgagaaacaccgctagagatctgctgtactacgccgtgacccaggatgccatgctgatcttcgccaacctgagccggggcttcggccggcagggcaagcggaccttcatggccgagagacagtacacacggatggaggactggctgaccgccaagctggcctacgagggcctgagcaagacctacctgtccaagacactggcccagtacacctccaagacatgcagcaactgtgggtttaccatcaccagcgccgactacgacagggtgctggagaagctgaagaagacagcaacaggctggatgaccacaattaacggcaaggagctgaaggtggagggccagattacctactacaacagatacaagagacagaacgtagtcaaggacctgtccgtcgagctggatagactgagcgaagaatctgtgaacaacgacatctcctcctggacaaagggcagaagcggagaagctctgagcctcctgaagaaaagattctcccatagacccgtgcaggagaagttcgtgtgcctgaactgcggcttcgagacacacgcagccgagcaagccgccctgaacatcgccagatcctggctgttcctgcggagccaggagtacaagaaataccagacaaacaagacaaccggcaacaccgataagagagccttcgtcgagacctggcagtccttttaccggaagaagcttaaggaggtgtggaaacctgccgtgcggtctggcggatctggcggaggctccagcaaggtgcccgtgaccttcggcgacctggccatctacttcagccaggaggagtgggagtggctgagccccatccagaaggacctgtacgaggacgtgatgctggagaactaccagaacctggtgagcctgggcctgagcttcaggaggcccaacgtgatcaccctgctggagaagggcaaggccccctggatcgtggagcccgtgaggaagaggaggggcgtggacagcggcagcaagagcggcggcccaagcagcggcgcccctcctcccagcggcggcagcccagccggctccccaacctctaccgaggagggcacctctgagtccgccacccccgagagcggccctggcacctccaccgagcccagcgagggcagcgcacccggcagccctgccggcagccccacctccacagaggagggaaccagcaccgagcccagcgaaggcagcgccccaggcaccagcaccgagcctagtgagcaggagattaaacggatcaacaagatcagaagaagacttgtgaaagacagcaacaccaagaaggccggcaagacaggccccatgaaaaccctgctggttagagtgatgacacccgatctgagagagcggctggaaaacctgagaaagaagcctgaaaatatcccccagcccatcagcaatacatctagagccaacctgaataagctgctgaccgattacaccgaaatgaagaaggcgatcctgcatgtgtactgggaagagttccagaaggaccctgtgggcctgatgagccgggtggcccagcctgccagcaagaagatcgatcagaacaagctgaaacctgagatggacgagaagggcaacctgaccaccgccggctttgcctgctctcagtgtggccagcccctgttcgtgtacaagctggagcaggtgtctgagaagggcaaggcttacaccaactacttcggacggtgcaatgtggccgagcacgaaaagctgatcctgctggcccagctgaagcccgagaaggatagcgacgaagccgtgacatatagcctgggaaagtttgggcagagggccctggatttctacagcattcatgtgaccaaggagtccacccaccccgtgaagcccctggcccagatcgccggaaacagatacgcctccggacctgtgggaaaggccctgagcgacgcatgtatgggcacaatcgcctccttcctgtctaagtaccaggacatcatcatcgaacaccagaaggtggtgaagggcaaccagaagagactggagagcctgcgggagctggccggcaaggaaaacctggaataccctagcgtgaccctgccacctcagcctcacaccaaggagggcgttgatgcctacaacgaagtgatcgcccgggtgcgaatgtgggtgaacctgaacctgtggcagaagctgaagctaagcagagatgatgccaagcctctgctgagactgaagggattcccttcctttcctctggtcgagagacaggccaacgaagtggactggtgggacatggtgtgtaacgtgaagaagctgatcaacgagaaaaaggaggatggcaaggtgttttggcagaatctggctggctacaagagacaggaagccctgagaccatacctgagcagcgaggaagatcggaagaagggaaagaaattcgctcggtaccagctgggcgacctgctgctgcacctggaaaagaagcacggcgaggactggggaaaggtgtacgacgaggcctgggagcggattgacaagaaagtggaaggcctgagcaagcacatcaagctggaagaggaacggagaagcgaggacgcccagagcaaggccgccctgaccgactggctgcgggctaaggccagcttcgtgatcgagggcctgaaggaggccgacaaggacgagttctgcagatgcgagctgaagctgcagaagtggtacggggacctgcggggaaagcccttcgccatcgaagccgagaacagcatcctggacatcagcggcttcagcaagcagtacaactgtgccttcatctggcagaaggacggcgtgaagaagctgaacctgtacctgatcatcaactacttcaagggcggcaagctgcggttcaagaagatcaaacctgaagccttcgaagccaacagattctacaccgtgatcaacaaaaagagcggcgagatcgtgcccatggaggtgaacttcaacttcgacgaccccaacctgatcatcctgcctctggcctttggcaagagacagggcagagaattcatctggaacgacctgctgtccctggaaaccggcagcctgaagctggccaacggaagagtgatcgagaagacactgtacaacagaagaacccggcaggatgagcctgccctgttcgtggccctgaccttcgagcggcgggaggtcctggactcctccaatatcaaaccaatgaacctgatcggcgtggcaagaggcgaaaacatccccgccgtgatcgccctgaccgaccccgagggctgcccactgagccggtttaaggatagcctgggaaacccaacccacatcctgagaatcggcgagagctataaggagaagcagcggaccatccaggccaagaaggaggtggagcagcggagagccggcggctacagccggaagtacgccagcaaagccaagaatctggcagacgatatggtgagaaacaccgctagagatctgctgtactacgccgtgacccaggatgccatgctgatcttcgccaacctgagccggggcttcggccggcagggcaagcggaccttcatggccgagagacagtacacacggatggaggactggctgaccgccaagctggcctacgagggcctgagcaagacctacctgtccaagacactggcccagtacacctccaagacatgcagcaactgtgggtttaccatcaccagcgccgactacgacagggtgctggagaagctgaagaagacagcaacaggctggatgaccacaattaacggcaaggagctgaaggtggagggccagattacctactacaacagatacaagagacagaacgtagtcaaggacctgtccgtcgagctggatagactgagcgaagaatctgtgaacaacgacatctcctcctggacaaagggcagaagcggagaagctctgagcctcctgaagaaaagattctcccatagacccgtgcaggagaagttcgtgtgcctgaactgcggcttcgagacacacgcagccgagcaagccgccctgaacatcgccagatcctggctgttcctgcggagccaggagtacaagaaataccagacaaacaagacaaccggcaacaccgataagagagccttcgtcgagacctggcagtccttttaccggaagaagcttaaggaggtgtggaaacctgccgtgcggtctggcggatctggcggaggctcctagcaaggtgcccgtgaccttcggcgacctggccatctacttcagccaggaggagtgggagtggctgagccccatccagaaggacctgtacgaggacgtgatgctggagaactaccagaacctggtgagcctgggcctgagcttcaggaggcccaacgtgatcaccctgctggagaagggcaaggccccctggatcgtggagcccgtgaggaagaggaggggcgtggacagcggcagcaagagcggatctggctccggcagcggccccaagaaaaagagaaaagtctaagctgccttctgcggggcttgccttctggccatgcccttcttctctcccttgcacctgtacctcttggtctttgaataaagcctgagtaggaaggctagcaaaaaaaaaaaaaaaaaaaaaaaaaaaaaaaaaaaaaaaaaaaaaaaaaaaaaaaaaaaaaaaaaaaaaaaaaaaaaaaa

SEQ ID NO: 15405 - RNA, 9485 nt, synthetic construct
  source 1..9485: mol_type = other RNA
aggaaataagagagaaaagaagagtaagaagaaatataagagccaccatggcccctaagaagaagcgtaaagtgagccggatggaacgcctcgtctacgaggtgcggcagaagtgcagaaacatcgaggacatctgcatctcctgcggatctctgaacgtgaccctggagcacccactgttcatcggcggcatgtgccagaactgtaaaaactgttttctggagtgtgcctatcaatacgacgatgacggctaccagagctactgcaccatctgttgcggcggaagagaggtgctgatgtgtggaaataacaactgctgccggtgcttctgcgtggaatgcgtggacctgctggtgggccccggcgccgcccaggccgctattaaggaagatccttggaactgctacatgtgcggccacaagggcacatacggcctgctgagacggagagaggactggcctagcagactgcagatgttcttcgccaataaccacgaccaggagttcgacccccctaaggtgtaccctcccgtccccgccgagaagagaaagcccatccgggtcctgagcctgttcgatggcatcgccaccggtctgctggtgctgaaggacctgggcatccaggtggataggtacattgcctccgaggtgtgcgaggactccatcaccgtgggaatggtgcgtcatcagggcaagatcatgtacgtgggcgacgtgcggagcgtgacacagaagcatatccaggagtggggccctttcgacctggtgatcggcggcagcccttgcaatgacctgagcatcgtgaacccagcccggaagggcctgtacgagggaaccggcagactgttcttcgagttttacagactgctgcacgacgcccggcctaaggaaggcgacgaccggcccttcttttggctgttcgagaatgtggtggccatgggagtcagcgacaagcgggatattagccggttcctggagagcaaccccgtgatgatcgatgccaaggaagtgagcgccgcccaccgggccagatacttctggggcaatctgcctggcatgaacagacccctggccagcaccgtgaacgacaagctggagctgcaggagtgcctggagcacggccggatcgccaagttcagcaaggtgagaaccatcaccacccgaagcaacagcatcaaacaaggcaaggaccagcactttcctgtgttcatgaacgagaaggaggacatcctgtggtgtaccgagatggagagagtgttcgggttcccagtccactacacagatgtcagcaacatgtctagactggccagacagagactgctgggaagaagctggtccgtccctgtgatcagacacctgttcgcccctctgaaggagtacttcgcctgcgtgagcagcggcaacagcaacgccaacagccggggccccagcttctctagcggcctggtgccactgtccctgagagggagccacatgggccccatggagatctacaaaaccgtgagcgcctggaagcggcagcctgtgcgcgtgctgagcctgtttcggaatatcgataaagtcctgaaaagcctgggattcctggagagcggctctggctccggcggtggcaccctgaagtacgtggaggatgtgacaaacgtggtcagacgggatgtggagaagtggggccccttcgatctggtgtacggcagcacccaacccctgggcagctcttgtgaccggtgccctggctggtacatgtttcagttccaccggatcctgcagtacgccctgccgagacaggagtcccagcggccattcttttggattttcatggacaacttgctgctgaccgaggatgaccaggaaactaccactcggttcctgcagaccgaagccgtgaccctgcaggacgtgagaggccgggactaccagaacgccatgcgggtgtggtccaacatccctggactgaaaagcaagcacgcacctctgacccctaaagaagaggagtacctgcaggcccaggtgcggagcagaagcaagctggacgcccctaaggtggatctgctggtgaagaattgcctcctgcccctgagagagtacttcaagtatttcagccagaatagtctgcccctgggaggcagcggcggcggcgccctggtgacatttgaggacgtcgccgtgcggttcacccaggaggaatgggctctgctggatccttctcagaaaatcctgtaccgggacgtgatgagagagacataccggaatctgacctccgtgggcatcaactgggaatgttgggaccttgaagcctgcttcagaagcctgggaagaaacctgagagtgcaggtggtgaagagaaagtgcgagctgaccaacagcggcccctgcgccgagggcggcccaagcagcggcgcccctcctcccagcggcggcagcccagccggctccccaacctctaccgaggagggcacctctgagtccgccacccccgagagcggccctggcacctccaccgagcccagcgagggcagcgcacccggcagccctgccggcagccccacctccacagaggagggaaccagcaccgagcccagcgaaggcagcgccccaggcaccagcaccgagcctagtgagcaggagattaaacggatcaacaagatcagaagaagacttgtgaaagacagcaacaccaagaaggccggcaagacaggccccatgaaaaccctgctggttagagtgatgacacccgatctgagagagcggctggaaaacctgagaaagaagcctgaaaatatcccccagcccatcagcaatacatctagagccaacctgaataagctgctgaccgattacaccgaaatgaagaaggcgatcctgcatgtgtactgggaagagttccagaaggaccctgtgggcctgatgagccgggtggcccagcctgccagcaagaagatcgatcagaacaagctgaaacctgagatggacgagaagggcaacctgaccaccgccggctttgcctgctctcagtgtggccagcccctgttcgtgtacaagctggagcaggtgtctgagaagggcaaggcttacaccaactacttcggacggtgcaatgtggccgagcacgaaaagctgatcctgctggcccagctgaagcccgagaaggatagcgacgaagccgtgacatatagcctgggaaagtttgggcagagggccctggatttctacagcattcatgtgaccaaggagtccacccaccccgtgaagcccctggcccagatcgccggaaacagatacgcctccggacctgtgggaaaggccctgagcgacgcatgtatgggcacaatcgcctccttcctgtctaagtaccaggacatcatcatcgaacaccagaaggtggtgaagggcaaccagaagagactggagagcctgcgggagctggccggcaaggaaaacctggaataccctagcgtgaccctgccacctcagcctcacaccaaggagggcgttgatgcctacaacgaagtgatcgcccgggtgcgaatgtgggtgaacctgaacctgtggcagaagctgaagctaagcagagatgatgccaagcctctgctgagactgaagggattcccttcctttcctctggtcgagagacaggccaacgaagtggactggtgggacatggtgtgtaacgtgaagaagctgatcaacgagaaaaaggaggatggcaaggtgttttggcagaatctggctggctacaagagacaggaagccctgagaccatacctgagcagcgaggaagatcggaagaagggaaagaaattcgctcggtaccagctgggcgacctgctgctgcacctggaaaagaagcacggcgaggactggggaaaggtgtacgacgaggcctgggagcggattgacaagaaagtggaaggcctgagcaagcacatcaagctggaagaggaacggagaagcgaggacgcccagagcaaggccgccctgaccgactggctgcgggctaaggccagcttcgtgatcgagggcctgaaggaggccgacaaggacgagttctgcagatgcgagctgaagctgcagaagtggtacggggacctgcggggaaagcccttcgccatcgaagccgagaacagcatcctggacatcagcggcttcagcaagcagtacaactgtgccttcatctggcagaaggacggcgtgaagaagctgaacctgtacctgatcatcaactacttcaagggcggcaagctgcggttcaagaagatcaaacctgaagccttcgaagccaacagattctacaccgtgatcaacaaaaagagcggcgagatcgtgcccatggaggtgaacttcaacttcgacgaccccaacctgatcatcctgcctctggcctttggcaagagacagggcagagaattcatctggaacgacctgctgtccctggaaaccggcagcctgaagctggccaacggaagagtgatcgagaagacactgtacaacagaagaacccggcaggatgagcctgccctgttcgtggccctgaccttcgagcggcgggaggtcctggactcctccaatatcaaaccaatgaacctgatcggcgtggcaagaggcgaaaacatccccgccgtgatcgccctgaccgaccccgagggctgcccactgagccggtttaaggatagcctgggaaacccaacccacatcctgagaatcggcgagagctataaggagaagcagcggaccatccaggccaagaaggaggtggagcagcggagagccggcggctacagccggaagtacgccagcaaagccaagaatctggcagacgatatggtgagaaacaccgctagagatctgctgtactacgccgtgacccaggatgccatgctgatcttcgccaacctgagccggggcttcggccggcagggcaagcggaccttcatggccgagagacagtacacacggatggaggactggctgaccgccaagctggcctacgagggcctgagcaagacctacctgtccaagacactggcccagtacacctccaagacatgcagcaactgtgggtttaccatcaccagcgccgactacgacagggtgctggagaagctgaagaagacagcaacaggctggatgaccacaattaacggcaaggagctgaaggtggagggccagattacctactacaacagatacaagagacagaacgtagtcaaggacctgtccgtcgagctggatagactgagcgaagaatctgtgaacaacgacatctcctcctggacaaagggcagaagcggagaagctctgagcctcctgaagaaaagattctcccatagacccgtgcaggagaagttcgtgtgcctgaactgcggcttcgagacacacgcagccgagcaagccgccctgaacatcgccagatcctggctgttcctgcggagccaggagtacaagaaataccagacaaacaagacaaccggcaacaccgataagagagccttcgtcgagacctggcagtccttttaccggaagaagcttaaggaggtgtggaaacctgccgtgcggtctggcggatctggcggaggctccaagcccggcgccgtgagcttcgccgacgtggccgtgtacttcagccccgaggagtggggctgcctgaggcccgcccagagggccctgtacagggacgtgatgagggagacctacggccacctgggcgccctgggcttccccggccccaagcccgccctgatcagctggatggagcaggagagcgaggcctggagcagcgccgcccaggaccccgagaacggcgagagcctgggcggcgccaggggcggcccaagcagcggcgcccctcctcccagcggcggcagcccagccggctccccaacctctaccgaggagggcacctctgagtccgccacccccgagagcggccctggcacctccaccgagcccagcgagggcagcgcacccggcagccctgccggcagccccacctccacagaggagggaaccagcaccgagcccagcgaaggcagcgccccaggcaccagcaccgagcctagtgagcaggagattaaacggatcaacaagatcagaagaagacttgtgaaagacagcaacaccaagaaggccggcaagacaggccccatgaaaaccctgctggttagagtgatgacacccgatctgagagagcggctggaaaacctgagaaagaagcctgaaaatatcccccagcccatcagcaatacatctagagccaacctgaataagctgctgaccgattacaccgaaatgaagaaggcgatcctgcatgtgtactgggaagagttccagaaggaccctgtgggcctgatgagccgggtggcccagcctgccagcaagaagatcgatcagaacaagctgaaacctgagatggacgagaagggcaacctgaccaccgccggctttgcctgctctcagtgtggccagcccctgttcgtgtacaagctggagcaggtgtctgagaagggcaaggcttacaccaactacttcggacggtgcaatgtggccgagcacgaaaagctgatcctgctggcccagctgaagcccgagaaggatagcgacgaagccgtgacatatagcctgggaaagtttgggcagagggccctggatttctacagcattcatgtgaccaaggagtccacccaccccgtgaagcccctggcccagatcgccggaaacagatacgcctccggacctgtgggaaaggccctgagcgacgcatgtatgggcacaatcgcctccttcctgtctaagtaccaggacatcatcatcgaacaccagaaggtggtgaagggcaaccagaagagactggagagcctgcgggagctggccggcaaggaaaacctggaataccctagcgtgaccctgccacctcagcctcacaccaaggagggcgttgatgcctacaacgaagtgatcgcccgggtgcgaatgtgggtgaacctgaacctgtggcagaagctgaagctaagcagagatgatgccaagcctctgctgagactgaagggattcccttcctttcctctggtcgagagacaggccaacgaagtggactggtgggacatggtgtgtaacgtgaagaagctgatcaacgagaaaaaggaggatggcaaggtgttttggcagaatctggctggctacaagagacaggaagccctgagaccatacctgagcagcgaggaagatcggaagaagggaaagaaattcgctcggtaccagctgggcgacctgctgctgcacctggaaaagaagcacggcgaggactggggaaaggtgtacgacgaggcctgggagcggattgacaagaaagtggaaggcctgagcaagcacatcaagctggaagaggaacggagaagcgaggacgcccagagcaaggccgccctgaccgactggctgcgggctaaggccagcttcgtgatcgagggcctgaaggaggccgacaaggacgagttctgcagatgcgagctgaagctgcagaagtggtacggggacctgcggggaaagcccttcgccatcgaagccgagaacagcatcctggacatcagcggcttcagcaagcagtacaactgtgccttcatctggcagaaggacggcgtgaagaagctgaacctgtacctgatcatcaactacttcaagggcggcaagctgcggttcaagaagatcaaacctgaagccttcgaagccaacagattctacaccgtgatcaacaaaaagagcggcgagatcgtgcccatggaggtgaacttcaacttcgacgaccccaacctgatcatcctgcctctggcctttggcaagagacagggcagagaattcatctggaacgacctgctgtccctggaaaccggcagcctgaagctggccaacggaagagtgatcgagaagacactgtacaacagaagaacccggcaggatgagcctgccctgttcgtggccctgaccttcgagcggcgggaggtcctggactcctccaatatcaaaccaatgaacctgatcggcgtggcaagaggcgaaaacatccccgccgtgatcgccctgaccgaccccgagggctgcccactgagccggtttaaggatagcctgggaaacccaacccacatcctgagaatcggcgagagctataaggagaagcagcggaccatccaggccaagaaggaggtggagcagcggagagccggcggctacagccggaagtacgccagcaaagccaagaatctggcagacgatatggtgagaaacaccgctagagatctgctgtactacgccgtgacccaggatgccatgctgatcttcgccaacctgagccggggcttcggccggcagggcaagcggaccttcatggccgagagacagtacacacggatggaggactggctgaccgccaagctggcctacgagggcctgagcaagacctacctgtccaagacactggcccagtacacctccaagacatgcagcaactgtgggtttaccatcaccagcgccgactacgacagggtgctggagaagctgaagaagacagcaacaggctggatgaccacaattaacggcaaggagctgaaggtggagggccagattacctactacaacagatacaagagacagaacgtagtcaaggacctgtccgtcgagctggatagactgagcgaagaatctgtgaacaacgacatctcctcctggacaaagggcagaagcggagaagctctgagcctcctgaagaaaagattctcccatagacccgtgcaggagaagttcgtgtgcctgaactgcggcttcgagacacacgcagccgagcaagccgccctgaacatcgccagatcctggctgttcctgcggagccaggagtacaagaaataccagacaaacaagacaaccggcaacaccgataagagagccttcgtcgagacctggcagtccttttaccggaagaagcttaaggaggtgtggaaacctgccgtgcggtctggcggatctggcggaggctcctaagcccggcgccgtgagcttcgccgacgtggccgtgtacttcagccccgaggagtggggctgcctgaggcccgcccagagggccctgtacagggacgtgatgagggagacctacggccacctgggcgccctgggcttccccggccccaagcccgccctgatcagctggatggagcaggagagcgaggcctggagcagcgccgcccaggaccccgagaacggcgagagcctgggcggcgccaggggatctggctccggcagcggccccaagaaaaagagaaaagtctaagctgccttctgcggggcttgccttctggccatgcccttcttctctcccttgcacctgtacctcttggtctttgaataaagcctgagtaggaaggctagcaaaaaaaaaaaaaaaaaaaaaaaaaaaaaaaaaaaaaaaaaaaaaaaaaaaaaaaaaaaaaaaaaaaaaaaaaaaaaaaa

SEQ ID NO: 15406 - RNA, 9485 nt, synthetic construct
  source 1..9485: mol_type = other RNA
aggaaataagagagaaaagaagagtaagaagaaatataagagccaccatggcccctaagaagaagcgtaaagtgagccggatggaacgcctcgtctacgaggtgcggcagaagtgcagaaacatcgaggacatctgcatctcctgcggatctctgaacgtgaccctggagcacccactgttcatcggcggcatgtgccagaactgtaaaaactgttttctggagtgtgcctatcaatacgacgatgacggctaccagagctactgcaccatctgttgcggcggaagagaggtgctgatgtgtggaaataacaactgctgccggtgcttctgcgtggaatgcgtggacctgctggtgggccccggcgccgcccaggccgctattaaggaagatccttggaactgctacatgtgcggccacaagggcacatacggcctgctgagacggagagaggactggcctagcagactgcagatgttcttcgccaataaccacgaccaggagttcgacccccctaaggtgtaccctcccgtccccgccgagaagagaaagcccatccgggtcctgagcctgttcgatggcatcgccaccggtctgctggtgctgaaggacctgggcatccaggtggataggtacattgcctccgaggtgtgcgaggactccatcaccgtgggaatggtgcgtcatcagggcaagatcatgtacgtgggcgacgtgcggagcgtgacacagaagcatatccaggagtggggccctttcgacctggtgatcggcggcagcccttgcaatgacctgagcatcgtgaacccagcccggaagggcctgtacgagggaaccggcagactgttcttcgagttttacagactgctgcacgacgcccggcctaaggaaggcgacgaccggcccttcttttggctgttcgagaatgtggtggccatgggagtcagcgacaagcgggatattagccggttcctggagagcaaccccgtgatgatcgatgccaaggaagtgagcgccgcccaccgggccagatacttctggggcaatctgcctggcatgaacagacccctggccagcaccgtgaacgacaagctggagctgcaggagtgcctggagcacggccggatcgccaagttcagcaaggtgagaaccatcaccacccgaagcaacagcatcaaacaaggcaaggaccagcactttcctgtgttcatgaacgagaaggaggacatcctgtggtgtaccgagatggagagagtgttcgggttcccagtccactacacagatgtcagcaacatgtctagactggccagacagagactgctgggaagaagctggtccgtccctgtgatcagacacctgttcgcccctctgaaggagtacttcgcctgcgtgagcagcggcaacagcaacgccaacagccggggccccagcttctctagcggcctggtgccactgtccctgagagggagccacatgggccccatggagatctacaaaaccgtgagcgcctggaagcggcagcctgtgcgcgtgctgagcctgtttcggaatatcgataaagtcctgaaaagcctgggattcctggagagcggctctggctccggcggtggcaccctgaagtacgtggaggatgtgacaaacgtggtcagacgggatgtggagaagtggggccccttcgatctggtgtacggcagcacccaacccctgggcagctcttgtgaccggtgccctggctggtacatgtttcagttccaccggatcctgcagtacgccctgccgagacaggagtcccagcggccattcttttggattttcatggacaacttgctgctgaccgaggatgaccaggaaactaccactcggttcctgcagaccgaagccgtgaccctgcaggacgtgagaggccgggactaccagaacgccatgcgggtgtggtccaacatccctggactgaaaagcaagcacgcacctctgacccctaaagaagaggagtacctgcaggcccaggtgcggagcagaagcaagctggacgcccctaaggtggatctgctggtgaagaattgcctcctgcccctgagagagtacttcaagtatttcagccagaatagtctgcccctgggaggcagcggcggcggcgccctggtgacatttgaggacgtcgccgtgcggttcacccaggaggaatgggctctgctggatccttctcagaaaatcctgtaccgggacgtgatgagagagacataccggaatctgacctccgtgggcatcaactgggaatgttgggaccttgaagcctgcttcagaagcctgggaagaaacctgagagtgcaggtggtgaagagaaagtgcgagctgaccaacagcggcccctgcgccgagggcggcccaagcagcggcgcccctcctcccagcggcggcagcccagccggctccccaacctctaccgaggagggcacctctgagtccgccacccccgagagcggccctggcacctccaccgagcccagcgagggcagcgcacccggcagccctgccggcagccccacctccacagaggagggaaccagcaccgagcccagcgaaggcagcgccccaggcaccagcaccgagcctagtgagcaggagattaaacggatcaacaagatcagaagaagacttgtgaaagacagcaacaccaagaaggccggcaagacaggccccatgaaaaccctgctggttagagtgatgacacccgatctgagagagcggctggaaaacctgagaaagaagcctgaaaatatcccccagcccatcagcaatacatctagagccaacctgaataagctgctgaccgattacaccgaaatgaagaaggcgatcctgcatgtgtactgggaagagttccagaaggaccctgtgggcctgatgagccgggtggcccagcctgccagcaagaagatcgatcagaacaagctgaaacctgagatggacgagaagggcaacctgaccaccgccggctttgcctgctctcagtgtggccagcccctgttcgtgtacaagctggagcaggtgtctgagaagggcaaggcttacaccaactacttcggacggtgcaatgtggccgagcacgaaaagctgatcctgctggcccagctgaagcccgagaaggatagcgacgaagccgtgacatatagcctgggaaagtttgggcagagggccctggatttctacagcattcatgtgaccaaggagtccacccaccccgtgaagcccctggcccagatcgccggaaacagatacgcctccggacctgtgggaaaggccctgagcgacgcatgtatgggcacaatcgcctccttcctgtctaagtaccaggacatcatcatcgaacaccagaaggtggtgaagggcaaccagaagagactggagagcctgcgggagctggccggcaaggaaaacctggaataccctagcgtgaccctgccacctcagcctcacaccaaggagggcgttgatgcctacaacgaagtgatcgcccgggtgcgaatgtgggtgaacctgaacctgtggcagaagctgaagctaagcagagatgatgccaagcctctgctgagactgaagggattcccttcctttcctctggtcgagagacaggccaacgaagtggactggtgggacatggtgtgtaacgtgaagaagctgatcaacgagaaaaaggaggatggcaaggtgttttggcagaatctggctggctacaagagacaggaagccctgagaccatacctgagcagcgaggaagatcggaagaagggaaagaaattcgctcggtaccagctgggcgacctgctgctgcacctggaaaagaagcacggcgaggactggggaaaggtgtacgacgaggcctgggagcggattgacaagaaagtggaaggcctgagcaagcacatcaagctggaagaggaacggagaagcgaggacgcccagagcaaggccgccctgaccgactggctgcgggctaaggccagcttcgtgatcgagggcctgaaggaggccgacaaggacgagttctgcagatgcgagctgaagctgcagaagtggtacggggacctgcggggaaagcccttcgccatcgaagccgagaacagcatcctggacatcagcggcttcagcaagcagtacaactgtgccttcatctggcagaaggacggcgtgaagaagctgaacctgtacctgatcatcaactacttcaagggcggcaagctgcggttcaagaagatcaaacctgaagccttcgaagccaacagattctacaccgtgatcaacaaaaagagcggcgagatcgtgcccatggaggtgaacttcaacttcgacgaccccaacctgatcatcctgcctctggcctttggcaagagacagggcagagaattcatctggaacgacctgctgtccctggaaaccggcagcctgaagctggccaacggaagagtgatcgagaagacactgtacaacagaagaacccggcaggatgagcctgccctgttcgtggccctgaccttcgagcggcgggaggtcctggactcctccaatatcaaaccaatgaacctgatcggcgtggcaagaggcgaaaacatccccgccgtgatcgccctgaccgaccccgagggctgcccactgagccggtttaaggatagcctgggaaacccaacccacatcctgagaatcggcgagagctataaggagaagcagcggaccatccaggccaagaaggaggtggagcagcggagagccggcggctacagccggaagtacgccagcaaagccaagaatctggcagacgatatggtgagaaacaccgctagagatctgctgtactacgccgtgacccaggatgccatgctgatcttcgccaacctgagccggggcttcggccggcagggcaagcggaccttcatggccgagagacagtacacacggatggaggactggctgaccgccaagctggcctacgagggcctgagcaagacctacctgtccaagacactggcccagtacacctccaagacatgcagcaactgtgggtttaccatcaccagcgccgactacgacagggtgctggagaagctgaagaagacagcaacaggctggatgaccacaattaacggcaaggagctgaaggtggagggccagattacctactacaacagatacaagagacagaacgtagtcaaggacctgtccgtcgagctggatagactgagcgaagaatctgtgaacaacgacatctcctcctggacaaagggcagaagcggagaagctctgagcctcctgaagaaaagattctcccatagacccgtgcaggagaagttcgtgtgcctgaactgcggcttcgagacacacgcagccgagcaagccgccctgaacatcgccagatcctggctgttcctgcggagccaggagtacaagaaataccagacaaacaagacaaccggcaacaccgataagagagccttcgtcgagacctggcagtccttttaccggaagaagcttaaggaggtgtggaaacctgccgtgcggtctggcggatctggcggaggctccgtgaggatgcccgtgaccttcgaggacgtggccgtgaccttcacccaggaggagtggggccagctggaccccgcccagaggaccctgtaccaggaggtgatgctggagacctgcggcctgctggtgagcctgggctgccccctgcccaagcccgagctgttctaccccctggaccacagccccgagctgcagaccctgaagaggggcctgagccccaacagctgccccggcgacagcaccaagggcggcccaagcagcggcgcccctcctcccagcggcggcagcccagccggctccccaacctctaccgaggagggcacctctgagtccgccacccccgagagcggccctggcacctccaccgagcccagcgagggcagcgcacccggcagccctgccggcagccccacctccacagaggagggaaccagcaccgagcccagcgaaggcagcgccccaggcaccagcaccgagcctagtgagcaggagattaaacggatcaacaagatcagaagaagacttgtgaaagacagcaacaccaagaaggccggcaagacaggccccatgaaaaccctgctggttagagtgatgacacccgatctgagagagcggctggaaaacctgagaaagaagcctgaaaatatcccccagcccatcagcaatacatctagagccaacctgaataagctgctgaccgattacaccgaaatgaagaaggcgatcctgcatgtgtactgggaagagttccagaaggaccctgtgggcctgatgagccgggtggcccagcctgccagcaagaagatcgatcagaacaagctgaaacctgagatggacgagaagggcaacctgaccaccgccggctttgcctgctctcagtgtggccagcccctgttcgtgtacaagctggagcaggtgtctgagaagggcaaggcttacaccaactacttcggacggtgcaatgtggccgagcacgaaaagctgatcctgctggcccagctgaagcccgagaaggatagcgacgaagccgtgacatatagcctgggaaagtttgggcagagggccctggatttctacagcattcatgtgaccaaggagtccacccaccccgtgaagcccctggcccagatcgccggaaacagatacgcctccggacctgtgggaaaggccctgagcgacgcatgtatgggcacaatcgcctccttcctgtctaagtaccaggacatcatcatcgaacaccagaaggtggtgaagggcaaccagaagagactggagagcctgcgggagctggccggcaaggaaaacctggaataccctagcgtgaccctgccacctcagcctcacaccaaggagggcgttgatgcctacaacgaagtgatcgcccgggtgcgaatgtgggtgaacctgaacctgtggcagaagctgaagctaagcagagatgatgccaagcctctgctgagactgaagggattcccttcctttcctctggtcgagagacaggccaacgaagtggactggtgggacatggtgtgtaacgtgaagaagctgatcaacgagaaaaaggaggatggcaaggtgttttggcagaatctggctggctacaagagacaggaagccctgagaccatacctgagcagcgaggaagatcggaagaagggaaagaaattcgctcggtaccagctgggcgacctgctgctgcacctggaaaagaagcacggcgaggactggggaaaggtgtacgacgaggcctgggagcggattgacaagaaagtggaaggcctgagcaagcacatcaagctggaagaggaacggagaagcgaggacgcccagagcaaggccgccctgaccgactggctgcgggctaaggccagcttcgtgatcgagggcctgaaggaggccgacaaggacgagttctgcagatgcgagctgaagctgcagaagtggtacggggacctgcggggaaagcccttcgccatcgaagccgagaacagcatcctggacatcagcggcttcagcaagcagtacaactgtgccttcatctggcagaaggacggcgtgaagaagctgaacctgtacctgatcatcaactacttcaagggcggcaagctgcggttcaagaagatcaaacctgaagccttcgaagccaacagattctacaccgtgatcaacaaaaagagcggcgagatcgtgcccatggaggtgaacttcaacttcgacgaccccaacctgatcatcctgcctctggcctttggcaagagacagggcagagaattcatctggaacgacctgctgtccctggaaaccggcagcctgaagctggccaacggaagagtgatcgagaagacactgtacaacagaagaacccggcaggatgagcctgccctgttcgtggccctgaccttcgagcggcgggaggtcctggactcctccaatatcaaaccaatgaacctgatcggcgtggcaagaggcgaaaacatccccgccgtgatcgccctgaccgaccccgagggctgcccactgagccggtttaaggatagcctgggaaacccaacccacatcctgagaatcggcgagagctataaggagaagcagcggaccatccaggccaagaaggaggtggagcagcggagagccggcggctacagccggaagtacgccagcaaagccaagaatctggcagacgatatggtgagaaacaccgctagagatctgctgtactacgccgtgacccaggatgccatgctgatcttcgccaacctgagccggggcttcggccggcagggcaagcggaccttcatggccgagagacagtacacacggatggaggactggctgaccgccaagctggcctacgagggcctgagcaagacctacctgtccaagacactggcccagtacacctccaagacatgcagcaactgtgggtttaccatcaccagcgccgactacgacagggtgctggagaagctgaagaagacagcaacaggctggatgaccacaattaacggcaaggagctgaaggtggagggccagattacctactacaacagatacaagagacagaacgtagtcaaggacctgtccgtcgagctggatagactgagcgaagaatctgtgaacaacgacatctcctcctggacaaagggcagaagcggagaagctctgagcctcctgaagaaaagattctcccatagacccgtgcaggagaagttcgtgtgcctgaactgcggcttcgagacacacgcagccgagcaagccgccctgaacatcgccagatcctggctgttcctgcggagccaggagtacaagaaataccagacaaacaagacaaccggcaacaccgataagagagccttcgtcgagacctggcagtccttttaccggaagaagcttaaggaggtgtggaaacctgccgtgcggtctggcggatctggcggaggctcctgtgaggatgcccgtgaccttcgaggacgtggccgtgaccttcacccaggaggagtggggccagctggaccccgcccagaggaccctgtaccaggaggtgatgctggagacctgcggcctgctggtgagcctgggctgccccctgcccaagcccgagctgttctaccccctggaccacagccccgagctgcagaccctgaagaggggcctgagccccaacagctgccccggcgacagcaccaagggatctggctccggcagcggccccaagaaaaagagaaaagtctaagctgccttctgcggggcttgccttctggccatgcccttcttctctcccttgcacctgtacctcttggtctttgaataaagcctgagtaggaaggctagcaaaaaaaaaaaaaaaaaaaaaaaaaaaaaaaaaaaaaaaaaaaaaaaaaaaaaaaaaaaaaaaaaaaaaaaaaaaaaaaa

SEQ ID NO: 15407 - RNA, 9485 nt, synthetic construct
  source 1..9485: mol_type = other RNA
aggaaataagagagaaaagaagagtaagaagaaatataagagccaccatggcccctaagaagaagcgtaaagtgagccggatggaacgcctcgtctacgaggtgcggcagaagtgcagaaacatcgaggacatctgcatctcctgcggatctctgaacgtgaccctggagcacccactgttcatcggcggcatgtgccagaactgtaaaaactgttttctggagtgtgcctatcaatacgacgatgacggctaccagagctactgcaccatctgttgcggcggaagagaggtgctgatgtgtggaaataacaactgctgccggtgcttctgcgtggaatgcgtggacctgctggtgggccccggcgccgcccaggccgctattaaggaagatccttggaactgctacatgtgcggccacaagggcacatacggcctgctgagacggagagaggactggcctagcagactgcagatgttcttcgccaataaccacgaccaggagttcgacccccctaaggtgtaccctcccgtccccgccgagaagagaaagcccatccgggtcctgagcctgttcgatggcatcgccaccggtctgctggtgctgaaggacctgggcatccaggtggataggtacattgcctccgaggtgtgcgaggactccatcaccgtgggaatggtgcgtcatcagggcaagatcatgtacgtgggcgacgtgcggagcgtgacacagaagcatatccaggagtggggccctttcgacctggtgatcggcggcagcccttgcaatgacctgagcatcgtgaacccagcccggaagggcctgtacgagggaaccggcagactgttcttcgagttttacagactgctgcacgacgcccggcctaaggaaggcgacgaccggcccttcttttggctgttcgagaatgtggtggccatgggagtcagcgacaagcgggatattagccggttcctggagagcaaccccgtgatgatcgatgccaaggaagtgagcgccgcccaccgggccagatacttctggggcaatctgcctggcatgaacagacccctggccagcaccgtgaacgacaagctggagctgcaggagtgcctggagcacggccggatcgccaagttcagcaaggtgagaaccatcaccacccgaagcaacagcatcaaacaaggcaaggaccagcactttcctgtgttcatgaacgagaaggaggacatcctgtggtgtaccgagatggagagagtgttcgggttcccagtccactacacagatgtcagcaacatgtctagactggccagacagagactgctgggaagaagctggtccgtccctgtgatcagacacctgttcgcccctctgaaggagtacttcgcctgcgtgagcagcggcaacagcaacgccaacagccggggccccagcttctctagcggcctggtgccactgtccctgagagggagccacatgggccccatggagatctacaaaaccgtgagcgcctggaagcggcagcctgtgcgcgtgctgagcctgtttcggaatatcgataaagtcctgaaaagcctgggattcctggagagcggctctggctccggcggtggcaccctgaagtacgtggaggatgtgacaaacgtggtcagacgggatgtggagaagtggggccccttcgatctggtgtacggcagcacccaacccctgggcagctcttgtgaccggtgccctggctggtacatgtttcagttccaccggatcctgcagtacgccctgccgagacaggagtcccagcggccattcttttggattttcatggacaacttgctgctgaccgaggatgaccaggaaactaccactcggttcctgcagaccgaagccgtgaccctgcaggacgtgagaggccgggactaccagaacgccatgcgggtgtggtccaacatccctggactgaaaagcaagcacgcacctctgacccctaaagaagaggagtacctgcaggcccaggtgcggagcagaagcaagctggacgcccctaaggtggatctgctggtgaagaattgcctcctgcccctgagagagtacttcaagtatttcagccagaatagtctgcccctgggaggcagcggcggcggcgccctggtgacatttgaggacgtcgccgtgcggttcacccaggaggaatgggctctgctggatccttctcagaaaatcctgtaccgggacgtgatgagagagacataccggaatctgacctccgtgggcatcaactgggaatgttgggaccttgaagcctgcttcagaagcctgggaagaaacctgagagtgcaggtggtgaagagaaagtgcgagctgaccaacagcggcccctgcgccgagggcggcccaagcagcggcgcccctcctcccagcggcggcagcccagccggctccccaacctctaccgaggagggcacctctgagtccgccacccccgagagcggccctggcacctccaccgagcccagcgagggcagcgcacccggcagccctgccggcagccccacctccacagaggagggaaccagcaccgagcccagcgaaggcagcgccccaggcaccagcaccgagcctagtgagcaggagattaaacggatcaacaagatcagaagaagacttgtgaaagacagcaacaccaagaaggccggcaagacaggccccatgaaaaccctgctggttagagtgatgacacccgatctgagagagcggctggaaaacctgagaaagaagcctgaaaatatcccccagcccatcagcaatacatctagagccaacctgaataagctgctgaccgattacaccgaaatgaagaaggcgatcctgcatgtgtactgggaagagttccagaaggaccctgtgggcctgatgagccgggtggcccagcctgccagcaagaagatcgatcagaacaagctgaaacctgagatggacgagaagggcaacctgaccaccgccggctttgcctgctctcagtgtggccagcccctgttcgtgtacaagctggagcaggtgtctgagaagggcaaggcttacaccaactacttcggacggtgcaatgtggccgagcacgaaaagctgatcctgctggcccagctgaagcccgagaaggatagcgacgaagccgtgacatatagcctgggaaagtttgggcagagggccctggatttctacagcattcatgtgaccaaggagtccacccaccccgtgaagcccctggcccagatcgccggaaacagatacgcctccggacctgtgggaaaggccctgagcgacgcatgtatgggcacaatcgcctccttcctgtctaagtaccaggacatcatcatcgaacaccagaaggtggtgaagggcaaccagaagagactggagagcctgcgggagctggccggcaaggaaaacctggaataccctagcgtgaccctgccacctcagcctcacaccaaggagggcgttgatgcctacaacgaagtgatcgcccgggtgcgaatgtgggtgaacctgaacctgtggcagaagctgaagctaagcagagatgatgccaagcctctgctgagactgaagggattcccttcctttcctctggtcgagagacaggccaacgaagtggactggtgggacatggtgtgtaacgtgaagaagctgatcaacgagaaaaaggaggatggcaaggtgttttggcagaatctggctggctacaagagacaggaagccctgagaccatacctgagcagcgaggaagatcggaagaagggaaagaaattcgctcggtaccagctgggcgacctgctgctgcacctggaaaagaagcacggcgaggactggggaaaggtgtacgacgaggcctgggagcggattgacaagaaagtggaaggcctgagcaagcacatcaagctggaagaggaacggagaagcgaggacgcccagagcaaggccgccctgaccgactggctgcgggctaaggccagcttcgtgatcgagggcctgaaggaggccgacaaggacgagttctgcagatgcgagctgaagctgcagaagtggtacggggacctgcggggaaagcccttcgccatcgaagccgagaacagcatcctggacatcagcggcttcagcaagcagtacaactgtgccttcatctggcagaaggacggcgtgaagaagctgaacctgtacctgatcatcaactacttcaagggcggcaagctgcggttcaagaagatcaaacctgaagccttcgaagccaacagattctacaccgtgatcaacaaaaagagcggcgagatcgtgcccatggaggtgaacttcaacttcgacgaccccaacctgatcatcctgcctctggcctttggcaagagacagggcagagaattcatctggaacgacctgctgtccctggaaaccggcagcctgaagctggccaacggaagagtgatcgagaagacactgtacaacagaagaacccggcaggatgagcctgccctgttcgtggccctgaccttcgagcggcgggaggtcctggactcctccaatatcaaaccaatgaacctgatcggcgtggcaagaggcgaaaacatccccgccgtgatcgccctgaccgaccccgagggctgcccactgagccggtttaaggatagcctgggaaacccaacccacatcctgagaatcggcgagagctataaggagaagcagcggaccatccaggccaagaaggaggtggagcagcggagagccggcggctacagccggaagtacgccagcaaagccaagaatctggcagacgatatggtgagaaacaccgctagagatctgctgtactacgccgtgacccaggatgccatgctgatcttcgccaacctgagccggggcttcggccggcagggcaagcggaccttcatggccgagagacagtacacacggatggaggactggctgaccgccaagctggcctacgagggcctgagcaagacctacctgtccaagacactggcccagtacacctccaagacatgcagcaactgtgggtttaccatcaccagcgccgactacgacagggtgctggagaagctgaagaagacagcaacaggctggatgaccacaattaacggcaaggagctgaaggtggagggccagattacctactacaacagatacaagagacagaacgtagtcaaggacctgtccgtcgagctggatagactgagcgaagaatctgtgaacaacgacatctcctcctggacaaagggcagaagcggagaagctctgagcctcctgaagaaaagattctcccatagacccgtgcaggagaagttcgtgtgcctgaactgcggcttcgagacacacgcagccgagcaagccgccctgaacatcgccagatcctggctgttcctgcggagccaggagtacaagaaataccagacaaacaagacaaccggcaacaccgataagagagccttcgtcgagacctggcagtccttttaccggaagaagcttaaggaggtgtggaaacctgccgtgcggtctggcggatctggcggaggctccatggccttcgaggacgtggccgtgcacttcagccaggaggagtggggcctgctggacaccgcccagaggagcctgtacaggagggtgatgctggagaacttcgccctgctggccagcctgggcctgagcgtgagcaggccccacgtggtgacccagctggagaggggcgaggagccctgggtgctgagcggcgtggacgtgaccctgccccaggacgcccagaggaggcccaggaggggcagcggcggcccaagcagcggcgcccctcctcccagcggcggcagcccagccggctccccaacctctaccgaggagggcacctctgagtccgccacccccgagagcggccctggcacctccaccgagcccagcgagggcagcgcacccggcagccctgccggcagccccacctccacagaggagggaaccagcaccgagcccagcgaaggcagcgccccaggcaccagcaccgagcctagtgagcaggagattaaacggatcaacaagatcagaagaagacttgtgaaagacagcaacaccaagaaggccggcaagacaggccccatgaaaaccctgctggttagagtgatgacacccgatctgagagagcggctggaaaacctgagaaagaagcctgaaaatatcccccagcccatcagcaatacatctagagccaacctgaataagctgctgaccgattacaccgaaatgaagaaggcgatcctgcatgtgtactgggaagagttccagaaggaccctgtgggcctgatgagccgggtggcccagcctgccagcaagaagatcgatcagaacaagctgaaacctgagatggacgagaagggcaacctgaccaccgccggctttgcctgctctcagtgtggccagcccctgttcgtgtacaagctggagcaggtgtctgagaagggcaaggcttacaccaactacttcggacggtgcaatgtggccgagcacgaaaagctgatcctgctggcccagctgaagcccgagaaggatagcgacgaagccgtgacatatagcctgggaaagtttgggcagagggccctggatttctacagcattcatgtgaccaaggagtccacccaccccgtgaagcccctggcccagatcgccggaaacagatacgcctccggacctgtgggaaaggccctgagcgacgcatgtatgggcacaatcgcctccttcctgtctaagtaccaggacatcatcatcgaacaccagaaggtggtgaagggcaaccagaagagactggagagcctgcgggagctggccggcaaggaaaacctggaataccctagcgtgaccctgccacctcagcctcacaccaaggagggcgttgatgcctacaacgaagtgatcgcccgggtgcgaatgtgggtgaacctgaacctgtggcagaagctgaagctaagcagagatgatgccaagcctctgctgagactgaagggattcccttcctttcctctggtcgagagacaggccaacgaagtggactggtgggacatggtgtgtaacgtgaagaagctgatcaacgagaaaaaggaggatggcaaggtgttttggcagaatctggctggctacaagagacaggaagccctgagaccatacctgagcagcgaggaagatcggaagaagggaaagaaattcgctcggtaccagctgggcgacctgctgctgcacctggaaaagaagcacggcgaggactggggaaaggtgtacgacgaggcctgggagcggattgacaagaaagtggaaggcctgagcaagcacatcaagctggaagaggaacggagaagcgaggacgcccagagcaaggccgccctgaccgactggctgcgggctaaggccagcttcgtgatcgagggcctgaaggaggccgacaaggacgagttctgcagatgcgagctgaagctgcagaagtggtacggggacctgcggggaaagcccttcgccatcgaagccgagaacagcatcctggacatcagcggcttcagcaagcagtacaactgtgccttcatctggcagaaggacggcgtgaagaagctgaacctgtacctgatcatcaactacttcaagggcggcaagctgcggttcaagaagatcaaacctgaagccttcgaagccaacagattctacaccgtgatcaacaaaaagagcggcgagatcgtgcccatggaggtgaacttcaacttcgacgaccccaacctgatcatcctgcctctggcctttggcaagagacagggcagagaattcatctggaacgacctgctgtccctggaaaccggcagcctgaagctggccaacggaagagtgatcgagaagacactgtacaacagaagaacccggcaggatgagcctgccctgttcgtggccctgaccttcgagcggcgggaggtcctggactcctccaatatcaaaccaatgaacctgatcggcgtggcaagaggcgaaaacatccccgccgtgatcgccctgaccgaccccgagggctgcccactgagccggtttaaggatagcctgggaaacccaacccacatcctgagaatcggcgagagctataaggagaagcagcggaccatccaggccaagaaggaggtggagcagcggagagccggcggctacagccggaagtacgccagcaaagccaagaatctggcagacgatatggtgagaaacaccgctagagatctgctgtactacgccgtgacccaggatgccatgctgatcttcgccaacctgagccggggcttcggccggcagggcaagcggaccttcatggccgagagacagtacacacggatggaggactggctgaccgccaagctggcctacgagggcctgagcaagacctacctgtccaagacactggcccagtacacctccaagacatgcagcaactgtgggtttaccatcaccagcgccgactacgacagggtgctggagaagctgaagaagacagcaacaggctggatgaccacaattaacggcaaggagctgaaggtggagggccagattacctactacaacagatacaagagacagaacgtagtcaaggacctgtccgtcgagctggatagactgagcgaagaatctgtgaacaacgacatctcctcctggacaaagggcagaagcggagaagctctgagcctcctgaagaaaagattctcccatagacccgtgcaggagaagttcgtgtgcctgaactgcggcttcgagacacacgcagccgagcaagccgccctgaacatcgccagatcctggctgttcctgcggagccaggagtacaagaaataccagacaaacaagacaaccggcaacaccgataagagagccttcgtcgagacctggcagtccttttaccggaagaagcttaaggaggtgtggaaacctgccgtgcggtctggcggatctggcggaggctcctatggccttcgaggacgtggccgtgcacttcagccaggaggagtggggcctgctggacaccgcccagaggagcctgtacaggagggtgatgctggagaacttcgccctgctggccagcctgggcctgagcgtgagcaggccccacgtggtgacccagctggagaggggcgaggagccctgggtgctgagcggcgtggacgtgaccctgccccaggacgcccagaggaggcccaggaggggcagcggatctggctccggcagcggccccaagaaaaagagaaaagtctaagctgccttctgcggggcttgccttctggccatgcccttcttctctcccttgcacctgtacctcttggtctttgaataaagcctgagtaggaaggctagcaaaaaaaaaaaaaaaaaaaaaaaaaaaaaaaaaaaaaaaaaaaaaaaaaaaaaaaaaaaaaaaaaaaaaaaaaaaaaaaa

SEQ ID NO: 15408 - RNA, 9485 nt, synthetic construct
  source 1..9485: mol_type = other RNA
aggaaataagagagaaaagaagagtaagaagaaatataagagccaccatggcccctaagaagaagcgtaaagtgagccggatggaacgcctcgtctacgaggtgcggcagaagtgcagaaacatcgaggacatctgcatctcctgcggatctctgaacgtgaccctggagcacccactgttcatcggcggcatgtgccagaactgtaaaaactgttttctggagtgtgcctatcaatacgacgatgacggctaccagagctactgcaccatctgttgcggcggaagagaggtgctgatgtgtggaaataacaactgctgccggtgcttctgcgtggaatgcgtggacctgctggtgggccccggcgccgcccaggccgctattaaggaagatccttggaactgctacatgtgcggccacaagggcacatacggcctgctgagacggagagaggactggcctagcagactgcagatgttcttcgccaataaccacgaccaggagttcgacccccctaaggtgtaccctcccgtccccgccgagaagagaaagcccatccgggtcctgagcctgttcgatggcatcgccaccggtctgctggtgctgaaggacctgggcatccaggtggataggtacattgcctccgaggtgtgcgaggactccatcaccgtgggaatggtgcgtcatcagggcaagatcatgtacgtgggcgacgtgcggagcgtgacacagaagcatatccaggagtggggccctttcgacctggtgatcggcggcagcccttgcaatgacctgagcatcgtgaacccagcccggaagggcctgtacgagggaaccggcagactgttcttcgagttttacagactgctgcacgacgcccggcctaaggaaggcgacgaccggcccttcttttggctgttcgagaatgtggtggccatgggagtcagcgacaagcgggatattagccggttcctggagagcaaccccgtgatgatcgatgccaaggaagtgagcgccgcccaccgggccagatacttctggggcaatctgcctggcatgaacagacccctggccagcaccgtgaacgacaagctggagctgcaggagtgcctggagcacggccggatcgccaagttcagcaaggtgagaaccatcaccacccgaagcaacagcatcaaacaaggcaaggaccagcactttcctgtgttcatgaacgagaaggaggacatcctgtggtgtaccgagatggagagagtgttcgggttcccagtccactacacagatgtcagcaacatgtctagactggccagacagagactgctgggaagaagctggtccgtccctgtgatcagacacctgttcgcccctctgaaggagtacttcgcctgcgtgagcagcggcaacagcaacgccaacagccggggccccagcttctctagcggcctggtgccactgtccctgagagggagccacatgggccccatggagatctacaaaaccgtgagcgcctggaagcggcagcctgtgcgcgtgctgagcctgtttcggaatatcgataaagtcctgaaaagcctgggattcctggagagcggctctggctccggcggtggcaccctgaagtacgtggaggatgtgacaaacgtggtcagacgggatgtggagaagtggggccccttcgatctggtgtacggcagcacccaacccctgggcagctcttgtgaccggtgccctggctggtacatgtttcagttccaccggatcctgcagtacgccctgccgagacaggagtcccagcggccattcttttggattttcatggacaacttgctgctgaccgaggatgaccaggaaactaccactcggttcctgcagaccgaagccgtgaccctgcaggacgtgagaggccgggactaccagaacgccatgcgggtgtggtccaacatccctggactgaaaagcaagcacgcacctctgacccctaaagaagaggagtacctgcaggcccaggtgcggagcagaagcaagctggacgcccctaaggtggatctgctggtgaagaattgcctcctgcccctgagagagtacttcaagtatttcagccagaatagtctgcccctgggaggcagcggcggcggcgccctggtgacatttgaggacgtcgccgtgcggttcacccaggaggaatgggctctgctggatccttctcagaaaatcctgtaccgggacgtgatgagagagacataccggaatctgacctccgtgggcatcaactgggaatgttgggaccttgaagcctgcttcagaagcctgggaagaaacctgagagtgcaggtggtgaagagaaagtgcgagctgaccaacagcggcccctgcgccgagggcggcccaagcagcggcgcccctcctcccagcggcggcagcccagccggctccccaacctctaccgaggagggcacctctgagtccgccacccccgagagcggccctggcacctccaccgagcccagcgagggcagcgcacccggcagccctgccggcagccccacctccacagaggagggaaccagcaccgagcccagcgaaggcagcgccccaggcaccagcaccgagcctagtgagcaggagattaaacggatcaacaagatcagaagaagacttgtgaaagacagcaacaccaagaaggccggcaagacaggccccatgaaaaccctgctggttagagtgatgacacccgatctgagagagcggctggaaaacctgagaaagaagcctgaaaatatcccccagcccatcagcaatacatctagagccaacctgaataagctgctgaccgattacaccgaaatgaagaaggcgatcctgcatgtgtactgggaagagttccagaaggaccctgtgggcctgatgagccgggtggcccagcctgccagcaagaagatcgatcagaacaagctgaaacctgagatggacgagaagggcaacctgaccaccgccggctttgcctgctctcagtgtggccagcccctgttcgtgtacaagctggagcaggtgtctgagaagggcaaggcttacaccaactacttcggacggtgcaatgtggccgagcacgaaaagctgatcctgctggcccagctgaagcccgagaaggatagcgacgaagccgtgacatatagcctgggaaagtttgggcagagggccctggatttctacagcattcatgtgaccaaggagtccacccaccccgtgaagcccctggcccagatcgccggaaacagatacgcctccggacctgtgggaaaggccctgagcgacgcatgtatgggcacaatcgcctccttcctgtctaagtaccaggacatcatcatcgaacaccagaaggtggtgaagggcaaccagaagagactggagagcctgcgggagctggccggcaaggaaaacctggaataccctagcgtgaccctgccacctcagcctcacaccaaggagggcgttgatgcctacaacgaagtgatcgcccgggtgcgaatgtgggtgaacctgaacctgtggcagaagctgaagctaagcagagatgatgccaagcctctgctgagactgaagggattcccttcctttcctctggtcgagagacaggccaacgaagtggactggtgggacatggtgtgtaacgtgaagaagctgatcaacgagaaaaaggaggatggcaaggtgttttggcagaatctggctggctacaagagacaggaagccctgagaccatacctgagcagcgaggaagatcggaagaagggaaagaaattcgctcggtaccagctgggcgacctgctgctgcacctggaaaagaagcacggcgaggactggggaaaggtgtacgacgaggcctgggagcggattgacaagaaagtggaaggcctgagcaagcacatcaagctggaagaggaacggagaagcgaggacgcccagagcaaggccgccctgaccgactggctgcgggctaaggccagcttcgtgatcgagggcctgaaggaggccgacaaggacgagttctgcagatgcgagctgaagctgcagaagtggtacggggacctgcggggaaagcccttcgccatcgaagccgagaacagcatcctggacatcagcggcttcagcaagcagtacaactgtgccttcatctggcagaaggacggcgtgaagaagctgaacctgtacctgatcatcaactacttcaagggcggcaagctgcggttcaagaagatcaaacctgaagccttcgaagccaacagattctacaccgtgatcaacaaaaagagcggcgagatcgtgcccatggaggtgaacttcaacttcgacgaccccaacctgatcatcctgcctctggcctttggcaagagacagggcagagaattcatctggaacgacctgctgtccctggaaaccggcagcctgaagctggccaacggaagagtgatcgagaagacactgtacaacagaagaacccggcaggatgagcctgccctgttcgtggccctgaccttcgagcggcgggaggtcctggactcctccaatatcaaaccaatgaacctgatcggcgtggcaagaggcgaaaacatccccgccgtgatcgccctgaccgaccccgagggctgcccactgagccggtttaaggatagcctgggaaacccaacccacatcctgagaatcggcgagagctataaggagaagcagcggaccatccaggccaagaaggaggtggagcagcggagagccggcggctacagccggaagtacgccagcaaagccaagaatctggcagacgatatggtgagaaacaccgctagagatctgctgtactacgccgtgacccaggatgccatgctgatcttcgccaacctgagccggggcttcggccggcagggcaagcggaccttcatggccgagagacagtacacacggatggaggactggctgaccgccaagctggcctacgagggcctgagcaagacctacctgtccaagacactggcccagtacacctccaagacatgcagcaactgtgggtttaccatcaccagcgccgactacgacagggtgctggagaagctgaagaagacagcaacaggctggatgaccacaattaacggcaaggagctgaaggtggagggccagattacctactacaacagatacaagagacagaacgtagtcaaggacctgtccgtcgagctggatagactgagcgaagaatctgtgaacaacgacatctcctcctggacaaagggcagaagcggagaagctctgagcctcctgaagaaaagattctcccatagacccgtgcaggagaagttcgtgtgcctgaactgcggcttcgagacacacgcagccgagcaagccgccctgaacatcgccagatcctggctgttcctgcggagccaggagtacaagaaataccagacaaacaagacaaccggcaacaccgataagagagccttcgtcgagacctggcagtccttttaccggaagaagcttaaggaggtgtggaaacctgccgtgcggtctggcggatctggcggaggctccttccagagcgaggtgatgttcagggacgtgaccgtgaacttcagccaggaggagtgggagtgcctgaacagctacgagagggacctgtacaaggacgtgatgctggagaactacagccacctggtgagcctgggctgcagcatcagcaagcccgacgtgatcaccctgctggagcagggcaaggagccctggatgatcgtgagggacgagaggaggaggtggagccaggacctggagaccaggggcggcccaagcagcggcgcccctcctcccagcggcggcagcccagccggctccccaacctctaccgaggagggcacctctgagtccgccacccccgagagcggccctggcacctccaccgagcccagcgagggcagcgcacccggcagccctgccggcagccccacctccacagaggagggaaccagcaccgagcccagcgaaggcagcgccccaggcaccagcaccgagcctagtgagcaggagattaaacggatcaacaagatcagaagaagacttgtgaaagacagcaacaccaagaaggccggcaagacaggccccatgaaaaccctgctggttagagtgatgacacccgatctgagagagcggctggaaaacctgagaaagaagcctgaaaatatcccccagcccatcagcaatacatctagagccaacctgaataagctgctgaccgattacaccgaaatgaagaaggcgatcctgcatgtgtactgggaagagttccagaaggaccctgtgggcctgatgagccgggtggcccagcctgccagcaagaagatcgatcagaacaagctgaaacctgagatggacgagaagggcaacctgaccaccgccggctttgcctgctctcagtgtggccagcccctgttcgtgtacaagctggagcaggtgtctgagaagggcaaggcttacaccaactacttcggacggtgcaatgtggccgagcacgaaaagctgatcctgctggcccagctgaagcccgagaaggatagcgacgaagccgtgacatatagcctgggaaagtttgggcagagggccctggatttctacagcattcatgtgaccaaggagtccacccaccccgtgaagcccctggcccagatcgccggaaacagatacgcctccggacctgtgggaaaggccctgagcgacgcatgtatgggcacaatcgcctccttcctgtctaagtaccaggacatcatcatcgaacaccagaaggtggtgaagggcaaccagaagagactggagagcctgcgggagctggccggcaaggaaaacctggaataccctagcgtgaccctgccacctcagcctcacaccaaggagggcgttgatgcctacaacgaagtgatcgcccgggtgcgaatgtgggtgaacctgaacctgtggcagaagctgaagctaagcagagatgatgccaagcctctgctgagactgaagggattcccttcctttcctctggtcgagagacaggccaacgaagtggactggtgggacatggtgtgtaacgtgaagaagctgatcaacgagaaaaaggaggatggcaaggtgttttggcagaatctggctggctacaagagacaggaagccctgagaccatacctgagcagcgaggaagatcggaagaagggaaagaaattcgctcggtaccagctgggcgacctgctgctgcacctggaaaagaagcacggcgaggactggggaaaggtgtacgacgaggcctgggagcggattgacaagaaagtggaaggcctgagcaagcacatcaagctggaagaggaacggagaagcgaggacgcccagagcaaggccgccctgaccgactggctgcgggctaaggccagcttcgtgatcgagggcctgaaggaggccgacaaggacgagttctgcagatgcgagctgaagctgcagaagtggtacggggacctgcggggaaagcccttcgccatcgaagccgagaacagcatcctggacatcagcggcttcagcaagcagtacaactgtgccttcatctggcagaaggacggcgtgaagaagctgaacctgtacctgatcatcaactacttcaagggcggcaagctgcggttcaagaagatcaaacctgaagccttcgaagccaacagattctacaccgtgatcaacaaaaagagcggcgagatcgtgcccatggaggtgaacttcaacttcgacgaccccaacctgatcatcctgcctctggcctttggcaagagacagggcagagaattcatctggaacgacctgctgtccctggaaaccggcagcctgaagctggccaacggaagagtgatcgagaagacactgtacaacagaagaacccggcaggatgagcctgccctgttcgtggccctgaccttcgagcggcgggaggtcctggactcctccaatatcaaaccaatgaacctgatcggcgtggcaagaggcgaaaacatccccgccgtgatcgccctgaccgaccccgagggctgcccactgagccggtttaaggatagcctgggaaacccaacccacatcctgagaatcggcgagagctataaggagaagcagcggaccatccaggccaagaaggaggtggagcagcggagagccggcggctacagccggaagtacgccagcaaagccaagaatctggcagacgatatggtgagaaacaccgctagagatctgctgtactacgccgtgacccaggatgccatgctgatcttcgccaacctgagccggggcttcggccggcagggcaagcggaccttcatggccgagagacagtacacacggatggaggactggctgaccgccaagctggcctacgagggcctgagcaagacctacctgtccaagacactggcccagtacacctccaagacatgcagcaactgtgggtttaccatcaccagcgccgactacgacagggtgctggagaagctgaagaagacagcaacaggctggatgaccacaattaacggcaaggagctgaaggtggagggccagattacctactacaacagatacaagagacagaacgtagtcaaggacctgtccgtcgagctggatagactgagcgaagaatctgtgaacaacgacatctcctcctggacaaagggcagaagcggagaagctctgagcctcctgaagaaaagattctcccatagacccgtgcaggagaagttcgtgtgcctgaactgcggcttcgagacacacgcagccgagcaagccgccctgaacatcgccagatcctggctgttcctgcggagccaggagtacaagaaataccagacaaacaagacaaccggcaacaccgataagagagccttcgtcgagacctggcagtccttttaccggaagaagcttaaggaggtgtggaaacctgccgtgcggtctggcggatctggcggaggctcctttccagagcgaggtgatgttcagggacgtgaccgtgaacttcagccaggaggagtgggagtgcctgaacagctacgagagggacctgtacaaggacgtgatgctggagaactacagccacctggtgagcctgggctgcagcatcagcaagcccgacgtgatcaccctgctggagcagggcaaggagccctggatgatcgtgagggacgagaggaggaggtggagccaggacctggagaccaggggatctggctccggcagcggccccaagaaaaagagaaaagtctaagctgccttctgcggggcttgccttctggccatgcccttcttctctcccttgcacctgtacctcttggtctttgaataaagcctgagtaggaaggctagcaaaaaaaaaaaaaaaaaaaaaaaaaaaaaaaaaaaaaaaaaaaaaaaaaaaaaaaaaaaaaaaaaaaaaaaaaaaaaaaa

SEQ ID NO: 15409 - RNA, 9485 nt, synthetic construct
  source 1..9485: mol_type = other RNA
aggaaataagagagaaaagaagagtaagaagaaatataagagccaccatggcccctaagaagaagcgtaaagtgagccggatggaacgcctcgtctacgaggtgcggcagaagtgcagaaacatcgaggacatctgcatctcctgcggatctctgaacgtgaccctggagcacccactgttcatcggcggcatgtgccagaactgtaaaaactgttttctggagtgtgcctatcaatacgacgatgacggctaccagagctactgcaccatctgttgcggcggaagagaggtgctgatgtgtggaaataacaactgctgccggtgcttctgcgtggaatgcgtggacctgctggtgggccccggcgccgcccaggccgctattaaggaagatccttggaactgctacatgtgcggccacaagggcacatacggcctgctgagacggagagaggactggcctagcagactgcagatgttcttcgccaataaccacgaccaggagttcgacccccctaaggtgtaccctcccgtccccgccgagaagagaaagcccatccgggtcctgagcctgttcgatggcatcgccaccggtctgctggtgctgaaggacctgggcatccaggtggataggtacattgcctccgaggtgtgcgaggactccatcaccgtgggaatggtgcgtcatcagggcaagatcatgtacgtgggcgacgtgcggagcgtgacacagaagcatatccaggagtggggccctttcgacctggtgatcggcggcagcccttgcaatgacctgagcatcgtgaacccagcccggaagggcctgtacgagggaaccggcagactgttcttcgagttttacagactgctgcacgacgcccggcctaaggaaggcgacgaccggcccttcttttggctgttcgagaatgtggtggccatgggagtcagcgacaagcgggatattagccggttcctggagagcaaccccgtgatgatcgatgccaaggaagtgagcgccgcccaccgggccagatacttctggggcaatctgcctggcatgaacagacccctggccagcaccgtgaacgacaagctggagctgcaggagtgcctggagcacggccggatcgccaagttcagcaaggtgagaaccatcaccacccgaagcaacagcatcaaacaaggcaaggaccagcactttcctgtgttcatgaacgagaaggaggacatcctgtggtgtaccgagatggagagagtgttcgggttcccagtccactacacagatgtcagcaacatgtctagactggccagacagagactgctgggaagaagctggtccgtccctgtgatcagacacctgttcgcccctctgaaggagtacttcgcctgcgtgagcagcggcaacagcaacgccaacagccggggccccagcttctctagcggcctggtgccactgtccctgagagggagccacatgggccccatggagatctacaaaaccgtgagcgcctggaagcggcagcctgtgcgcgtgctgagcctgtttcggaatatcgataaagtcctgaaaagcctgggattcctggagagcggctctggctccggcggtggcaccctgaagtacgtggaggatgtgacaaacgtggtcagacgggatgtggagaagtggggccccttcgatctggtgtacggcagcacccaacccctgggcagctcttgtgaccggtgccctggctggtacatgtttcagttccaccggatcctgcagtacgccctgccgagacaggagtcccagcggccattcttttggattttcatggacaacttgctgctgaccgaggatgaccaggaaactaccactcggttcctgcagaccgaagccgtgaccctgcaggacgtgagaggccgggactaccagaacgccatgcgggtgtggtccaacatccctggactgaaaagcaagcacgcacctctgacccctaaagaagaggagtacctgcaggcccaggtgcggagcagaagcaagctggacgcccctaaggtggatctgctggtgaagaattgcctcctgcccctgagagagtacttcaagtatttcagccagaatagtctgcccctgggaggcagcggcggcggcgccctggtgacatttgaggacgtcgccgtgcggttcacccaggaggaatgggctctgctggatccttctcagaaaatcctgtaccgggacgtgatgagagagacataccggaatctgacctccgtgggcatcaactgggaatgttgggaccttgaagcctgcttcagaagcctgggaagaaacctgagagtgcaggtggtgaagagaaagtgcgagctgaccaacagcggcccctgcgccgagggcggcccaagcagcggcgcccctcctcccagcggcggcagcccagccggctccccaacctctaccgaggagggcacctctgagtccgccacccccgagagcggccctggcacctccaccgagcccagcgagggcagcgcacccggcagccctgccggcagccccacctccacagaggagggaaccagcaccgagcccagcgaaggcagcgccccaggcaccagcaccgagcctagtgagcaggagattaaacggatcaacaagatcagaagaagacttgtgaaagacagcaacaccaagaaggccggcaagacaggccccatgaaaaccctgctggttagagtgatgacacccgatctgagagagcggctggaaaacctgagaaagaagcctgaaaatatcccccagcccatcagcaatacatctagagccaacctgaataagctgctgaccgattacaccgaaatgaagaaggcgatcctgcatgtgtactgggaagagttccagaaggaccctgtgggcctgatgagccgggtggcccagcctgccagcaagaagatcgatcagaacaagctgaaacctgagatggacgagaagggcaacctgaccaccgccggctttgcctgctctcagtgtggccagcccctgttcgtgtacaagctggagcaggtgtctgagaagggcaaggcttacaccaactacttcggacggtgcaatgtggccgagcacgaaaagctgatcctgctggcccagctgaagcccgagaaggatagcgacgaagccgtgacatatagcctgggaaagtttgggcagagggccctggatttctacagcattcatgtgaccaaggagtccacccaccccgtgaagcccctggcccagatcgccggaaacagatacgcctccggacctgtgggaaaggccctgagcgacgcatgtatgggcacaatcgcctccttcctgtctaagtaccaggacatcatcatcgaacaccagaaggtggtgaagggcaaccagaagagactggagagcctgcgggagctggccggcaaggaaaacctggaataccctagcgtgaccctgccacctcagcctcacaccaaggagggcgttgatgcctacaacgaagtgatcgcccgggtgcgaatgtgggtgaacctgaacctgtggcagaagctgaagctaagcagagatgatgccaagcctctgctgagactgaagggattcccttcctttcctctggtcgagagacaggccaacgaagtggactggtgggacatggtgtgtaacgtgaagaagctgatcaacgagaaaaaggaggatggcaaggtgttttggcagaatctggctggctacaagagacaggaagccctgagaccatacctgagcagcgaggaagatcggaagaagggaaagaaattcgctcggtaccagctgggcgacctgctgctgcacctggaaaagaagcacggcgaggactggggaaaggtgtacgacgaggcctgggagcggattgacaagaaagtggaaggcctgagcaagcacatcaagctggaagaggaacggagaagcgaggacgcccagagcaaggccgccctgaccgactggctgcgggctaaggccagcttcgtgatcgagggcctgaaggaggccgacaaggacgagttctgcagatgcgagctgaagctgcagaagtggtacggggacctgcggggaaagcccttcgccatcgaagccgagaacagcatcctggacatcagcggcttcagcaagcagtacaactgtgccttcatctggcagaaggacggcgtgaagaagctgaacctgtacctgatcatcaactacttcaagggcggcaagctgcggttcaagaagatcaaacctgaagccttcgaagccaacagattctacaccgtgatcaacaaaaagagcggcgagatcgtgcccatggaggtgaacttcaacttcgacgaccccaacctgatcatcctgcctctggcctttggcaagagacagggcagagaattcatctggaacgacctgctgtccctggaaaccggcagcctgaagctggccaacggaagagtgatcgagaagacactgtacaacagaagaacccggcaggatgagcctgccctgttcgtggccctgaccttcgagcggcgggaggtcctggactcctccaatatcaaaccaatgaacctgatcggcgtggcaagaggcgaaaacatccccgccgtgatcgccctgaccgaccccgagggctgcccactgagccggtttaaggatagcctgggaaacccaacccacatcctgagaatcggcgagagctataaggagaagcagcggaccatccaggccaagaaggaggtggagcagcggagagccggcggctacagccggaagtacgccagcaaagccaagaatctggcagacgatatggtgagaaacaccgctagagatctgctgtactacgccgtgacccaggatgccatgctgatcttcgccaacctgagccggggcttcggccggcagggcaagcggaccttcatggccgagagacagtacacacggatggaggactggctgaccgccaagctggcctacgagggcctgagcaagacctacctgtccaagacactggcccagtacacctccaagacatgcagcaactgtgggtttaccatcaccagcgccgactacgacagggtgctggagaagctgaagaagacagcaacaggctggatgaccacaattaacggcaaggagctgaaggtggagggccagattacctactacaacagatacaagagacagaacgtagtcaaggacctgtccgtcgagctggatagactgagcgaagaatctgtgaacaacgacatctcctcctggacaaagggcagaagcggagaagctctgagcctcctgaagaaaagattctcccatagacccgtgcaggagaagttcgtgtgcctgaactgcggcttcgagacacacgcagccgagcaagccgccctgaacatcgccagatcctggctgttcctgcggagccaggagtacaagaaataccagacaaacaagacaaccggcaacaccgataagagagccttcgtcgagacctggcagtccttttaccggaagaagcttaaggaggtgtggaaacctgccgtgcggtctggcggatctggcggaggctccgtgcaggagcccgtgaccttcaaggacgtggccgtggacttcacccaggaggagtggggccagctggacctggtgcagaggaccctgtacagggacgtgatgctggagacctacggccacctgctgagcgtgggcaaccagatcgccaagcccgaggtgatcagcctgctggagcagggcgaggagccctggagcgtggagcagacctgcccccagagggcctgccccgagtggatgaggaacggcggcccaagcagcggcgcccctcctcccagcggcggcagcccagccggctccccaacctctaccgaggagggcacctctgagtccgccacccccgagagcggccctggcacctccaccgagcccagcgagggcagcgcacccggcagccctgccggcagccccacctccacagaggagggaaccagcaccgagcccagcgaaggcagcgccccaggcaccagcaccgagcctagtgagcaggagattaaacggatcaacaagatcagaagaagacttgtgaaagacagcaacaccaagaaggccggcaagacaggccccatgaaaaccctgctggttagagtgatgacacccgatctgagagagcggctggaaaacctgagaaagaagcctgaaaatatcccccagcccatcagcaatacatctagagccaacctgaataagctgctgaccgattacaccgaaatgaagaaggcgatcctgcatgtgtactgggaagagttccagaaggaccctgtgggcctgatgagccgggtggcccagcctgccagcaagaagatcgatcagaacaagctgaaacctgagatggacgagaagggcaacctgaccaccgccggctttgcctgctctcagtgtggccagcccctgttcgtgtacaagctggagcaggtgtctgagaagggcaaggcttacaccaactacttcggacggtgcaatgtggccgagcacgaaaagctgatcctgctggcccagctgaagcccgagaaggatagcgacgaagccgtgacatatagcctgggaaagtttgggcagagggccctggatttctacagcattcatgtgaccaaggagtccacccaccccgtgaagcccctggcccagatcgccggaaacagatacgcctccggacctgtgggaaaggccctgagcgacgcatgtatgggcacaatcgcctccttcctgtctaagtaccaggacatcatcatcgaacaccagaaggtggtgaagggcaaccagaagagactggagagcctgcgggagctggccggcaaggaaaacctggaataccctagcgtgaccctgccacctcagcctcacaccaaggagggcgttgatgcctacaacgaagtgatcgcccgggtgcgaatgtgggtgaacctgaacctgtggcagaagctgaagctaagcagagatgatgccaagcctctgctgagactgaagggattcccttcctttcctctggtcgagagacaggccaacgaagtggactggtgggacatggtgtgtaacgtgaagaagctgatcaacgagaaaaaggaggatggcaaggtgttttggcagaatctggctggctacaagagacaggaagccctgagaccatacctgagcagcgaggaagatcggaagaagggaaagaaattcgctcggtaccagctgggcgacctgctgctgcacctggaaaagaagcacggcgaggactggggaaaggtgtacgacgaggcctgggagcggattgacaagaaagtggaaggcctgagcaagcacatcaagctggaagaggaacggagaagcgaggacgcccagagcaaggccgccctgaccgactggctgcgggctaaggccagcttcgtgatcgagggcctgaaggaggccgacaaggacgagttctgcagatgcgagctgaagctgcagaagtggtacggggacctgcggggaaagcccttcgccatcgaagccgagaacagcatcctggacatcagcggcttcagcaagcagtacaactgtgccttcatctggcagaaggacggcgtgaagaagctgaacctgtacctgatcatcaactacttcaagggcggcaagctgcggttcaagaagatcaaacctgaagccttcgaagccaacagattctacaccgtgatcaacaaaaagagcggcgagatcgtgcccatggaggtgaacttcaacttcgacgaccccaacctgatcatcctgcctctggcctttggcaagagacagggcagagaattcatctggaacgacctgctgtccctggaaaccggcagcctgaagctggccaacggaagagtgatcgagaagacactgtacaacagaagaacccggcaggatgagcctgccctgttcgtggccctgaccttcgagcggcgggaggtcctggactcctccaatatcaaaccaatgaacctgatcggcgtggcaagaggcgaaaacatccccgccgtgatcgccctgaccgaccccgagggctgcccactgagccggtttaaggatagcctgggaaacccaacccacatcctgagaatcggcgagagctataaggagaagcagcggaccatccaggccaagaaggaggtggagcagcggagagccggcggctacagccggaagtacgccagcaaagccaagaatctggcagacgatatggtgagaaacaccgctagagatctgctgtactacgccgtgacccaggatgccatgctgatcttcgccaacctgagccggggcttcggccggcagggcaagcggaccttcatggccgagagacagtacacacggatggaggactggctgaccgccaagctggcctacgagggcctgagcaagacctacctgtccaagacactggcccagtacacctccaagacatgcagcaactgtgggtttaccatcaccagcgccgactacgacagggtgctggagaagctgaagaagacagcaacaggctggatgaccacaattaacggcaaggagctgaaggtggagggccagattacctactacaacagatacaagagacagaacgtagtcaaggacctgtccgtcgagctggatagactgagcgaagaatctgtgaacaacgacatctcctcctggacaaagggcagaagcggagaagctctgagcctcctgaagaaaagattctcccatagacccgtgcaggagaagttcgtgtgcctgaactgcggcttcgagacacacgcagccgagcaagccgccctgaacatcgccagatcctggctgttcctgcggagccaggagtacaagaaataccagacaaacaagacaaccggcaacaccgataagagagccttcgtcgagacctggcagtccttttaccggaagaagcttaaggaggtgtggaaacctgccgtgcggtctggcggatctggcggaggctcctgtgcaggagcccgtgaccttcaaggacgtggccgtggacttcacccaggaggagtggggccagctggacctggtgcagaggaccctgtacagggacgtgatgctggagacctacggccacctgctgagcgtgggcaaccagatcgccaagcccgaggtgatcagcctgctggagcagggcgaggagccctggagcgtggagcagacctgcccccagagggcctgccccgagtggatgaggaacggatctggctccggcagcggccccaagaaaaagagaaaagtctaagctgccttctgcggggcttgccttctggccatgcccttcttctctcccttgcacctgtacctcttggtctttgaataaagcctgagtaggaaggctagcaaaaaaaaaaaaaaaaaaaaaaaaaaaaaaaaaaaaaaaaaaaaaaaaaaaaaaaaaaaaaaaaaaaaaaaaaaaaaaaa

SEQ ID NO: 15410 - RNA, 9485 nt, synthetic construct
  source 1..9485: mol_type = other RNA
aggaaataagagagaaaagaagagtaagaagaaatataagagccaccatggcccctaagaagaagcgtaaagtgagccggatggaacgcctcgtctacgaggtgcggcagaagtgcagaaacatcgaggacatctgcatctcctgcggatctctgaacgtgaccctggagcacccactgttcatcggcggcatgtgccagaactgtaaaaactgttttctggagtgtgcctatcaatacgacgatgacggctaccagagctactgcaccatctgttgcggcggaagagaggtgctgatgtgtggaaataacaactgctgccggtgcttctgcgtggaatgcgtggacctgctggtgggccccggcgccgcccaggccgctattaaggaagatccttggaactgctacatgtgcggccacaagggcacatacggcctgctgagacggagagaggactggcctagcagactgcagatgttcttcgccaataaccacgaccaggagttcgacccccctaaggtgtaccctcccgtccccgccgagaagagaaagcccatccgggtcctgagcctgttcgatggcatcgccaccggtctgctggtgctgaaggacctgggcatccaggtggataggtacattgcctccgaggtgtgcgaggactccatcaccgtgggaatggtgcgtcatcagggcaagatcatgtacgtgggcgacgtgcggagcgtgacacagaagcatatccaggagtggggccctttcgacctggtgatcggcggcagcccttgcaatgacctgagcatcgtgaacccagcccggaagggcctgtacgagggaaccggcagactgttcttcgagttttacagactgctgcacgacgcccggcctaaggaaggcgacgaccggcccttcttttggctgttcgagaatgtggtggccatgggagtcagcgacaagcgggatattagccggttcctggagagcaaccccgtgatgatcgatgccaaggaagtgagcgccgcccaccgggccagatacttctggggcaatctgcctggcatgaacagacccctggccagcaccgtgaacgacaagctggagctgcaggagtgcctggagcacggccggatcgccaagttcagcaaggtgagaaccatcaccacccgaagcaacagcatcaaacaaggcaaggaccagcactttcctgtgttcatgaacgagaaggaggacatcctgtggtgtaccgagatggagagagtgttcgggttcccagtccactacacagatgtcagcaacatgtctagactggccagacagagactgctgggaagaagctggtccgtccctgtgatcagacacctgttcgcccctctgaaggagtacttcgcctgcgtgagcagcggcaacagcaacgccaacagccggggccccagcttctctagcggcctggtgccactgtccctgagagggagccacatgggccccatggagatctacaaaaccgtgagcgcctggaagcggcagcctgtgcgcgtgctgagcctgtttcggaatatcgataaagtcctgaaaagcctgggattcctggagagcggctctggctccggcggtggcaccctgaagtacgtggaggatgtgacaaacgtggtcagacgggatgtggagaagtggggccccttcgatctggtgtacggcagcacccaacccctgggcagctcttgtgaccggtgccctggctggtacatgtttcagttccaccggatcctgcagtacgccctgccgagacaggagtcccagcggccattcttttggattttcatggacaacttgctgctgaccgaggatgaccaggaaactaccactcggttcctgcagaccgaagccgtgaccctgcaggacgtgagaggccgggactaccagaacgccatgcgggtgtggtccaacatccctggactgaaaagcaagcacgcacctctgacccctaaagaagaggagtacctgcaggcccaggtgcggagcagaagcaagctggacgcccctaaggtggatctgctggtgaagaattgcctcctgcccctgagagagtacttcaagtatttcagccagaatagtctgcccctgggaggcagcggcggcggcgccctggtgacatttgaggacgtcgccgtgcggttcacccaggaggaatgggctctgctggatccttctcagaaaatcctgtaccgggacgtgatgagagagacataccggaatctgacctccgtgggcatcaactgggaatgttgggaccttgaagcctgcttcagaagcctgggaagaaacctgagagtgcaggtggtgaagagaaagtgcgagctgaccaacagcggcccctgcgccgagggcggcccaagcagcggcgcccctcctcccagcggcggcagcccagccggctccccaacctctaccgaggagggcacctctgagtccgccacccccgagagcggccctggcacctccaccgagcccagcgagggcagcgcacccggcagccctgccggcagccccacctccacagaggagggaaccagcaccgagcccagcgaaggcagcgccccaggcaccagcaccgagcctagtgagcaggagattaaacggatcaacaagatcagaagaagacttgtgaaagacagcaacaccaagaaggccggcaagacaggccccatgaaaaccctgctggttagagtgatgacacccgatctgagagagcggctggaaaacctgagaaagaagcctgaaaatatcccccagcccatcagcaatacatctagagccaacctgaataagctgctgaccgattacaccgaaatgaagaaggcgatcctgcatgtgtactgggaagagttccagaaggaccctgtgggcctgatgagccgggtggcccagcctgccagcaagaagatcgatcagaacaagctgaaacctgagatggacgagaagggcaacctgaccaccgccggctttgcctgctctcagtgtggccagcccctgttcgtgtacaagctggagcaggtgtctgagaagggcaaggcttacaccaactacttcggacggtgcaatgtggccgagcacgaaaagctgatcctgctggcccagctgaagcccgagaaggatagcgacgaagccgtgacatatagcctgggaaagtttgggcagagggccctggatttctacagcattcatgtgaccaaggagtccacccaccccgtgaagcccctggcccagatcgccggaaacagatacgcctccggacctgtgggaaaggccctgagcgacgcatgtatgggcacaatcgcctccttcctgtctaagtaccaggacatcatcatcgaacaccagaaggtggtgaagggcaaccagaagagactggagagcctgcgggagctggccggcaaggaaaacctggaataccctagcgtgaccctgccacctcagcctcacaccaaggagggcgttgatgcctacaacgaagtgatcgcccgggtgcgaatgtgggtgaacctgaacctgtggcagaagctgaagctaagcagagatgatgccaagcctctgctgagactgaagggattcccttcctttcctctggtcgagagacaggccaacgaagtggactggtgggacatggtgtgtaacgtgaagaagctgatcaacgagaaaaaggaggatggcaaggtgttttggcagaatctggctggctacaagagacaggaagccctgagaccatacctgagcagcgaggaagatcggaagaagggaaagaaattcgctcggtaccagctgggcgacctgctgctgcacctggaaaagaagcacggcgaggactggggaaaggtgtacgacgaggcctgggagcggattgacaagaaagtggaaggcctgagcaagcacatcaagctggaagaggaacggagaagcgaggacgcccagagcaaggccgccctgaccgactggctgcgggctaaggccagcttcgtgatcgagggcctgaaggaggccgacaaggacgagttctgcagatgcgagctgaagctgcagaagtggtacggggacctgcggggaaagcccttcgccatcgaagccgagaacagcatcctggacatcagcggcttcagcaagcagtacaactgtgccttcatctggcagaaggacggcgtgaagaagctgaacctgtacctgatcatcaactacttcaagggcggcaagctgcggttcaagaagatcaaacctgaagccttcgaagccaacagattctacaccgtgatcaacaaaaagagcggcgagatcgtgcccatggaggtgaacttcaacttcgacgaccccaacctgatcatcctgcctctggcctttggcaagagacagggcagagaattcatctggaacgacctgctgtccctggaaaccggcagcctgaagctggccaacggaagagtgatcgagaagacactgtacaacagaagaacccggcaggatgagcctgccctgttcgtggccctgaccttcgagcggcgggaggtcctggactcctccaatatcaaaccaatgaacctgatcggcgtggcaagaggcgaaaacatccccgccgtgatcgccctgaccgaccccgagggctgcccactgagccggtttaaggatagcctgggaaacccaacccacatcctgagaatcggcgagagctataaggagaagcagcggaccatccaggccaagaaggaggtggagcagcggagagccggcggctacagccggaagtacgccagcaaagccaagaatctggcagacgatatggtgagaaacaccgctagagatctgctgtactacgccgtgacccaggatgccatgctgatcttcgccaacctgagccggggcttcggccggcagggcaagcggaccttcatggccgagagacagtacacacggatggaggactggctgaccgccaagctggcctacgagggcctgagcaagacctacctgtccaagacactggcccagtacacctccaagacatgcagcaactgtgggtttaccatcaccagcgccgactacgacagggtgctggagaagctgaagaagacagcaacaggctggatgaccacaattaacggcaaggagctgaaggtggagggccagattacctactacaacagatacaagagacagaacgtagtcaaggacctgtccgtcgagctggatagactgagcgaagaatctgtgaacaacgacatctcctcctggacaaagggcagaagcggagaagctctgagcctcctgaagaaaagattctcccatagacccgtgcaggagaagttcgtgtgcctgaactgcggcttcgagacacacgcagccgagcaagccgccctgaacatcgccagatcctggctgttcctgcggagccaggagtacaagaaataccagacaaacaagacaaccggcaacaccgataagagagccttcgtcgagacctggcagtccttttaccggaagaagcttaaggaggtgtggaaacctgccgtgcggtctggcggatctggcggaggctccggcgaggagcccgtgaacttcgaggaggtggccgtgtacttcagcagggaggagtgggccctgctggaccccgcccagagggccctgtacagggacgtgatgctggagacctacgagtgcgtggccagcctggcccccctgcccgcccccaagcccatggtgatcagcctgctggaggagggcgaggagccctggatccccgacgtgggcagccccgaggccgtggccggcgacgtgagccccggcggcccaagcagcggcgcccctcctcccagcggcggcagcccagccggctccccaacctctaccgaggagggcacctctgagtccgccacccccgagagcggccctggcacctccaccgagcccagcgagggcagcgcacccggcagccctgccggcagccccacctccacagaggagggaaccagcaccgagcccagcgaaggcagcgccccaggcaccagcaccgagcctagtgagcaggagattaaacggatcaacaagatcagaagaagacttgtgaaagacagcaacaccaagaaggccggcaagacaggccccatgaaaaccctgctggttagagtgatgacacccgatctgagagagcggctggaaaacctgagaaagaagcctgaaaatatcccccagcccatcagcaatacatctagagccaacctgaataagctgctgaccgattacaccgaaatgaagaaggcgatcctgcatgtgtactgggaagagttccagaaggaccctgtgggcctgatgagccgggtggcccagcctgccagcaagaagatcgatcagaacaagctgaaacctgagatggacgagaagggcaacctgaccaccgccggctttgcctgctctcagtgtggccagcccctgttcgtgtacaagctggagcaggtgtctgagaagggcaaggcttacaccaactacttcggacggtgcaatgtggccgagcacgaaaagctgatcctgctggcccagctgaagcccgagaaggatagcgacgaagccgtgacatatagcctgggaaagtttgggcagagggccctggatttctacagcattcatgtgaccaaggagtccacccaccccgtgaagcccctggcccagatcgccggaaacagatacgcctccggacctgtgggaaaggccctgagcgacgcatgtatgggcacaatcgcctccttcctgtctaagtaccaggacatcatcatcgaacaccagaaggtggtgaagggcaaccagaagagactggagagcctgcgggagctggccggcaaggaaaacctggaataccctagcgtgaccctgccacctcagcctcacaccaaggagggcgttgatgcctacaacgaagtgatcgcccgggtgcgaatgtgggtgaacctgaacctgtggcagaagctgaagctaagcagagatgatgccaagcctctgctgagactgaagggattcccttcctttcctctggtcgagagacaggccaacgaagtggactggtgggacatggtgtgtaacgtgaagaagctgatcaacgagaaaaaggaggatggcaaggtgttttggcagaatctggctggctacaagagacaggaagccctgagaccatacctgagcagcgaggaagatcggaagaagggaaagaaattcgctcggtaccagctgggcgacctgctgctgcacctggaaaagaagcacggcgaggactggggaaaggtgtacgacgaggcctgggagcggattgacaagaaagtggaaggcctgagcaagcacatcaagctggaagaggaacggagaagcgaggacgcccagagcaaggccgccctgaccgactggctgcgggctaaggccagcttcgtgatcgagggcctgaaggaggccgacaaggacgagttctgcagatgcgagctgaagctgcagaagtggtacggggacctgcggggaaagcccttcgccatcgaagccgagaacagcatcctggacatcagcggcttcagcaagcagtacaactgtgccttcatctggcagaaggacggcgtgaagaagctgaacctgtacctgatcatcaactacttcaagggcggcaagctgcggttcaagaagatcaaacctgaagccttcgaagccaacagattctacaccgtgatcaacaaaaagagcggcgagatcgtgcccatggaggtgaacttcaacttcgacgaccccaacctgatcatcctgcctctggcctttggcaagagacagggcagagaattcatctggaacgacctgctgtccctggaaaccggcagcctgaagctggccaacggaagagtgatcgagaagacactgtacaacagaagaacccggcaggatgagcctgccctgttcgtggccctgaccttcgagcggcgggaggtcctggactcctccaatatcaaaccaatgaacctgatcggcgtggcaagaggcgaaaacatccccgccgtgatcgccctgaccgaccccgagggctgcccactgagccggtttaaggatagcctgggaaacccaacccacatcctgagaatcggcgagagctataaggagaagcagcggaccatccaggccaagaaggaggtggagcagcggagagccggcggctacagccggaagtacgccagcaaagccaagaatctggcagacgatatggtgagaaacaccgctagagatctgctgtactacgccgtgacccaggatgccatgctgatcttcgccaacctgagccggggcttcggccggcagggcaagcggaccttcatggccgagagacagtacacacggatggaggactggctgaccgccaagctggcctacgagggcctgagcaagacctacctgtccaagacactggcccagtacacctccaagacatgcagcaactgtgggtttaccatcaccagcgccgactacgacagggtgctggagaagctgaagaagacagcaacaggctggatgaccacaattaacggcaaggagctgaaggtggagggccagattacctactacaacagatacaagagacagaacgtagtcaaggacctgtccgtcgagctggatagactgagcgaagaatctgtgaacaacgacatctcctcctggacaaagggcagaagcggagaagctctgagcctcctgaagaaaagattctcccatagacccgtgcaggagaagttcgtgtgcctgaactgcggcttcgagacacacgcagccgagcaagccgccctgaacatcgccagatcctggctgttcctgcggagccaggagtacaagaaataccagacaaacaagacaaccggcaacaccgataagagagccttcgtcgagacctggcagtccttttaccggaagaagcttaaggaggtgtggaaacctgccgtgcggtctggcggatctggcggaggctcctggcgaggagcccgtgaacttcgaggaggtggccgtgtacttcagcagggaggagtgggccctgctggaccccgcccagagggccctgtacagggacgtgatgctggagacctacgagtgcgtggccagcctggcccccctgcccgcccccaagcccatggtgatcagcctgctggaggagggcgaggagccctggatccccgacgtgggcagccccgaggccgtggccggcgacgtgagccccggatctggctccggcagcggccccaagaaaaagagaaaagtctaagctgccttctgcggggcttgccttctggccatgcccttcttctctcccttgcacctgtacctcttggtctttgaataaagcctgagtaggaaggctagcaaaaaaaaaaaaaaaaaaaaaaaaaaaaaaaaaaaaaaaaaaaaaaaaaaaaaaaaaaaaaaaaaaaaaaaaaaaaaaaa

SEQ ID NO: 15411 - RNA, 9485 nt, synthetic construct
  source 1..9485: mol_type = other RNA
aggaaataagagagaaaagaagagtaagaagaaatataagagccaccatggcccctaagaagaagcgtaaagtgagccggatggaacgcctcgtctacgaggtgcggcagaagtgcagaaacatcgaggacatctgcatctcctgcggatctctgaacgtgaccctggagcacccactgttcatcggcggcatgtgccagaactgtaaaaactgttttctggagtgtgcctatcaatacgacgatgacggctaccagagctactgcaccatctgttgcggcggaagagaggtgctgatgtgtggaaataacaactgctgccggtgcttctgcgtggaatgcgtggacctgctggtgggccccggcgccgcccaggccgctattaaggaagatccttggaactgctacatgtgcggccacaagggcacatacggcctgctgagacggagagaggactggcctagcagactgcagatgttcttcgccaataaccacgaccaggagttcgacccccctaaggtgtaccctcccgtccccgccgagaagagaaagcccatccgggtcctgagcctgttcgatggcatcgccaccggtctgctggtgctgaaggacctgggcatccaggtggataggtacattgcctccgaggtgtgcgaggactccatcaccgtgggaatggtgcgtcatcagggcaagatcatgtacgtgggcgacgtgcggagcgtgacacagaagcatatccaggagtggggccctttcgacctggtgatcggcggcagcccttgcaatgacctgagcatcgtgaacccagcccggaagggcctgtacgagggaaccggcagactgttcttcgagttttacagactgctgcacgacgcccggcctaaggaaggcgacgaccggcccttcttttggctgttcgagaatgtggtggccatgggagtcagcgacaagcgggatattagccggttcctggagagcaaccccgtgatgatcgatgccaaggaagtgagcgccgcccaccgggccagatacttctggggcaatctgcctggcatgaacagacccctggccagcaccgtgaacgacaagctggagctgcaggagtgcctggagcacggccggatcgccaagttcagcaaggtgagaaccatcaccacccgaagcaacagcatcaaacaaggcaaggaccagcactttcctgtgttcatgaacgagaaggaggacatcctgtggtgtaccgagatggagagagtgttcgggttcccagtccactacacagatgtcagcaacatgtctagactggccagacagagactgctgggaagaagctggtccgtccctgtgatcagacacctgttcgcccctctgaaggagtacttcgcctgcgtgagcagcggcaacagcaacgccaacagccggggccccagcttctctagcggcctggtgccactgtccctgagagggagccacatgggccccatggagatctacaaaaccgtgagcgcctggaagcggcagcctgtgcgcgtgctgagcctgtttcggaatatcgataaagtcctgaaaagcctgggattcctggagagcggctctggctccggcggtggcaccctgaagtacgtggaggatgtgacaaacgtggtcagacgggatgtggagaagtggggccccttcgatctggtgtacggcagcacccaacccctgggcagctcttgtgaccggtgccctggctggtacatgtttcagttccaccggatcctgcagtacgccctgccgagacaggagtcccagcggccattcttttggattttcatggacaacttgctgctgaccgaggatgaccaggaaactaccactcggttcctgcagaccgaagccgtgaccctgcaggacgtgagaggccgggactaccagaacgccatgcgggtgtggtccaacatccctggactgaaaagcaagcacgcacctctgacccctaaagaagaggagtacctgcaggcccaggtgcggagcagaagcaagctggacgcccctaaggtggatctgctggtgaagaattgcctcctgcccctgagagagtacttcaagtatttcagccagaatagtctgcccctgggaggcagcggcggcggcgccctggtgacatttgaggacgtcgccgtgcggttcacccaggaggaatgggctctgctggatccttctcagaaaatcctgtaccgggacgtgatgagagagacataccggaatctgacctccgtgggcatcaactgggaatgttgggaccttgaagcctgcttcagaagcctgggaagaaacctgagagtgcaggtggtgaagagaaagtgcgagctgaccaacagcggcccctgcgccgagggcggcccaagcagcggcgcccctcctcccagcggcggcagcccagccggctccccaacctctaccgaggagggcacctctgagtccgccacccccgagagcggccctggcacctccaccgagcccagcgagggcagcgcacccggcagccctgccggcagccccacctccacagaggagggaaccagcaccgagcccagcgaaggcagcgccccaggcaccagcaccgagcctagtgagcaggagattaaacggatcaacaagatcagaagaagacttgtgaaagacagcaacaccaagaaggccggcaagacaggccccatgaaaaccctgctggttagagtgatgacacccgatctgagagagcggctggaaaacctgagaaagaagcctgaaaatatcccccagcccatcagcaatacatctagagccaacctgaataagctgctgaccgattacaccgaaatgaagaaggcgatcctgcatgtgtactgggaagagttccagaaggaccctgtgggcctgatgagccgggtggcccagcctgccagcaagaagatcgatcagaacaagctgaaacctgagatggacgagaagggcaacctgaccaccgccggctttgcctgctctcagtgtggccagcccctgttcgtgtacaagctggagcaggtgtctgagaagggcaaggcttacaccaactacttcggacggtgcaatgtggccgagcacgaaaagctgatcctgctggcccagctgaagcccgagaaggatagcgacgaagccgtgacatatagcctgggaaagtttgggcagagggccctggatttctacagcattcatgtgaccaaggagtccacccaccccgtgaagcccctggcccagatcgccggaaacagatacgcctccggacctgtgggaaaggccctgagcgacgcatgtatgggcacaatcgcctccttcctgtctaagtaccaggacatcatcatcgaacaccagaaggtggtgaagggcaaccagaagagactggagagcctgcgggagctggccggcaaggaaaacctggaataccctagcgtgaccctgccacctcagcctcacaccaaggagggcgttgatgcctacaacgaagtgatcgcccgggtgcgaatgtgggtgaacctgaacctgtggcagaagctgaagctaagcagagatgatgccaagcctctgctgagactgaagggattcccttcctttcctctggtcgagagacaggccaacgaagtggactggtgggacatggtgtgtaacgtgaagaagctgatcaacgagaaaaaggaggatggcaaggtgttttggcagaatctggctggctacaagagacaggaagccctgagaccatacctgagcagcgaggaagatcggaagaagggaaagaaattcgctcggtaccagctgggcgacctgctgctgcacctggaaaagaagcacggcgaggactggggaaaggtgtacgacgaggcctgggagcggattgacaagaaagtggaaggcctgagcaagcacatcaagctggaagaggaacggagaagcgaggacgcccagagcaaggccgccctgaccgactggctgcgggctaaggccagcttcgtgatcgagggcctgaaggaggccgacaaggacgagttctgcagatgcgagctgaagctgcagaagtggtacggggacctgcggggaaagcccttcgccatcgaagccgagaacagcatcctggacatcagcggcttcagcaagcagtacaactgtgccttcatctggcagaaggacggcgtgaagaagctgaacctgtacctgatcatcaactacttcaagggcggcaagctgcggttcaagaagatcaaacctgaagccttcgaagccaacagattctacaccgtgatcaacaaaaagagcggcgagatcgtgcccatggaggtgaacttcaacttcgacgaccccaacctgatcatcctgcctctggcctttggcaagagacagggcagagaattcatctggaacgacctgctgtccctggaaaccggcagcctgaagctggccaacggaagagtgatcgagaagacactgtacaacagaagaacccggcaggatgagcctgccctgttcgtggccctgaccttcgagcggcgggaggtcctggactcctccaatatcaaaccaatgaacctgatcggcgtggcaagaggcgaaaacatccccgccgtgatcgccctgaccgaccccgagggctgcccactgagccggtttaaggatagcctgggaaacccaacccacatcctgagaatcggcgagagctataaggagaagcagcggaccatccaggccaagaaggaggtggagcagcggagagccggcggctacagccggaagtacgccagcaaagccaagaatctggcagacgatatggtgagaaacaccgctagagatctgctgtactacgccgtgacccaggatgccatgctgatcttcgccaacctgagccggggcttcggccggcagggcaagcggaccttcatggccgagagacagtacacacggatggaggactggctgaccgccaagctggcctacgagggcctgagcaagacctacctgtccaagacactggcccagtacacctccaagacatgcagcaactgtgggtttaccatcaccagcgccgactacgacagggtgctggagaagctgaagaagacagcaacaggctggatgaccacaattaacggcaaggagctgaaggtggagggccagattacctactacaacagatacaagagacagaacgtagtcaaggacctgtccgtcgagctggatagactgagcgaagaatctgtgaacaacgacatctcctcctggacaaagggcagaagcggagaagctctgagcctcctgaagaaaagattctcccatagacccgtgcaggagaagttcgtgtgcctgaactgcggcttcgagacacacgcagccgagcaagccgccctgaacatcgccagatcctggctgttcctgcggagccaggagtacaagaaataccagacaaacaagacaaccggcaacaccgataagagagccttcgtcgagacctggcagtccttttaccggaagaagcttaaggaggtgtggaaacctgccgtgcggtctggcggatctggcggaggctcccagccccagggcaccatgaccttcaaggacgtggaggtgaccttcagccaggacgagtggggcctgctggacgccagccagaggaacctgtacagggacgtgatgctggagaactacggcaacatggccagcgtggtgggccccttcaccaagcccgccctgatcagctggctggaggccagggagccctggggcctgaacgtgcagggcgtgcagttcaagggcaaccccggcgccgcccccggcggcccaagcagcggcgcccctcctcccagcggcggcagcccagccggctccccaacctctaccgaggagggcacctctgagtccgccacccccgagagcggccctggcacctccaccgagcccagcgagggcagcgcacccggcagccctgccggcagccccacctccacagaggagggaaccagcaccgagcccagcgaaggcagcgccccaggcaccagcaccgagcctagtgagcaggagattaaacggatcaacaagatcagaagaagacttgtgaaagacagcaacaccaagaaggccggcaagacaggccccatgaaaaccctgctggttagagtgatgacacccgatctgagagagcggctggaaaacctgagaaagaagcctgaaaatatcccccagcccatcagcaatacatctagagccaacctgaataagctgctgaccgattacaccgaaatgaagaaggcgatcctgcatgtgtactgggaagagttccagaaggaccctgtgggcctgatgagccgggtggcccagcctgccagcaagaagatcgatcagaacaagctgaaacctgagatggacgagaagggcaacctgaccaccgccggctttgcctgctctcagtgtggccagcccctgttcgtgtacaagctggagcaggtgtctgagaagggcaaggcttacaccaactacttcggacggtgcaatgtggccgagcacgaaaagctgatcctgctggcccagctgaagcccgagaaggatagcgacgaagccgtgacatatagcctgggaaagtttgggcagagggccctggatttctacagcattcatgtgaccaaggagtccacccaccccgtgaagcccctggcccagatcgccggaaacagatacgcctccggacctgtgggaaaggccctgagcgacgcatgtatgggcacaatcgcctccttcctgtctaagtaccaggacatcatcatcgaacaccagaaggtggtgaagggcaaccagaagagactggagagcctgcgggagctggccggcaaggaaaacctggaataccctagcgtgaccctgccacctcagcctcacaccaaggagggcgttgatgcctacaacgaagtgatcgcccgggtgcgaatgtgggtgaacctgaacctgtggcagaagctgaagctaagcagagatgatgccaagcctctgctgagactgaagggattcccttcctttcctctggtcgagagacaggccaacgaagtggactggtgggacatggtgtgtaacgtgaagaagctgatcaacgagaaaaaggaggatggcaaggtgttttggcagaatctggctggctacaagagacaggaagccctgagaccatacctgagcagcgaggaagatcggaagaagggaaagaaattcgctcggtaccagctgggcgacctgctgctgcacctggaaaagaagcacggcgaggactggggaaaggtgtacgacgaggcctgggagcggattgacaagaaagtggaaggcctgagcaagcacatcaagctggaagaggaacggagaagcgaggacgcccagagcaaggccgccctgaccgactggctgcgggctaaggccagcttcgtgatcgagggcctgaaggaggccgacaaggacgagttctgcagatgcgagctgaagctgcagaagtggtacggggacctgcggggaaagcccttcgccatcgaagccgagaacagcatcctggacatcagcggcttcagcaagcagtacaactgtgccttcatctggcagaaggacggcgtgaagaagctgaacctgtacctgatcatcaactacttcaagggcggcaagctgcggttcaagaagatcaaacctgaagccttcgaagccaacagattctacaccgtgatcaacaaaaagagcggcgagatcgtgcccatggaggtgaacttcaacttcgacgaccccaacctgatcatcctgcctctggcctttggcaagagacagggcagagaattcatctggaacgacctgctgtccctggaaaccggcagcctgaagctggccaacggaagagtgatcgagaagacactgtacaacagaagaacccggcaggatgagcctgccctgttcgtggccctgaccttcgagcggcgggaggtcctggactcctccaatatcaaaccaatgaacctgatcggcgtggcaagaggcgaaaacatccccgccgtgatcgccctgaccgaccccgagggctgcccactgagccggtttaaggatagcctgggaaacccaacccacatcctgagaatcggcgagagctataaggagaagcagcggaccatccaggccaagaaggaggtggagcagcggagagccggcggctacagccggaagtacgccagcaaagccaagaatctggcagacgatatggtgagaaacaccgctagagatctgctgtactacgccgtgacccaggatgccatgctgatcttcgccaacctgagccggggcttcggccggcagggcaagcggaccttcatggccgagagacagtacacacggatggaggactggctgaccgccaagctggcctacgagggcctgagcaagacctacctgtccaagacactggcccagtacacctccaagacatgcagcaactgtgggtttaccatcaccagcgccgactacgacagggtgctggagaagctgaagaagacagcaacaggctggatgaccacaattaacggcaaggagctgaaggtggagggccagattacctactacaacagatacaagagacagaacgtagtcaaggacctgtccgtcgagctggatagactgagcgaagaatctgtgaacaacgacatctcctcctggacaaagggcagaagcggagaagctctgagcctcctgaagaaaagattctcccatagacccgtgcaggagaagttcgtgtgcctgaactgcggcttcgagacacacgcagccgagcaagccgccctgaacatcgccagatcctggctgttcctgcggagccaggagtacaagaaataccagacaaacaagacaaccggcaacaccgataagagagccttcgtcgagacctggcagtccttttaccggaagaagcttaaggaggtgtggaaacctgccgtgcggtctggcggatctggcggaggctcctcagccccagggcaccatgaccttcaaggacgtggaggtgaccttcagccaggacgagtggggcctgctggacgccagccagaggaacctgtacagggacgtgatgctggagaactacggcaacatggccagcgtggtgggccccttcaccaagcccgccctgatcagctggctggaggccagggagccctggggcctgaacgtgcagggcgtgcagttcaagggcaaccccggcgccgcccccggatctggctccggcagcggccccaagaaaaagagaaaagtctaagctgccttctgcggggcttgccttctggccatgcccttcttctctcccttgcacctgtacctcttggtctttgaataaagcctgagtaggaaggctagcaaaaaaaaaaaaaaaaaaaaaaaaaaaaaaaaaaaaaaaaaaaaaaaaaaaaaaaaaaaaaaaaaaaaaaaaaaaaaaaa

SEQ ID NO: 15412 - RNA, 9485 nt, synthetic construct
  source 1..9485: mol_type = other RNA
aggaaataagagagaaaagaagagtaagaagaaatataagagccaccatggcccctaagaagaagcgtaaagtgagccggatggaacgcctcgtctacgaggtgcggcagaagtgcagaaacatcgaggacatctgcatctcctgcggatctctgaacgtgaccctggagcacccactgttcatcggcggcatgtgccagaactgtaaaaactgttttctggagtgtgcctatcaatacgacgatgacggctaccagagctactgcaccatctgttgcggcggaagagaggtgctgatgtgtggaaataacaactgctgccggtgcttctgcgtggaatgcgtggacctgctggtgggccccggcgccgcccaggccgctattaaggaagatccttggaactgctacatgtgcggccacaagggcacatacggcctgctgagacggagagaggactggcctagcagactgcagatgttcttcgccaataaccacgaccaggagttcgacccccctaaggtgtaccctcccgtccccgccgagaagagaaagcccatccgggtcctgagcctgttcgatggcatcgccaccggtctgctggtgctgaaggacctgggcatccaggtggataggtacattgcctccgaggtgtgcgaggactccatcaccgtgggaatggtgcgtcatcagggcaagatcatgtacgtgggcgacgtgcggagcgtgacacagaagcatatccaggagtggggccctttcgacctggtgatcggcggcagcccttgcaatgacctgagcatcgtgaacccagcccggaagggcctgtacgagggaaccggcagactgttcttcgagttttacagactgctgcacgacgcccggcctaaggaaggcgacgaccggcccttcttttggctgttcgagaatgtggtggccatgggagtcagcgacaagcgggatattagccggttcctggagagcaaccccgtgatgatcgatgccaaggaagtgagcgccgcccaccgggccagatacttctggggcaatctgcctggcatgaacagacccctggccagcaccgtgaacgacaagctggagctgcaggagtgcctggagcacggccggatcgccaagttcagcaaggtgagaaccatcaccacccgaagcaacagcatcaaacaaggcaaggaccagcactttcctgtgttcatgaacgagaaggaggacatcctgtggtgtaccgagatggagagagtgttcgggttcccagtccactacacagatgtcagcaacatgtctagactggccagacagagactgctgggaagaagctggtccgtccctgtgatcagacacctgttcgcccctctgaaggagtacttcgcctgcgtgagcagcggcaacagcaacgccaacagccggggccccagcttctctagcggcctggtgccactgtccctgagagggagccacatgggccccatggagatctacaaaaccgtgagcgcctggaagcggcagcctgtgcgcgtgctgagcctgtttcggaatatcgataaagtcctgaaaagcctgggattcctggagagcggctctggctccggcggtggcaccctgaagtacgtggaggatgtgacaaacgtggtcagacgggatgtggagaagtggggccccttcgatctggtgtacggcagcacccaacccctgggcagctcttgtgaccggtgccctggctggtacatgtttcagttccaccggatcctgcagtacgccctgccgagacaggagtcccagcggccattcttttggattttcatggacaacttgctgctgaccgaggatgaccaggaaactaccactcggttcctgcagaccgaagccgtgaccctgcaggacgtgagaggccgggactaccagaacgccatgcgggtgtggtccaacatccctggactgaaaagcaagcacgcacctctgacccctaaagaagaggagtacctgcaggcccaggtgcggagcagaagcaagctggacgcccctaaggtggatctgctggtgaagaattgcctcctgcccctgagagagtacttcaagtatttcagccagaatagtctgcccctgggaggcagcggcggcggcgccctggtgacatttgaggacgtcgccgtgcggttcacccaggaggaatgggctctgctggatccttctcagaaaatcctgtaccgggacgtgatgagagagacataccggaatctgacctccgtgggcatcaactgggaatgttgggaccttgaagcctgcttcagaagcctgggaagaaacctgagagtgcaggtggtgaagagaaagtgcgagctgaccaacagcggcccctgcgccgagggcggcccaagcagcggcgcccctcctcccagcggcggcagcccagccggctccccaacctctaccgaggagggcacctctgagtccgccacccccgagagcggccctggcacctccaccgagcccagcgagggcagcgcacccggcagccctgccggcagccccacctccacagaggagggaaccagcaccgagcccagcgaaggcagcgccccaggcaccagcaccgagcctagtgagcaggagattaaacggatcaacaagatcagaagaagacttgtgaaagacagcaacaccaagaaggccggcaagacaggccccatgaaaaccctgctggttagagtgatgacacccgatctgagagagcggctggaaaacctgagaaagaagcctgaaaatatcccccagcccatcagcaatacatctagagccaacctgaataagctgctgaccgattacaccgaaatgaagaaggcgatcctgcatgtgtactgggaagagttccagaaggaccctgtgggcctgatgagccgggtggcccagcctgccagcaagaagatcgatcagaacaagctgaaacctgagatggacgagaagggcaacctgaccaccgccggctttgcctgctctcagtgtggccagcccctgttcgtgtacaagctggagcaggtgtctgagaagggcaaggcttacaccaactacttcggacggtgcaatgtggccgagcacgaaaagctgatcctgctggcccagctgaagcccgagaaggatagcgacgaagccgtgacatatagcctgggaaagtttgggcagagggccctggatttctacagcattcatgtgaccaaggagtccacccaccccgtgaagcccctggcccagatcgccggaaacagatacgcctccggacctgtgggaaaggccctgagcgacgcatgtatgggcacaatcgcctccttcctgtctaagtaccaggacatcatcatcgaacaccagaaggtggtgaagggcaaccagaagagactggagagcctgcgggagctggccggcaaggaaaacctggaataccctagcgtgaccctgccacctcagcctcacaccaaggagggcgttgatgcctacaacgaagtgatcgcccgggtgcgaatgtgggtgaacctgaacctgtggcagaagctgaagctaagcagagatgatgccaagcctctgctgagactgaagggattcccttcctttcctctggtcgagagacaggccaacgaagtggactggtgggacatggtgtgtaacgtgaagaagctgatcaacgagaaaaaggaggatggcaaggtgttttggcagaatctggctggctacaagagacaggaagccctgagaccatacctgagcagcgaggaagatcggaagaagggaaagaaattcgctcggtaccagctgggcgacctgctgctgcacctggaaaagaagcacggcgaggactggggaaaggtgtacgacgaggcctgggagcggattgacaagaaagtggaaggcctgagcaagcacatcaagctggaagaggaacggagaagcgaggacgcccagagcaaggccgccctgaccgactggctgcgggctaaggccagcttcgtgatcgagggcctgaaggaggccgacaaggacgagttctgcagatgcgagctgaagctgcagaagtggtacggggacctgcggggaaagcccttcgccatcgaagccgagaacagcatcctggacatcagcggcttcagcaagcagtacaactgtgccttcatctggcagaaggacggcgtgaagaagctgaacctgtacctgatcatcaactacttcaagggcggcaagctgcggttcaagaagatcaaacctgaagccttcgaagccaacagattctacaccgtgatcaacaaaaagagcggcgagatcgtgcccatggaggtgaacttcaacttcgacgaccccaacctgatcatcctgcctctggcctttggcaagagacagggcagagaattcatctggaacgacctgctgtccctggaaaccggcagcctgaagctggccaacggaagagtgatcgagaagacactgtacaacagaagaacccggcaggatgagcctgccctgttcgtggccctgaccttcgagcggcgggaggtcctggactcctccaatatcaaaccaatgaacctgatcggcgtggcaagaggcgaaaacatccccgccgtgatcgccctgaccgaccccgagggctgcccactgagccggtttaaggatagcctgggaaacccaacccacatcctgagaatcggcgagagctataaggagaagcagcggaccatccaggccaagaaggaggtggagcagcggagagccggcggctacagccggaagtacgccagcaaagccaagaatctggcagacgatatggtgagaaacaccgctagagatctgctgtactacgccgtgacccaggatgccatgctgatcttcgccaacctgagccggggcttcggccggcagggcaagcggaccttcatggccgagagacagtacacacggatggaggactggctgaccgccaagctggcctacgagggcctgagcaagacctacctgtccaagacactggcccagtacacctccaagacatgcagcaactgtgggtttaccatcaccagcgccgactacgacagggtgctggagaagctgaagaagacagcaacaggctggatgaccacaattaacggcaaggagctgaaggtggagggccagattacctactacaacagatacaagagacagaacgtagtcaaggacctgtccgtcgagctggatagactgagcgaagaatctgtgaacaacgacatctcctcctggacaaagggcagaagcggagaagctctgagcctcctgaagaaaagattctcccatagacccgtgcaggagaagttcgtgtgcctgaactgcggcttcgagacacacgcagccgagcaagccgccctgaacatcgccagatcctggctgttcctgcggagccaggagtacaagaaataccagacaaacaagacaaccggcaacaccgataagagagccttcgtcgagacctggcagtccttttaccggaagaagcttaaggaggtgtggaaacctgccgtgcggtctggcggatctggcggaggctccaggcccggcgccgtgagcttcgccgacgtggccgtgtacttcagccccgaggagtggggctgcctgaggcccgcccagagggccctgtacagggacgtgatgagggagacctacggccacctgggcgccctgggcttcgccggccccaagcccgccctgatcagctggctggagaggaagaaggaggtgtggagccccgaggccgaggaccccgaggagggcgccaggcaccccggcagcggcggcggcccaagcagcggcgcccctcctcccagcggcggcagcccagccggctccccaacctctaccgaggagggcacctctgagtccgccacccccgagagcggccctggcacctccaccgagcccagcgagggcagcgcacccggcagccctgccggcagccccacctccacagaggagggaaccagcaccgagcccagcgaaggcagcgccccaggcaccagcaccgagcctagtgagcaggagattaaacggatcaacaagatcagaagaagacttgtgaaagacagcaacaccaagaaggccggcaagacaggccccatgaaaaccctgctggttagagtgatgacacccgatctgagagagcggctggaaaacctgagaaagaagcctgaaaatatcccccagcccatcagcaatacatctagagccaacctgaataagctgctgaccgattacaccgaaatgaagaaggcgatcctgcatgtgtactgggaagagttccagaaggaccctgtgggcctgatgagccgggtggcccagcctgccagcaagaagatcgatcagaacaagctgaaacctgagatggacgagaagggcaacctgaccaccgccggctttgcctgctctcagtgtggccagcccctgttcgtgtacaagctggagcaggtgtctgagaagggcaaggcttacaccaactacttcggacggtgcaatgtggccgagcacgaaaagctgatcctgctggcccagctgaagcccgagaaggatagcgacgaagccgtgacatatagcctgggaaagtttgggcagagggccctggatttctacagcattcatgtgaccaaggagtccacccaccccgtgaagcccctggcccagatcgccggaaacagatacgcctccggacctgtgggaaaggccctgagcgacgcatgtatgggcacaatcgcctccttcctgtctaagtaccaggacatcatcatcgaacaccagaaggtggtgaagggcaaccagaagagactggagagcctgcgggagctggccggcaaggaaaacctggaataccctagcgtgaccctgccacctcagcctcacaccaaggagggcgttgatgcctacaacgaagtgatcgcccgggtgcgaatgtgggtgaacctgaacctgtggcagaagctgaagctaagcagagatgatgccaagcctctgctgagactgaagggattcccttcctttcctctggtcgagagacaggccaacgaagtggactggtgggacatggtgtgtaacgtgaagaagctgatcaacgagaaaaaggaggatggcaaggtgttttggcagaatctggctggctacaagagacaggaagccctgagaccatacctgagcagcgaggaagatcggaagaagggaaagaaattcgctcggtaccagctgggcgacctgctgctgcacctggaaaagaagcacggcgaggactggggaaaggtgtacgacgaggcctgggagcggattgacaagaaagtggaaggcctgagcaagcacatcaagctggaagaggaacggagaagcgaggacgcccagagcaaggccgccctgaccgactggctgcgggctaaggccagcttcgtgatcgagggcctgaaggaggccgacaaggacgagttctgcagatgcgagctgaagctgcagaagtggtacggggacctgcggggaaagcccttcgccatcgaagccgagaacagcatcctggacatcagcggcttcagcaagcagtacaactgtgccttcatctggcagaaggacggcgtgaagaagctgaacctgtacctgatcatcaactacttcaagggcggcaagctgcggttcaagaagatcaaacctgaagccttcgaagccaacagattctacaccgtgatcaacaaaaagagcggcgagatcgtgcccatggaggtgaacttcaacttcgacgaccccaacctgatcatcctgcctctggcctttggcaagagacagggcagagaattcatctggaacgacctgctgtccctggaaaccggcagcctgaagctggccaacggaagagtgatcgagaagacactgtacaacagaagaacccggcaggatgagcctgccctgttcgtggccctgaccttcgagcggcgggaggtcctggactcctccaatatcaaaccaatgaacctgatcggcgtggcaagaggcgaaaacatccccgccgtgatcgccctgaccgaccccgagggctgcccactgagccggtttaaggatagcctgggaaacccaacccacatcctgagaatcggcgagagctataaggagaagcagcggaccatccaggccaagaaggaggtggagcagcggagagccggcggctacagccggaagtacgccagcaaagccaagaatctggcagacgatatggtgagaaacaccgctagagatctgctgtactacgccgtgacccaggatgccatgctgatcttcgccaacctgagccggggcttcggccggcagggcaagcggaccttcatggccgagagacagtacacacggatggaggactggctgaccgccaagctggcctacgagggcctgagcaagacctacctgtccaagacactggcccagtacacctccaagacatgcagcaactgtgggtttaccatcaccagcgccgactacgacagggtgctggagaagctgaagaagacagcaacaggctggatgaccacaattaacggcaaggagctgaaggtggagggccagattacctactacaacagatacaagagacagaacgtagtcaaggacctgtccgtcgagctggatagactgagcgaagaatctgtgaacaacgacatctcctcctggacaaagggcagaagcggagaagctctgagcctcctgaagaaaagattctcccatagacccgtgcaggagaagttcgtgtgcctgaactgcggcttcgagacacacgcagccgagcaagccgccctgaacatcgccagatcctggctgttcctgcggagccaggagtacaagaaataccagacaaacaagacaaccggcaacaccgataagagagccttcgtcgagacctggcagtccttttaccggaagaagcttaaggaggtgtggaaacctgccgtgcggtctggcggatctggcggaggctcctaggcccggcgccgtgagcttcgccgacgtggccgtgtacttcagccccgaggagtggggctgcctgaggcccgcccagagggccctgtacagggacgtgatgagggagacctacggccacctgggcgccctgggcttcgccggccccaagcccgccctgatcagctggctggagaggaagaaggaggtgtggagccccgaggccgaggaccccgaggagggcgccaggcaccccggcagcggcggatctggctccggcagcggccccaagaaaaagagaaaagtctaagctgccttctgcggggcttgccttctggccatgcccttcttctctcccttgcacctgtacctcttggtctttgaataaagcctgagtaggaaggctagcaaaaaaaaaaaaaaaaaaaaaaaaaaaaaaaaaaaaaaaaaaaaaaaaaaaaaaaaaaaaaaaaaaaaaaaaaaaaaaaa

SEQ ID NO: 15413 - RNA, 9485 nt, synthetic construct
  source 1..9485: mol_type = other RNA
aggaaataagagagaaaagaagagtaagaagaaatataagagccaccatggcccctaagaagaagcgtaaagtgagccggatggaacgcctcgtctacgaggtgcggcagaagtgcagaaacatcgaggacatctgcatctcctgcggatctctgaacgtgaccctggagcacccactgttcatcggcggcatgtgccagaactgtaaaaactgttttctggagtgtgcctatcaatacgacgatgacggctaccagagctactgcaccatctgttgcggcggaagagaggtgctgatgtgtggaaataacaactgctgccggtgcttctgcgtggaatgcgtggacctgctggtgggccccggcgccgcccaggccgctattaaggaagatccttggaactgctacatgtgcggccacaagggcacatacggcctgctgagacggagagaggactggcctagcagactgcagatgttcttcgccaataaccacgaccaggagttcgacccccctaaggtgtaccctcccgtccccgccgagaagagaaagcccatccgggtcctgagcctgttcgatggcatcgccaccggtctgctggtgctgaaggacctgggcatccaggtggataggtacattgcctccgaggtgtgcgaggactccatcaccgtgggaatggtgcgtcatcagggcaagatcatgtacgtgggcgacgtgcggagcgtgacacagaagcatatccaggagtggggccctttcgacctggtgatcggcggcagcccttgcaatgacctgagcatcgtgaacccagcccggaagggcctgtacgagggaaccggcagactgttcttcgagttttacagactgctgcacgacgcccggcctaaggaaggcgacgaccggcccttcttttggctgttcgagaatgtggtggccatgggagtcagcgacaagcgggatattagccggttcctggagagcaaccccgtgatgatcgatgccaaggaagtgagcgccgcccaccgggccagatacttctggggcaatctgcctggcatgaacagacccctggccagcaccgtgaacgacaagctggagctgcaggagtgcctggagcacggccggatcgccaagttcagcaaggtgagaaccatcaccacccgaagcaacagcatcaaacaaggcaaggaccagcactttcctgtgttcatgaacgagaaggaggacatcctgtggtgtaccgagatggagagagtgttcgggttcccagtccactacacagatgtcagcaacatgtctagactggccagacagagactgctgggaagaagctggtccgtccctgtgatcagacacctgttcgcccctctgaaggagtacttcgcctgcgtgagcagcggcaacagcaacgccaacagccggggccccagcttctctagcggcctggtgccactgtccctgagagggagccacatgggccccatggagatctacaaaaccgtgagcgcctggaagcggcagcctgtgcgcgtgctgagcctgtttcggaatatcgataaagtcctgaaaagcctgggattcctggagagcggctctggctccggcggtggcaccctgaagtacgtggaggatgtgacaaacgtggtcagacgggatgtggagaagtggggccccttcgatctggtgtacggcagcacccaacccctgggcagctcttgtgaccggtgccctggctggtacatgtttcagttccaccggatcctgcagtacgccctgccgagacaggagtcccagcggccattcttttggattttcatggacaacttgctgctgaccgaggatgaccaggaaactaccactcggttcctgcagaccgaagccgtgaccctgcaggacgtgagaggccgggactaccagaacgccatgcgggtgtggtccaacatccctggactgaaaagcaagcacgcacctctgacccctaaagaagaggagtacctgcaggcccaggtgcggagcagaagcaagctggacgcccctaaggtggatctgctggtgaagaattgcctcctgcccctgagagagtacttcaagtatttcagccagaatagtctgcccctgggaggcagcggcggcggcgccctggtgacatttgaggacgtcgccgtgcggttcacccaggaggaatgggctctgctggatccttctcagaaaatcctgtaccgggacgtgatgagagagacataccggaatctgacctccgtgggcatcaactgggaatgttgggaccttgaagcctgcttcagaagcctgggaagaaacctgagagtgcaggtggtgaagagaaagtgcgagctgaccaacagcggcccctgcgccgagggcggcccaagcagcggcgcccctcctcccagcggcggcagcccagccggctccccaacctctaccgaggagggcacctctgagtccgccacccccgagagcggccctggcacctccaccgagcccagcgagggcagcgcacccggcagccctgccggcagccccacctccacagaggagggaaccagcaccgagcccagcgaaggcagcgccccaggcaccagcaccgagcctagtgagcaggagattaaacggatcaacaagatcagaagaagacttgtgaaagacagcaacaccaagaaggccggcaagacaggccccatgaaaaccctgctggttagagtgatgacacccgatctgagagagcggctggaaaacctgagaaagaagcctgaaaatatcccccagcccatcagcaatacatctagagccaacctgaataagctgctgaccgattacaccgaaatgaagaaggcgatcctgcatgtgtactgggaagagttccagaaggaccctgtgggcctgatgagccgggtggcccagcctgccagcaagaagatcgatcagaacaagctgaaacctgagatggacgagaagggcaacctgaccaccgccggctttgcctgctctcagtgtggccagcccctgttcgtgtacaagctggagcaggtgtctgagaagggcaaggcttacaccaactacttcggacggtgcaatgtggccgagcacgaaaagctgatcctgctggcccagctgaagcccgagaaggatagcgacgaagccgtgacatatagcctgggaaagtttgggcagagggccctggatttctacagcattcatgtgaccaaggagtccacccaccccgtgaagcccctggcccagatcgccggaaacagatacgcctccggacctgtgggaaaggccctgagcgacgcatgtatgggcacaatcgcctccttcctgtctaagtaccaggacatcatcatcgaacaccagaaggtggtgaagggcaaccagaagagactggagagcctgcgggagctggccggcaaggaaaacctggaataccctagcgtgaccctgccacctcagcctcacaccaaggagggcgttgatgcctacaacgaagtgatcgcccgggtgcgaatgtgggtgaacctgaacctgtggcagaagctgaagctaagcagagatgatgccaagcctctgctgagactgaagggattcccttcctttcctctggtcgagagacaggccaacgaagtggactggtgggacatggtgtgtaacgtgaagaagctgatcaacgagaaaaaggaggatggcaaggtgttttggcagaatctggctggctacaagagacaggaagccctgagaccatacctgagcagcgaggaagatcggaagaagggaaagaaattcgctcggtaccagctgggcgacctgctgctgcacctggaaaagaagcacggcgaggactggggaaaggtgtacgacgaggcctgggagcggattgacaagaaagtggaaggcctgagcaagcacatcaagctggaagaggaacggagaagcgaggacgcccagagcaaggccgccctgaccgactggctgcgggctaaggccagcttcgtgatcgagggcctgaaggaggccgacaaggacgagttctgcagatgcgagctgaagctgcagaagtggtacggggacctgcggggaaagcccttcgccatcgaagccgagaacagcatcctggacatcagcggcttcagcaagcagtacaactgtgccttcatctggcagaaggacggcgtgaagaagctgaacctgtacctgatcatcaactacttcaagggcggcaagctgcggttcaagaagatcaaacctgaagccttcgaagccaacagattctacaccgtgatcaacaaaaagagcggcgagatcgtgcccatggaggtgaacttcaacttcgacgaccccaacctgatcatcctgcctctggcctttggcaagagacagggcagagaattcatctggaacgacctgctgtccctggaaaccggcagcctgaagctggccaacggaagagtgatcgagaagacactgtacaacagaagaacccggcaggatgagcctgccctgttcgtggccctgaccttcgagcggcgggaggtcctggactcctccaatatcaaaccaatgaacctgatcggcgtggcaagaggcgaaaacatccccgccgtgatcgccctgaccgaccccgagggctgcccactgagccggtttaaggatagcctgggaaacccaacccacatcctgagaatcggcgagagctataaggagaagcagcggaccatccaggccaagaaggaggtggagcagcggagagccggcggctacagccggaagtacgccagcaaagccaagaatctggcagacgatatggtgagaaacaccgctagagatctgctgtactacgccgtgacccaggatgccatgctgatcttcgccaacctgagccggggcttcggccggcagggcaagcggaccttcatggccgagagacagtacacacggatggaggactggctgaccgccaagctggcctacgagggcctgagcaagacctacctgtccaagacactggcccagtacacctccaagacatgcagcaactgtgggtttaccatcaccagcgccgactacgacagggtgctggagaagctgaagaagacagcaacaggctggatgaccacaattaacggcaaggagctgaaggtggagggccagattacctactacaacagatacaagagacagaacgtagtcaaggacctgtccgtcgagctggatagactgagcgaagaatctgtgaacaacgacatctcctcctggacaaagggcagaagcggagaagctctgagcctcctgaagaaaagattctcccatagacccgtgcaggagaagttcgtgtgcctgaactgcggcttcgagacacacgcagccgagcaagccgccctgaacatcgccagatcctggctgttcctgcggagccaggagtacaagaaataccagacaaacaagacaaccggcaacaccgataagagagccttcgtcgagacctggcagtccttttaccggaagaagcttaaggaggtgtggaaacctgccgtgcggtctggcggatctggcggaggctcctggcccgagagcgtgaccttcgaggacgtggccgtgtacttcacccagaaccagtgggccagcctggaccccgcccagagggccctgtacagggaggtgatgctggagaactacgccaacgtggccagcctggtggccttccccttccccaagcccgccctgatcagccacctggagaggggcgaggccccctggggccccgacccctgggacaccgagatccccaggggcatcagccagggcggcggcccaagcagcggcgcccctcctcccagcggcggcagcccagccggctccccaacctctaccgaggagggcacctctgagtccgccacccccgagagcggccctggcacctccaccgagcccagcgagggcagcgcacccggcagccctgccggcagccccacctccacagaggagggaaccagcaccgagcccagcgaaggcagcgccccaggcaccagcaccgagcctagtgagcaggagattaaacggatcaacaagatcagaagaagacttgtgaaagacagcaacaccaagaaggccggcaagacaggccccatgaaaaccctgctggttagagtgatgacacccgatctgagagagcggctggaaaacctgagaaagaagcctgaaaatatcccccagcccatcagcaatacatctagagccaacctgaataagctgctgaccgattacaccgaaatgaagaaggcgatcctgcatgtgtactgggaagagttccagaaggaccctgtgggcctgatgagccgggtggcccagcctgccagcaagaagatcgatcagaacaagctgaaacctgagatggacgagaagggcaacctgaccaccgccggctttgcctgctctcagtgtggccagcccctgttcgtgtacaagctggagcaggtgtctgagaagggcaaggcttacaccaactacttcggacggtgcaatgtggccgagcacgaaaagctgatcctgctggcccagctgaagcccgagaaggatagcgacgaagccgtgacatatagcctgggaaagtttgggcagagggccctggatttctacagcattcatgtgaccaaggagtccacccaccccgtgaagcccctggcccagatcgccggaaacagatacgcctccggacctgtgggaaaggccctgagcgacgcatgtatgggcacaatcgcctccttcctgtctaagtaccaggacatcatcatcgaacaccagaaggtggtgaagggcaaccagaagagactggagagcctgcgggagctggccggcaaggaaaacctggaataccctagcgtgaccctgccacctcagcctcacaccaaggagggcgttgatgcctacaacgaagtgatcgcccgggtgcgaatgtgggtgaacctgaacctgtggcagaagctgaagctaagcagagatgatgccaagcctctgctgagactgaagggattcccttcctttcctctggtcgagagacaggccaacgaagtggactggtgggacatggtgtgtaacgtgaagaagctgatcaacgagaaaaaggaggatggcaaggtgttttggcagaatctggctggctacaagagacaggaagccctgagaccatacctgagcagcgaggaagatcggaagaagggaaagaaattcgctcggtaccagctgggcgacctgctgctgcacctggaaaagaagcacggcgaggactggggaaaggtgtacgacgaggcctgggagcggattgacaagaaagtggaaggcctgagcaagcacatcaagctggaagaggaacggagaagcgaggacgcccagagcaaggccgccctgaccgactggctgcgggctaaggccagcttcgtgatcgagggcctgaaggaggccgacaaggacgagttctgcagatgcgagctgaagctgcagaagtggtacggggacctgcggggaaagcccttcgccatcgaagccgagaacagcatcctggacatcagcggcttcagcaagcagtacaactgtgccttcatctggcagaaggacggcgtgaagaagctgaacctgtacctgatcatcaactacttcaagggcggcaagctgcggttcaagaagatcaaacctgaagccttcgaagccaacagattctacaccgtgatcaacaaaaagagcggcgagatcgtgcccatggaggtgaacttcaacttcgacgaccccaacctgatcatcctgcctctggcctttggcaagagacagggcagagaattcatctggaacgacctgctgtccctggaaaccggcagcctgaagctggccaacggaagagtgatcgagaagacactgtacaacagaagaacccggcaggatgagcctgccctgttcgtggccctgaccttcgagcggcgggaggtcctggactcctccaatatcaaaccaatgaacctgatcggcgtggcaagaggcgaaaacatccccgccgtgatcgccctgaccgaccccgagggctgcccactgagccggtttaaggatagcctgggaaacccaacccacatcctgagaatcggcgagagctataaggagaagcagcggaccatccaggccaagaaggaggtggagcagcggagagccggcggctacagccggaagtacgccagcaaagccaagaatctggcagacgatatggtgagaaacaccgctagagatctgctgtactacgccgtgacccaggatgccatgctgatcttcgccaacctgagccggggcttcggccggcagggcaagcggaccttcatggccgagagacagtacacacggatggaggactggctgaccgccaagctggcctacgagggcctgagcaagacctacctgtccaagacactggcccagtacacctccaagacatgcagcaactgtgggtttaccatcaccagcgccgactacgacagggtgctggagaagctgaagaagacagcaacaggctggatgaccacaattaacggcaaggagctgaaggtggagggccagattacctactacaacagatacaagagacagaacgtagtcaaggacctgtccgtcgagctggatagactgagcgaagaatctgtgaacaacgacatctcctcctggacaaagggcagaagcggagaagctctgagcctcctgaagaaaagattctcccatagacccgtgcaggagaagttcgtgtgcctgaactgcggcttcgagacacacgcagccgagcaagccgccctgaacatcgccagatcctggctgttcctgcggagccaggagtacaagaaataccagacaaacaagacaaccggcaacaccgataagagagccttcgtcgagacctggcagtccttttaccggaagaagcttaaggaggtgtggaaacctgccgtgcggtctggcggatctggcggaggctccttggcccgagagcgtgaccttcgaggacgtggccgtgtacttcacccagaaccagtgggccagcctggaccccgcccagagggccctgtacagggaggtgatgctggagaactacgccaacgtggccagcctggtggccttccccttccccaagcccgccctgatcagccacctggagaggggcgaggccccctggggccccgacccctgggacaccgagatccccaggggcatcagccagggcggatctggctccggcagcggccccaagaaaaagagaaaagtctaagctgccttctgcggggcttgccttctggccatgcccttcttctctcccttgcacctgtacctcttggtctttgaataaagcctgagtaggaaggctagcaaaaaaaaaaaaaaaaaaaaaaaaaaaaaaaaaaaaaaaaaaaaaaaaaaaaaaaaaaaaaaaaaaaaaaaaaaaaaaaa

SEQ ID NO: 15414 - RNA, 9485 nt, synthetic construct
  source 1..9485: mol_type = other RNA
aggaaataagagagaaaagaagagtaagaagaaatataagagccaccatggcccctaagaagaagcgtaaagtgagccggatggaacgcctcgtctacgaggtgcggcagaagtgcagaaacatcgaggacatctgcatctcctgcggatctctgaacgtgaccctggagcacccactgttcatcggcggcatgtgccagaactgtaaaaactgttttctggagtgtgcctatcaatacgacgatgacggctaccagagctactgcaccatctgttgcggcggaagagaggtgctgatgtgtggaaataacaactgctgccggtgcttctgcgtggaatgcgtggacctgctggtgggccccggcgccgcccaggccgctattaaggaagatccttggaactgctacatgtgcggccacaagggcacatacggcctgctgagacggagagaggactggcctagcagactgcagatgttcttcgccaataaccacgaccaggagttcgacccccctaaggtgtaccctcccgtccccgccgagaagagaaagcccatccgggtcctgagcctgttcgatggcatcgccaccggtctgctggtgctgaaggacctgggcatccaggtggataggtacattgcctccgaggtgtgcgaggactccatcaccgtgggaatggtgcgtcatcagggcaagatcatgtacgtgggcgacgtgcggagcgtgacacagaagcatatccaggagtggggccctttcgacctggtgatcggcggcagcccttgcaatgacctgagcatcgtgaacccagcccggaagggcctgtacgagggaaccggcagactgttcttcgagttttacagactgctgcacgacgcccggcctaaggaaggcgacgaccggcccttcttttggctgttcgagaatgtggtggccatgggagtcagcgacaagcgggatattagccggttcctggagagcaaccccgtgatgatcgatgccaaggaagtgagcgccgcccaccgggccagatacttctggggcaatctgcctggcatgaacagacccctggccagcaccgtgaacgacaagctggagctgcaggagtgcctggagcacggccggatcgccaagttcagcaaggtgagaaccatcaccacccgaagcaacagcatcaaacaaggcaaggaccagcactttcctgtgttcatgaacgagaaggaggacatcctgtggtgtaccgagatggagagagtgttcgggttcccagtccactacacagatgtcagcaacatgtctagactggccagacagagactgctgggaagaagctggtccgtccctgtgatcagacacctgttcgcccctctgaaggagtacttcgcctgcgtgagcagcggcaacagcaacgccaacagccggggccccagcttctctagcggcctggtgccactgtccctgagagggagccacatgggccccatggagatctacaaaaccgtgagcgcctggaagcggcagcctgtgcgcgtgctgagcctgtttcggaatatcgataaagtcctgaaaagcctgggattcctggagagcggctctggctccggcggtggcaccctgaagtacgtggaggatgtgacaaacgtggtcagacgggatgtggagaagtggggccccttcgatctggtgtacggcagcacccaacccctgggcagctcttgtgaccggtgccctggctggtacatgtttcagttccaccggatcctgcagtacgccctgccgagacaggagtcccagcggccattcttttggattttcatggacaacttgctgctgaccgaggatgaccaggaaactaccactcggttcctgcagaccgaagccgtgaccctgcaggacgtgagaggccgggactaccagaacgccatgcgggtgtggtccaacatccctggactgaaaagcaagcacgcacctctgacccctaaagaagaggagtacctgcaggcccaggtgcggagcagaagcaagctggacgcccctaaggtggatctgctggtgaagaattgcctcctgcccctgagagagtacttcaagtatttcagccagaatagtctgcccctgggaggcagcggcggcggcgccctggtgacatttgaggacgtcgccgtgcggttcacccaggaggaatgggctctgctggatccttctcagaaaatcctgtaccgggacgtgatgagagagacataccggaatctgacctccgtgggcatcaactgggaatgttgggaccttgaagcctgcttcagaagcctgggaagaaacctgagagtgcaggtggtgaagagaaagtgcgagctgaccaacagcggcccctgcgccgagggcggcccaagcagcggcgcccctcctcccagcggcggcagcccagccggctccccaacctctaccgaggagggcacctctgagtccgccacccccgagagcggccctggcacctccaccgagcccagcgagggcagcgcacccggcagccctgccggcagccccacctccacagaggagggaaccagcaccgagcccagcgaaggcagcgccccaggcaccagcaccgagcctagtgagcaggagattaaacggatcaacaagatcagaagaagacttgtgaaagacagcaacaccaagaaggccggcaagacaggccccatgaaaaccctgctggttagagtgatgacacccgatctgagagagcggctggaaaacctgagaaagaagcctgaaaatatcccccagcccatcagcaatacatctagagccaacctgaataagctgctgaccgattacaccgaaatgaagaaggcgatcctgcatgtgtactgggaagagttccagaaggaccctgtgggcctgatgagccgggtggcccagcctgccagcaagaagatcgatcagaacaagctgaaacctgagatggacgagaagggcaacctgaccaccgccggctttgcctgctctcagtgtggccagcccctgttcgtgtacaagctggagcaggtgtctgagaagggcaaggcttacaccaactacttcggacggtgcaatgtggccgagcacgaaaagctgatcctgctggcccagctgaagcccgagaaggatagcgacgaagccgtgacatatagcctgggaaagtttgggcagagggccctggatttctacagcattcatgtgaccaaggagtccacccaccccgtgaagcccctggcccagatcgccggaaacagatacgcctccggacctgtgggaaaggccctgagcgacgcatgtatgggcacaatcgcctccttcctgtctaagtaccaggacatcatcatcgaacaccagaaggtggtgaagggcaaccagaagagactggagagcctgcgggagctggccggcaaggaaaacctggaataccctagcgtgaccctgccacctcagcctcacaccaaggagggcgttgatgcctacaacgaagtgatcgcccgggtgcgaatgtgggtgaacctgaacctgtggcagaagctgaagctaagcagagatgatgccaagcctctgctgagactgaagggattcccttcctttcctctggtcgagagacaggccaacgaagtggactggtgggacatggtgtgtaacgtgaagaagctgatcaacgagaaaaaggaggatggcaaggtgttttggcagaatctggctggctacaagagacaggaagccctgagaccatacctgagcagcgaggaagatcggaagaagggaaagaaattcgctcggtaccagctgggcgacctgctgctgcacctggaaaagaagcacggcgaggactggggaaaggtgtacgacgaggcctgggagcggattgacaagaaagtggaaggcctgagcaagcacatcaagctggaagaggaacggagaagcgaggacgcccagagcaaggccgccctgaccgactggctgcgggctaaggccagcttcgtgatcgagggcctgaaggaggccgacaaggacgagttctgcagatgcgagctgaagctgcagaagtggtacggggacctgcggggaaagcccttcgccatcgaagccgagaacagcatcctggacatcagcggcttcagcaagcagtacaactgtgccttcatctggcagaaggacggcgtgaagaagctgaacctgtacctgatcatcaactacttcaagggcggcaagctgcggttcaagaagatcaaacctgaagccttcgaagccaacagattctacaccgtgatcaacaaaaagagcggcgagatcgtgcccatggaggtgaacttcaacttcgacgaccccaacctgatcatcctgcctctggcctttggcaagagacagggcagagaattcatctggaacgacctgctgtccctggaaaccggcagcctgaagctggccaacggaagagtgatcgagaagacactgtacaacagaagaacccggcaggatgagcctgccctgttcgtggccctgaccttcgagcggcgggaggtcctggactcctccaatatcaaaccaatgaacctgatcggcgtggcaagaggcgaaaacatccccgccgtgatcgccctgaccgaccccgagggctgcccactgagccggtttaaggatagcctgggaaacccaacccacatcctgagaatcggcgagagctataaggagaagcagcggaccatccaggccaagaaggaggtggagcagcggagagccggcggctacagccggaagtacgccagcaaagccaagaatctggcagacgatatggtgagaaacaccgctagagatctgctgtactacgccgtgacccaggatgccatgctgatcttcgccaacctgagccggggcttcggccggcagggcaagcggaccttcatggccgagagacagtacacacggatggaggactggctgaccgccaagctggcctacgagggcctgagcaagacctacctgtccaagacactggcccagtacacctccaagacatgcagcaactgtgggtttaccatcaccagcgccgactacgacagggtgctggagaagctgaagaagacagcaacaggctggatgaccacaattaacggcaaggagctgaaggtggagggccagattacctactacaacagatacaagagacagaacgtagtcaaggacctgtccgtcgagctggatagactgagcgaagaatctgtgaacaacgacatctcctcctggacaaagggcagaagcggagaagctctgagcctcctgaagaaaagattctcccatagacccgtgcaggagaagttcgtgtgcctgaactgcggcttcgagacacacgcagccgagcaagccgccctgaacatcgccagatcctggctgttcctgcggagccaggagtacaagaaataccagacaaacaagacaaccggcaacaccgataagagagccttcgtcgagacctggcagtccttttaccggaagaagcttaaggaggtgtggaaacctgccgtgcggtctggcggatctggcggaggctccgtgcaggagcccgtgaccttcaaggacgtggccgtggacttcacccaggaggagtggggccagctggacctggtgcagaggaccctgtacagggacgtgatgctggagacctacggccacctgctgagcgtgggcaaccagatcgccaagcccgaggtgatcagcctgctggagcagggcgaggagccctggagcgtggagcagacctgcccccagaggagctgccccgagtggatgaggaacggcggcccaagcagcggcgcccctcctcccagcggcggcagcccagccggctccccaacctctaccgaggagggcacctctgagtccgccacccccgagagcggccctggcacctccaccgagcccagcgagggcagcgcacccggcagccctgccggcagccccacctccacagaggagggaaccagcaccgagcccagcgaaggcagcgccccaggcaccagcaccgagcctagtgagcaggagattaaacggatcaacaagatcagaagaagacttgtgaaagacagcaacaccaagaaggccggcaagacaggccccatgaaaaccctgctggttagagtgatgacacccgatctgagagagcggctggaaaacctgagaaagaagcctgaaaatatcccccagcccatcagcaatacatctagagccaacctgaataagctgctgaccgattacaccgaaatgaagaaggcgatcctgcatgtgtactgggaagagttccagaaggaccctgtgggcctgatgagccgggtggcccagcctgccagcaagaagatcgatcagaacaagctgaaacctgagatggacgagaagggcaacctgaccaccgccggctttgcctgctctcagtgtggccagcccctgttcgtgtacaagctggagcaggtgtctgagaagggcaaggcttacaccaactacttcggacggtgcaatgtggccgagcacgaaaagctgatcctgctggcccagctgaagcccgagaaggatagcgacgaagccgtgacatatagcctgggaaagtttgggcagagggccctggatttctacagcattcatgtgaccaaggagtccacccaccccgtgaagcccctggcccagatcgccggaaacagatacgcctccggacctgtgggaaaggccctgagcgacgcatgtatgggcacaatcgcctccttcctgtctaagtaccaggacatcatcatcgaacaccagaaggtggtgaagggcaaccagaagagactggagagcctgcgggagctggccggcaaggaaaacctggaataccctagcgtgaccctgccacctcagcctcacaccaaggagggcgttgatgcctacaacgaagtgatcgcccgggtgcgaatgtgggtgaacctgaacctgtggcagaagctgaagctaagcagagatgatgccaagcctctgctgagactgaagggattcccttcctttcctctggtcgagagacaggccaacgaagtggactggtgggacatggtgtgtaacgtgaagaagctgatcaacgagaaaaaggaggatggcaaggtgttttggcagaatctggctggctacaagagacaggaagccctgagaccatacctgagcagcgaggaagatcggaagaagggaaagaaattcgctcggtaccagctgggcgacctgctgctgcacctggaaaagaagcacggcgaggactggggaaaggtgtacgacgaggcctgggagcggattgacaagaaagtggaaggcctgagcaagcacatcaagctggaagaggaacggagaagcgaggacgcccagagcaaggccgccctgaccgactggctgcgggctaaggccagcttcgtgatcgagggcctgaaggaggccgacaaggacgagttctgcagatgcgagctgaagctgcagaagtggtacggggacctgcggggaaagcccttcgccatcgaagccgagaacagcatcctggacatcagcggcttcagcaagcagtacaactgtgccttcatctggcagaaggacggcgtgaagaagctgaacctgtacctgatcatcaactacttcaagggcggcaagctgcggttcaagaagatcaaacctgaagccttcgaagccaacagattctacaccgtgatcaacaaaaagagcggcgagatcgtgcccatggaggtgaacttcaacttcgacgaccccaacctgatcatcctgcctctggcctttggcaagagacagggcagagaattcatctggaacgacctgctgtccctggaaaccggcagcctgaagctggccaacggaagagtgatcgagaagacactgtacaacagaagaacccggcaggatgagcctgccctgttcgtggccctgaccttcgagcggcgggaggtcctggactcctccaatatcaaaccaatgaacctgatcggcgtggcaagaggcgaaaacatccccgccgtgatcgccctgaccgaccccgagggctgcccactgagccggtttaaggatagcctgggaaacccaacccacatcctgagaatcggcgagagctataaggagaagcagcggaccatccaggccaagaaggaggtggagcagcggagagccggcggctacagccggaagtacgccagcaaagccaagaatctggcagacgatatggtgagaaacaccgctagagatctgctgtactacgccgtgacccaggatgccatgctgatcttcgccaacctgagccggggcttcggccggcagggcaagcggaccttcatggccgagagacagtacacacggatggaggactggctgaccgccaagctggcctacgagggcctgagcaagacctacctgtccaagacactggcccagtacacctccaagacatgcagcaactgtgggtttaccatcaccagcgccgactacgacagggtgctggagaagctgaagaagacagcaacaggctggatgaccacaattaacggcaaggagctgaaggtggagggccagattacctactacaacagatacaagagacagaacgtagtcaaggacctgtccgtcgagctggatagactgagcgaagaatctgtgaacaacgacatctcctcctggacaaagggcagaagcggagaagctctgagcctcctgaagaaaagattctcccatagacccgtgcaggagaagttcgtgtgcctgaactgcggcttcgagacacacgcagccgagcaagccgccctgaacatcgccagatcctggctgttcctgcggagccaggagtacaagaaataccagacaaacaagacaaccggcaacaccgataagagagccttcgtcgagacctggcagtccttttaccggaagaagcttaaggaggtgtggaaacctgccgtgcggtctggcggatctggcggaggctcctgtgcaggagcccgtgaccttcaaggacgtggccgtggacttcacccaggaggagtggggccagctggacctggtgcagaggaccctgtacagggacgtgatgctggagacctacggccacctgctgagcgtgggcaaccagatcgccaagcccgaggtgatcagcctgctggagcagggcgaggagccctggagcgtggagcagacctgcccccagaggagctgccccgagtggatgaggaacggatctggctccggcagcggccccaagaaaaagagaaaagtctaagctgccttctgcggggcttgccttctggccatgcccttcttctctcccttgcacctgtacctcttggtctttgaataaagcctgagtaggaaggctagcaaaaaaaaaaaaaaaaaaaaaaaaaaaaaaaaaaaaaaaaaaaaaaaaaaaaaaaaaaaaaaaaaaaaaaaaaaaaaaaa

SEQ ID NO: 15415 - RNA, 9485 nt, synthetic construct
  source 1..9485: mol_type = other RNA
aggaaataagagagaaaagaagagtaagaagaaatataagagccaccatggcccctaagaagaagcgtaaagtgagccggatggaacgcctcgtctacgaggtgcggcagaagtgcagaaacatcgaggacatctgcatctcctgcggatctctgaacgtgaccctggagcacccactgttcatcggcggcatgtgccagaactgtaaaaactgttttctggagtgtgcctatcaatacgacgatgacggctaccagagctactgcaccatctgttgcggcggaagagaggtgctgatgtgtggaaataacaactgctgccggtgcttctgcgtggaatgcgtggacctgctggtgggccccggcgccgcccaggccgctattaaggaagatccttggaactgctacatgtgcggccacaagggcacatacggcctgctgagacggagagaggactggcctagcagactgcagatgttcttcgccaataaccacgaccaggagttcgacccccctaaggtgtaccctcccgtccccgccgagaagagaaagcccatccgggtcctgagcctgttcgatggcatcgccaccggtctgctggtgctgaaggacctgggcatccaggtggataggtacattgcctccgaggtgtgcgaggactccatcaccgtgggaatggtgcgtcatcagggcaagatcatgtacgtgggcgacgtgcggagcgtgacacagaagcatatccaggagtggggccctttcgacctggtgatcggcggcagcccttgcaatgacctgagcatcgtgaacccagcccggaagggcctgtacgagggaaccggcagactgttcttcgagttttacagactgctgcacgacgcccggcctaaggaaggcgacgaccggcccttcttttggctgttcgagaatgtggtggccatgggagtcagcgacaagcgggatattagccggttcctggagagcaaccccgtgatgatcgatgccaaggaagtgagcgccgcccaccgggccagatacttctggggcaatctgcctggcatgaacagacccctggccagcaccgtgaacgacaagctggagctgcaggagtgcctggagcacggccggatcgccaagttcagcaaggtgagaaccatcaccacccgaagcaacagcatcaaacaaggcaaggaccagcactttcctgtgttcatgaacgagaaggaggacatcctgtggtgtaccgagatggagagagtgttcgggttcccagtccactacacagatgtcagcaacatgtctagactggccagacagagactgctgggaagaagctggtccgtccctgtgatcagacacctgttcgcccctctgaaggagtacttcgcctgcgtgagcagcggcaacagcaacgccaacagccggggccccagcttctctagcggcctggtgccactgtccctgagagggagccacatgggccccatggagatctacaaaaccgtgagcgcctggaagcggcagcctgtgcgcgtgctgagcctgtttcggaatatcgataaagtcctgaaaagcctgggattcctggagagcggctctggctccggcggtggcaccctgaagtacgtggaggatgtgacaaacgtggtcagacgggatgtggagaagtggggccccttcgatctggtgtacggcagcacccaacccctgggcagctcttgtgaccggtgccctggctggtacatgtttcagttccaccggatcctgcagtacgccctgccgagacaggagtcccagcggccattcttttggattttcatggacaacttgctgctgaccgaggatgaccaggaaactaccactcggttcctgcagaccgaagccgtgaccctgcaggacgtgagaggccgggactaccagaacgccatgcgggtgtggtccaacatccctggactgaaaagcaagcacgcacctctgacccctaaagaagaggagtacctgcaggcccaggtgcggagcagaagcaagctggacgcccctaaggtggatctgctggtgaagaattgcctcctgcccctgagagagtacttcaagtatttcagccagaatagtctgcccctgggaggcagcggcggcggcgccctggtgacatttgaggacgtcgccgtgcggttcacccaggaggaatgggctctgctggatccttctcagaaaatcctgtaccgggacgtgatgagagagacataccggaatctgacctccgtgggcatcaactgggaatgttgggaccttgaagcctgcttcagaagcctgggaagaaacctgagagtgcaggtggtgaagagaaagtgcgagctgaccaacagcggcccctgcgccgagggcggcccaagcagcggcgcccctcctcccagcggcggcagcccagccggctccccaacctctaccgaggagggcacctctgagtccgccacccccgagagcggccctggcacctccaccgagcccagcgagggcagcgcacccggcagccctgccggcagccccacctccacagaggagggaaccagcaccgagcccagcgaaggcagcgccccaggcaccagcaccgagcctagtgagcaggagattaaacggatcaacaagatcagaagaagacttgtgaaagacagcaacaccaagaaggccggcaagacaggccccatgaaaaccctgctggttagagtgatgacacccgatctgagagagcggctggaaaacctgagaaagaagcctgaaaatatcccccagcccatcagcaatacatctagagccaacctgaataagctgctgaccgattacaccgaaatgaagaaggcgatcctgcatgtgtactgggaagagttccagaaggaccctgtgggcctgatgagccgggtggcccagcctgccagcaagaagatcgatcagaacaagctgaaacctgagatggacgagaagggcaacctgaccaccgccggctttgcctgctctcagtgtggccagcccctgttcgtgtacaagctggagcaggtgtctgagaagggcaaggcttacaccaactacttcggacggtgcaatgtggccgagcacgaaaagctgatcctgctggcccagctgaagcccgagaaggatagcgacgaagccgtgacatatagcctgggaaagtttgggcagagggccctggatttctacagcattcatgtgaccaaggagtccacccaccccgtgaagcccctggcccagatcgccggaaacagatacgcctccggacctgtgggaaaggccctgagcgacgcatgtatgggcacaatcgcctccttcctgtctaagtaccaggacatcatcatcgaacaccagaaggtggtgaagggcaaccagaagagactggagagcctgcgggagctggccggcaaggaaaacctggaataccctagcgtgaccctgccacctcagcctcacaccaaggagggcgttgatgcctacaacgaagtgatcgcccgggtgcgaatgtgggtgaacctgaacctgtggcagaagctgaagctaagcagagatgatgccaagcctctgctgagactgaagggattcccttcctttcctctggtcgagagacaggccaacgaagtggactggtgggacatggtgtgtaacgtgaagaagctgatcaacgagaaaaaggaggatggcaaggtgttttggcagaatctggctggctacaagagacaggaagccctgagaccatacctgagcagcgaggaagatcggaagaagggaaagaaattcgctcggtaccagctgggcgacctgctgctgcacctggaaaagaagcacggcgaggactggggaaaggtgtacgacgaggcctgggagcggattgacaagaaagtggaaggcctgagcaagcacatcaagctggaagaggaacggagaagcgaggacgcccagagcaaggccgccctgaccgactggctgcgggctaaggccagcttcgtgatcgagggcctgaaggaggccgacaaggacgagttctgcagatgcgagctgaagctgcagaagtggtacggggacctgcggggaaagcccttcgccatcgaagccgagaacagcatcctggacatcagcggcttcagcaagcagtacaactgtgccttcatctggcagaaggacggcgtgaagaagctgaacctgtacctgatcatcaactacttcaagggcggcaagctgcggttcaagaagatcaaacctgaagccttcgaagccaacagattctacaccgtgatcaacaaaaagagcggcgagatcgtgcccatggaggtgaacttcaacttcgacgaccccaacctgatcatcctgcctctggcctttggcaagagacagggcagagaattcatctggaacgacctgctgtccctggaaaccggcagcctgaagctggccaacggaagagtgatcgagaagacactgtacaacagaagaacccggcaggatgagcctgccctgttcgtggccctgaccttcgagcggcgggaggtcctggactcctccaatatcaaaccaatgaacctgatcggcgtggcaagaggcgaaaacatccccgccgtgatcgccctgaccgaccccgagggctgcccactgagccggtttaaggatagcctgggaaacccaacccacatcctgagaatcggcgagagctataaggagaagcagcggaccatccaggccaagaaggaggtggagcagcggagagccggcggctacagccggaagtacgccagcaaagccaagaatctggcagacgatatggtgagaaacaccgctagagatctgctgtactacgccgtgacccaggatgccatgctgatcttcgccaacctgagccggggcttcggccggcagggcaagcggaccttcatggccgagagacagtacacacggatggaggactggctgaccgccaagctggcctacgagggcctgagcaagacctacctgtccaagacactggcccagtacacctccaagacatgcagcaactgtgggtttaccatcaccagcgccgactacgacagggtgctggagaagctgaagaagacagcaacaggctggatgaccacaattaacggcaaggagctgaaggtggagggccagattacctactacaacagatacaagagacagaacgtagtcaaggacctgtccgtcgagctggatagactgagcgaagaatctgtgaacaacgacatctcctcctggacaaagggcagaagcggagaagctctgagcctcctgaagaaaagattctcccatagacccgtgcaggagaagttcgtgtgcctgaactgcggcttcgagacacacgcagccgagcaagccgccctgaacatcgccagatcctggctgttcctgcggagccaggagtacaagaaataccagacaaacaagacaaccggcaacaccgataagagagccttcgtcgagacctggcagtccttttaccggaagaagcttaaggaggtgtggaaacctgccgtgcggtctggcggatctggcggaggctccatgcccctgggcagcgagctgttcagggacgtggccatcgtgttcagccaggaggagtggcagtggctggcccccgcccagagggacctgtacagggacgtgatgctggagacctacagcaacctggtgagcctgggcctggccatcagcaagcccgacgtgatcagcttcctggagcagggcaaggagccctggatggtggagagggtggtggccggcggcctgtgccccgaggccgagctgggcggcccaagcagcggcgcccctcctcccagcggcggcagcccagccggctccccaacctctaccgaggagggcacctctgagtccgccacccccgagagcggccctggcacctccaccgagcccagcgagggcagcgcacccggcagccctgccggcagccccacctccacagaggagggaaccagcaccgagcccagcgaaggcagcgccccaggcaccagcaccgagcctagtgagcaggagattaaacggatcaacaagatcagaagaagacttgtgaaagacagcaacaccaagaaggccggcaagacaggccccatgaaaaccctgctggttagagtgatgacacccgatctgagagagcggctggaaaacctgagaaagaagcctgaaaatatcccccagcccatcagcaatacatctagagccaacctgaataagctgctgaccgattacaccgaaatgaagaaggcgatcctgcatgtgtactgggaagagttccagaaggaccctgtgggcctgatgagccgggtggcccagcctgccagcaagaagatcgatcagaacaagctgaaacctgagatggacgagaagggcaacctgaccaccgccggctttgcctgctctcagtgtggccagcccctgttcgtgtacaagctggagcaggtgtctgagaagggcaaggcttacaccaactacttcggacggtgcaatgtggccgagcacgaaaagctgatcctgctggcccagctgaagcccgagaaggatagcgacgaagccgtgacatatagcctgggaaagtttgggcagagggccctggatttctacagcattcatgtgaccaaggagtccacccaccccgtgaagcccctggcccagatcgccggaaacagatacgcctccggacctgtgggaaaggccctgagcgacgcatgtatgggcacaatcgcctccttcctgtctaagtaccaggacatcatcatcgaacaccagaaggtggtgaagggcaaccagaagagactggagagcctgcgggagctggccggcaaggaaaacctggaataccctagcgtgaccctgccacctcagcctcacaccaaggagggcgttgatgcctacaacgaagtgatcgcccgggtgcgaatgtgggtgaacctgaacctgtggcagaagctgaagctaagcagagatgatgccaagcctctgctgagactgaagggattcccttcctttcctctggtcgagagacaggccaacgaagtggactggtgggacatggtgtgtaacgtgaagaagctgatcaacgagaaaaaggaggatggcaaggtgttttggcagaatctggctggctacaagagacaggaagccctgagaccatacctgagcagcgaggaagatcggaagaagggaaagaaattcgctcggtaccagctgggcgacctgctgctgcacctggaaaagaagcacggcgaggactggggaaaggtgtacgacgaggcctgggagcggattgacaagaaagtggaaggcctgagcaagcacatcaagctggaagaggaacggagaagcgaggacgcccagagcaaggccgccctgaccgactggctgcgggctaaggccagcttcgtgatcgagggcctgaaggaggccgacaaggacgagttctgcagatgcgagctgaagctgcagaagtggtacggggacctgcggggaaagcccttcgccatcgaagccgagaacagcatcctggacatcagcggcttcagcaagcagtacaactgtgccttcatctggcagaaggacggcgtgaagaagctgaacctgtacctgatcatcaactacttcaagggcggcaagctgcggttcaagaagatcaaacctgaagccttcgaagccaacagattctacaccgtgatcaacaaaaagagcggcgagatcgtgcccatggaggtgaacttcaacttcgacgaccccaacctgatcatcctgcctctggcctttggcaagagacagggcagagaattcatctggaacgacctgctgtccctggaaaccggcagcctgaagctggccaacggaagagtgatcgagaagacactgtacaacagaagaacccggcaggatgagcctgccctgttcgtggccctgaccttcgagcggcgggaggtcctggactcctccaatatcaaaccaatgaacctgatcggcgtggcaagaggcgaaaacatccccgccgtgatcgccctgaccgaccccgagggctgcccactgagccggtttaaggatagcctgggaaacccaacccacatcctgagaatcggcgagagctataaggagaagcagcggaccatccaggccaagaaggaggtggagcagcggagagccggcggctacagccggaagtacgccagcaaagccaagaatctggcagacgatatggtgagaaacaccgctagagatctgctgtactacgccgtgacccaggatgccatgctgatcttcgccaacctgagccggggcttcggccggcagggcaagcggaccttcatggccgagagacagtacacacggatggaggactggctgaccgccaagctggcctacgagggcctgagcaagacctacctgtccaagacactggcccagtacacctccaagacatgcagcaactgtgggtttaccatcaccagcgccgactacgacagggtgctggagaagctgaagaagacagcaacaggctggatgaccacaattaacggcaaggagctgaaggtggagggccagattacctactacaacagatacaagagacagaacgtagtcaaggacctgtccgtcgagctggatagactgagcgaagaatctgtgaacaacgacatctcctcctggacaaagggcagaagcggagaagctctgagcctcctgaagaaaagattctcccatagacccgtgcaggagaagttcgtgtgcctgaactgcggcttcgagacacacgcagccgagcaagccgccctgaacatcgccagatcctggctgttcctgcggagccaggagtacaagaaataccagacaaacaagacaaccggcaacaccgataagagagccttcgtcgagacctggcagtccttttaccggaagaagcttaaggaggtgtggaaacctgccgtgcggtctggcggatctggcggaggctcctatgcccctgggcagcgagctgttcagggacgtggccatcgtgttcagccaggaggagtggcagtggctggcccccgcccagagggacctgtacagggacgtgatgctggagacctacagcaacctggtgagcctgggcctggccatcagcaagcccgacgtgatcagcttcctggagcagggcaaggagccctggatggtggagagggtggtggccggcggcctgtgccccgaggccgagctgggatctggctccggcagcggccccaagaaaaagagaaaagtctaagctgccttctgcggggcttgccttctggccatgcccttcttctctcccttgcacctgtacctcttggtctttgaataaagcctgagtaggaaggctagcaaaaaaaaaaaaaaaaaaaaaaaaaaaaaaaaaaaaaaaaaaaaaaaaaaaaaaaaaaaaaaaaaaaaaaaaaaaaaaaa

SEQ ID NO: 15416 - RNA, 9485 nt, synthetic construct
  source 1..9485: mol_type = other RNA
aggaaataagagagaaaagaagagtaagaagaaatataagagccaccatggcccctaagaagaagcgtaaagtgagccggatggaacgcctcgtctacgaggtgcggcagaagtgcagaaacatcgaggacatctgcatctcctgcggatctctgaacgtgaccctggagcacccactgttcatcggcggcatgtgccagaactgtaaaaactgttttctggagtgtgcctatcaatacgacgatgacggctaccagagctactgcaccatctgttgcggcggaagagaggtgctgatgtgtggaaataacaactgctgccggtgcttctgcgtggaatgcgtggacctgctggtgggccccggcgccgcccaggccgctattaaggaagatccttggaactgctacatgtgcggccacaagggcacatacggcctgctgagacggagagaggactggcctagcagactgcagatgttcttcgccaataaccacgaccaggagttcgacccccctaaggtgtaccctcccgtccccgccgagaagagaaagcccatccgggtcctgagcctgttcgatggcatcgccaccggtctgctggtgctgaaggacctgggcatccaggtggataggtacattgcctccgaggtgtgcgaggactccatcaccgtgggaatggtgcgtcatcagggcaagatcatgtacgtgggcgacgtgcggagcgtgacacagaagcatatccaggagtggggccctttcgacctggtgatcggcggcagcccttgcaatgacctgagcatcgtgaacccagcccggaagggcctgtacgagggaaccggcagactgttcttcgagttttacagactgctgcacgacgcccggcctaaggaaggcgacgaccggcccttcttttggctgttcgagaatgtggtggccatgggagtcagcgacaagcgggatattagccggttcctggagagcaaccccgtgatgatcgatgccaaggaagtgagcgccgcccaccgggccagatacttctggggcaatctgcctggcatgaacagacccctggccagcaccgtgaacgacaagctggagctgcaggagtgcctggagcacggccggatcgccaagttcagcaaggtgagaaccatcaccacccgaagcaacagcatcaaacaaggcaaggaccagcactttcctgtgttcatgaacgagaaggaggacatcctgtggtgtaccgagatggagagagtgttcgggttcccagtccactacacagatgtcagcaacatgtctagactggccagacagagactgctgggaagaagctggtccgtccctgtgatcagacacctgttcgcccctctgaaggagtacttcgcctgcgtgagcagcggcaacagcaacgccaacagccggggccccagcttctctagcggcctggtgccactgtccctgagagggagccacatgggccccatggagatctacaaaaccgtgagcgcctggaagcggcagcctgtgcgcgtgctgagcctgtttcggaatatcgataaagtcctgaaaagcctgggattcctggagagcggctctggctccggcggtggcaccctgaagtacgtggaggatgtgacaaacgtggtcagacgggatgtggagaagtggggccccttcgatctggtgtacggcagcacccaacccctgggcagctcttgtgaccggtgccctggctggtacatgtttcagttccaccggatcctgcagtacgccctgccgagacaggagtcccagcggccattcttttggattttcatggacaacttgctgctgaccgaggatgaccaggaaactaccactcggttcctgcagaccgaagccgtgaccctgcaggacgtgagaggccgggactaccagaacgccatgcgggtgtggtccaacatccctggactgaaaagcaagcacgcacctctgacccctaaagaagaggagtacctgcaggcccaggtgcggagcagaagcaagctggacgcccctaaggtggatctgctggtgaagaattgcctcctgcccctgagagagtacttcaagtatttcagccagaatagtctgcccctgggaggcagcggcggcggcgccctggtgacatttgaggacgtcgccgtgcggttcacccaggaggaatgggctctgctggatccttctcagaaaatcctgtaccgggacgtgatgagagagacataccggaatctgacctccgtgggcatcaactgggaatgttgggaccttgaagcctgcttcagaagcctgggaagaaacctgagagtgcaggtggtgaagagaaagtgcgagctgaccaacagcggcccctgcgccgagggcggcccaagcagcggcgcccctcctcccagcggcggcagcccagccggctccccaacctctaccgaggagggcacctctgagtccgccacccccgagagcggccctggcacctccaccgagcccagcgagggcagcgcacccggcagccctgccggcagccccacctccacagaggagggaaccagcaccgagcccagcgaaggcagcgccccaggcaccagcaccgagcctagtgagcaggagattaaacggatcaacaagatcagaagaagacttgtgaaagacagcaacaccaagaaggccggcaagacaggccccatgaaaaccctgctggttagagtgatgacacccgatctgagagagcggctggaaaacctgagaaagaagcctgaaaatatcccccagcccatcagcaatacatctagagccaacctgaataagctgctgaccgattacaccgaaatgaagaaggcgatcctgcatgtgtactgggaagagttccagaaggaccctgtgggcctgatgagccgggtggcccagcctgccagcaagaagatcgatcagaacaagctgaaacctgagatggacgagaagggcaacctgaccaccgccggctttgcctgctctcagtgtggccagcccctgttcgtgtacaagctggagcaggtgtctgagaagggcaaggcttacaccaactacttcggacggtgcaatgtggccgagcacgaaaagctgatcctgctggcccagctgaagcccgagaaggatagcgacgaagccgtgacatatagcctgggaaagtttgggcagagggccctggatttctacagcattcatgtgaccaaggagtccacccaccccgtgaagcccctggcccagatcgccggaaacagatacgcctccggacctgtgggaaaggccctgagcgacgcatgtatgggcacaatcgcctccttcctgtctaagtaccaggacatcatcatcgaacaccagaaggtggtgaagggcaaccagaagagactggagagcctgcgggagctggccggcaaggaaaacctggaataccctagcgtgaccctgccacctcagcctcacaccaaggagggcgttgatgcctacaacgaagtgatcgcccgggtgcgaatgtgggtgaacctgaacctgtggcagaagctgaagctaagcagagatgatgccaagcctctgctgagactgaagggattcccttcctttcctctggtcgagagacaggccaacgaagtggactggtgggacatggtgtgtaacgtgaagaagctgatcaacgagaaaaaggaggatggcaaggtgttttggcagaatctggctggctacaagagacaggaagccctgagaccatacctgagcagcgaggaagatcggaagaagggaaagaaattcgctcggtaccagctgggcgacctgctgctgcacctggaaaagaagcacggcgaggactggggaaaggtgtacgacgaggcctgggagcggattgacaagaaagtggaaggcctgagcaagcacatcaagctggaagaggaacggagaagcgaggacgcccagagcaaggccgccctgaccgactggctgcgggctaaggccagcttcgtgatcgagggcctgaaggaggccgacaaggacgagttctgcagatgcgagctgaagctgcagaagtggtacggggacctgcggggaaagcccttcgccatcgaagccgagaacagcatcctggacatcagcggcttcagcaagcagtacaactgtgccttcatctggcagaaggacggcgtgaagaagctgaacctgtacctgatcatcaactacttcaagggcggcaagctgcggttcaagaagatcaaacctgaagccttcgaagccaacagattctacaccgtgatcaacaaaaagagcggcgagatcgtgcccatggaggtgaacttcaacttcgacgaccccaacctgatcatcctgcctctggcctttggcaagagacagggcagagaattcatctggaacgacctgctgtccctggaaaccggcagcctgaagctggccaacggaagagtgatcgagaagacactgtacaacagaagaacccggcaggatgagcctgccctgttcgtggccctgaccttcgagcggcgggaggtcctggactcctccaatatcaaaccaatgaacctgatcggcgtggcaagaggcgaaaacatccccgccgtgatcgccctgaccgaccccgagggctgcccactgagccggtttaaggatagcctgggaaacccaacccacatcctgagaatcggcgagagctataaggagaagcagcggaccatccaggccaagaaggaggtggagcagcggagagccggcggctacagccggaagtacgccagcaaagccaagaatctggcagacgatatggtgagaaacaccgctagagatctgctgtactacgccgtgacccaggatgccatgctgatcttcgccaacctgagccggggcttcggccggcagggcaagcggaccttcatggccgagagacagtacacacggatggaggactggctgaccgccaagctggcctacgagggcctgagcaagacctacctgtccaagacactggcccagtacacctccaagacatgcagcaactgtgggtttaccatcaccagcgccgactacgacagggtgctggagaagctgaagaagacagcaacaggctggatgaccacaattaacggcaaggagctgaaggtggagggccagattacctactacaacagatacaagagacagaacgtagtcaaggacctgtccgtcgagctggatagactgagcgaagaatctgtgaacaacgacatctcctcctggacaaagggcagaagcggagaagctctgagcctcctgaagaaaagattctcccatagacccgtgcaggagaagttcgtgtgcctgaactgcggcttcgagacacacgcagccgagcaagccgccctgaacatcgccagatcctggctgttcctgcggagccaggagtacaagaaataccagacaaacaagacaaccggcaacaccgataagagagccttcgtcgagacctggcagtccttttaccggaagaagcttaaggaggtgtggaaacctgccgtgcggtctggcggatctggcggaggctcccagccccaggaggccgtgaccttcaaggacgtggaggtgaccttcagccaggacgagtggggctggctggacgccagccagaggaacctgtacagggacgtgatgctggagaactacggcaacgtggccagcctggtgggccccttcaccaagcccgccctgatcagctggctggaggccagggagccctggggcctgaacgtgcagggcgcccaccccaagggcagccccagcgccgcccccggcggcccaagcagcggcgcccctcctcccagcggcggcagcccagccggctccccaacctctaccgaggagggcacctctgagtccgccacccccgagagcggccctggcacctccaccgagcccagcgagggcagcgcacccggcagccctgccggcagccccacctccacagaggagggaaccagcaccgagcccagcgaaggcagcgccccaggcaccagcaccgagcctagtgagcaggagattaaacggatcaacaagatcagaagaagacttgtgaaagacagcaacaccaagaaggccggcaagacaggccccatgaaaaccctgctggttagagtgatgacacccgatctgagagagcggctggaaaacctgagaaagaagcctgaaaatatcccccagcccatcagcaatacatctagagccaacctgaataagctgctgaccgattacaccgaaatgaagaaggcgatcctgcatgtgtactgggaagagttccagaaggaccctgtgggcctgatgagccgggtggcccagcctgccagcaagaagatcgatcagaacaagctgaaacctgagatggacgagaagggcaacctgaccaccgccggctttgcctgctctcagtgtggccagcccctgttcgtgtacaagctggagcaggtgtctgagaagggcaaggcttacaccaactacttcggacggtgcaatgtggccgagcacgaaaagctgatcctgctggcccagctgaagcccgagaaggatagcgacgaagccgtgacatatagcctgggaaagtttgggcagagggccctggatttctacagcattcatgtgaccaaggagtccacccaccccgtgaagcccctggcccagatcgccggaaacagatacgcctccggacctgtgggaaaggccctgagcgacgcatgtatgggcacaatcgcctccttcctgtctaagtaccaggacatcatcatcgaacaccagaaggtggtgaagggcaaccagaagagactggagagcctgcgggagctggccggcaaggaaaacctggaataccctagcgtgaccctgccacctcagcctcacaccaaggagggcgttgatgcctacaacgaagtgatcgcccgggtgcgaatgtgggtgaacctgaacctgtggcagaagctgaagctaagcagagatgatgccaagcctctgctgagactgaagggattcccttcctttcctctggtcgagagacaggccaacgaagtggactggtgggacatggtgtgtaacgtgaagaagctgatcaacgagaaaaaggaggatggcaaggtgttttggcagaatctggctggctacaagagacaggaagccctgagaccatacctgagcagcgaggaagatcggaagaagggaaagaaattcgctcggtaccagctgggcgacctgctgctgcacctggaaaagaagcacggcgaggactggggaaaggtgtacgacgaggcctgggagcggattgacaagaaagtggaaggcctgagcaagcacatcaagctggaagaggaacggagaagcgaggacgcccagagcaaggccgccctgaccgactggctgcgggctaaggccagcttcgtgatcgagggcctgaaggaggccgacaaggacgagttctgcagatgcgagctgaagctgcagaagtggtacggggacctgcggggaaagcccttcgccatcgaagccgagaacagcatcctggacatcagcggcttcagcaagcagtacaactgtgccttcatctggcagaaggacggcgtgaagaagctgaacctgtacctgatcatcaactacttcaagggcggcaagctgcggttcaagaagatcaaacctgaagccttcgaagccaacagattctacaccgtgatcaacaaaaagagcggcgagatcgtgcccatggaggtgaacttcaacttcgacgaccccaacctgatcatcctgcctctggcctttggcaagagacagggcagagaattcatctggaacgacctgctgtccctggaaaccggcagcctgaagctggccaacggaagagtgatcgagaagacactgtacaacagaagaacccggcaggatgagcctgccctgttcgtggccctgaccttcgagcggcgggaggtcctggactcctccaatatcaaaccaatgaacctgatcggcgtggcaagaggcgaaaacatccccgccgtgatcgccctgaccgaccccgagggctgcccactgagccggtttaaggatagcctgggaaacccaacccacatcctgagaatcggcgagagctataaggagaagcagcggaccatccaggccaagaaggaggtggagcagcggagagccggcggctacagccggaagtacgccagcaaagccaagaatctggcagacgatatggtgagaaacaccgctagagatctgctgtactacgccgtgacccaggatgccatgctgatcttcgccaacctgagccggggcttcggccggcagggcaagcggaccttcatggccgagagacagtacacacggatggaggactggctgaccgccaagctggcctacgagggcctgagcaagacctacctgtccaagacactggcccagtacacctccaagacatgcagcaactgtgggtttaccatcaccagcgccgactacgacagggtgctggagaagctgaagaagacagcaacaggctggatgaccacaattaacggcaaggagctgaaggtggagggccagattacctactacaacagatacaagagacagaacgtagtcaaggacctgtccgtcgagctggatagactgagcgaagaatctgtgaacaacgacatctcctcctggacaaagggcagaagcggagaagctctgagcctcctgaagaaaagattctcccatagacccgtgcaggagaagttcgtgtgcctgaactgcggcttcgagacacacgcagccgagcaagccgccctgaacatcgccagatcctggctgttcctgcggagccaggagtacaagaaataccagacaaacaagacaaccggcaacaccgataagagagccttcgtcgagacctggcagtccttttaccggaagaagcttaaggaggtgtggaaacctgccgtgcggtctggcggatctggcggaggctcctcagccccaggaggccgtgaccttcaaggacgtggaggtgaccttcagccaggacgagtggggctggctggacgccagccagaggaacctgtacagggacgtgatgctggagaactacggcaacgtggccagcctggtgggccccttcaccaagcccgccctgatcagctggctggaggccagggagccctggggcctgaacgtgcagggcgcccaccccaagggcagccccagcgccgcccccggatctggctccggcagcggccccaagaaaaagagaaaagtctaagctgccttctgcggggcttgccttctggccatgcccttcttctctcccttgcacctgtacctcttggtctttgaataaagcctgagtaggaaggctagcaaaaaaaaaaaaaaaaaaaaaaaaaaaaaaaaaaaaaaaaaaaaaaaaaaaaaaaaaaaaaaaaaaaaaaaaaaaaaaaa

SEQ ID NO: 15417 - RNA, 9485 nt, synthetic construct
  source 1..9485: mol_type = other RNA
aggaaataagagagaaaagaagagtaagaagaaatataagagccaccatggcccctaagaagaagcgtaaagtgagccggatggaacgcctcgtctacgaggtgcggcagaagtgcagaaacatcgaggacatctgcatctcctgcggatctctgaacgtgaccctggagcacccactgttcatcggcggcatgtgccagaactgtaaaaactgttttctggagtgtgcctatcaatacgacgatgacggctaccagagctactgcaccatctgttgcggcggaagagaggtgctgatgtgtggaaataacaactgctgccggtgcttctgcgtggaatgcgtggacctgctggtgggccccggcgccgcccaggccgctattaaggaagatccttggaactgctacatgtgcggccacaagggcacatacggcctgctgagacggagagaggactggcctagcagactgcagatgttcttcgccaataaccacgaccaggagttcgacccccctaaggtgtaccctcccgtccccgccgagaagagaaagcccatccgggtcctgagcctgttcgatggcatcgccaccggtctgctggtgctgaaggacctgggcatccaggtggataggtacattgcctccgaggtgtgcgaggactccatcaccgtgggaatggtgcgtcatcagggcaagatcatgtacgtgggcgacgtgcggagcgtgacacagaagcatatccaggagtggggccctttcgacctggtgatcggcggcagcccttgcaatgacctgagcatcgtgaacccagcccggaagggcctgtacgagggaaccggcagactgttcttcgagttttacagactgctgcacgacgcccggcctaaggaaggcgacgaccggcccttcttttggctgttcgagaatgtggtggccatgggagtcagcgacaagcgggatattagccggttcctggagagcaaccccgtgatgatcgatgccaaggaagtgagcgccgcccaccgggccagatacttctggggcaatctgcctggcatgaacagacccctggccagcaccgtgaacgacaagctggagctgcaggagtgcctggagcacggccggatcgccaagttcagcaaggtgagaaccatcaccacccgaagcaacagcatcaaacaaggcaaggaccagcactttcctgtgttcatgaacgagaaggaggacatcctgtggtgtaccgagatggagagagtgttcgggttcccagtccactacacagatgtcagcaacatgtctagactggccagacagagactgctgggaagaagctggtccgtccctgtgatcagacacctgttcgcccctctgaaggagtacttcgcctgcgtgagcagcggcaacagcaacgccaacagccggggccccagcttctctagcggcctggtgccactgtccctgagagggagccacatgggccccatggagatctacaaaaccgtgagcgcctggaagcggcagcctgtgcgcgtgctgagcctgtttcggaatatcgataaagtcctgaaaagcctgggattcctggagagcggctctggctccggcggtggcaccctgaagtacgtggaggatgtgacaaacgtggtcagacgggatgtggagaagtggggccccttcgatctggtgtacggcagcacccaacccctgggcagctcttgtgaccggtgccctggctggtacatgtttcagttccaccggatcctgcagtacgccctgccgagacaggagtcccagcggccattcttttggattttcatggacaacttgctgctgaccgaggatgaccaggaaactaccactcggttcctgcagaccgaagccgtgaccctgcaggacgtgagaggccgggactaccagaacgccatgcgggtgtggtccaacatccctggactgaaaagcaagcacgcacctctgacccctaaagaagaggagtacctgcaggcccaggtgcggagcagaagcaagctggacgcccctaaggtggatctgctggtgaagaattgcctcctgcccctgagagagtacttcaagtatttcagccagaatagtctgcccctgggaggcagcggcggcggcgccctggtgacatttgaggacgtcgccgtgcggttcacccaggaggaatgggctctgctggatccttctcagaaaatcctgtaccgggacgtgatgagagagacataccggaatctgacctccgtgggcatcaactgggaatgttgggaccttgaagcctgcttcagaagcctgggaagaaacctgagagtgcaggtggtgaagagaaagtgcgagctgaccaacagcggcccctgcgccgagggcggcccaagcagcggcgcccctcctcccagcggcggcagcccagccggctccccaacctctaccgaggagggcacctctgagtccgccacccccgagagcggccctggcacctccaccgagcccagcgagggcagcgcacccggcagccctgccggcagccccacctccacagaggagggaaccagcaccgagcccagcgaaggcagcgccccaggcaccagcaccgagcctagtgagcaggagattaaacggatcaacaagatcagaagaagacttgtgaaagacagcaacaccaagaaggccggcaagacaggccccatgaaaaccctgctggttagagtgatgacacccgatctgagagagcggctggaaaacctgagaaagaagcctgaaaatatcccccagcccatcagcaatacatctagagccaacctgaataagctgctgaccgattacaccgaaatgaagaaggcgatcctgcatgtgtactgggaagagttccagaaggaccctgtgggcctgatgagccgggtggcccagcctgccagcaagaagatcgatcagaacaagctgaaacctgagatggacgagaagggcaacctgaccaccgccggctttgcctgctctcagtgtggccagcccctgttcgtgtacaagctggagcaggtgtctgagaagggcaaggcttacaccaactacttcggacggtgcaatgtggccgagcacgaaaagctgatcctgctggcccagctgaagcccgagaaggatagcgacgaagccgtgacatatagcctgggaaagtttgggcagagggccctggatttctacagcattcatgtgaccaaggagtccacccaccccgtgaagcccctggcccagatcgccggaaacagatacgcctccggacctgtgggaaaggccctgagcgacgcatgtatgggcacaatcgcctccttcctgtctaagtaccaggacatcatcatcgaacaccagaaggtggtgaagggcaaccagaagagactggagagcctgcgggagctggccggcaaggaaaacctggaataccctagcgtgaccctgccacctcagcctcacaccaaggagggcgttgatgcctacaacgaagtgatcgcccgggtgcgaatgtgggtgaacctgaacctgtggcagaagctgaagctaagcagagatgatgccaagcctctgctgagactgaagggattcccttcctttcctctggtcgagagacaggccaacgaagtggactggtgggacatggtgtgtaacgtgaagaagctgatcaacgagaaaaaggaggatggcaaggtgttttggcagaatctggctggctacaagagacaggaagccctgagaccatacctgagcagcgaggaagatcggaagaagggaaagaaattcgctcggtaccagctgggcgacctgctgctgcacctggaaaagaagcacggcgaggactggggaaaggtgtacgacgaggcctgggagcggattgacaagaaagtggaaggcctgagcaagcacatcaagctggaagaggaacggagaagcgaggacgcccagagcaaggccgccctgaccgactggctgcgggctaaggccagcttcgtgatcgagggcctgaaggaggccgacaaggacgagttctgcagatgcgagctgaagctgcagaagtggtacggggacctgcggggaaagcccttcgccatcgaagccgagaacagcatcctggacatcagcggcttcagcaagcagtacaactgtgccttcatctggcagaaggacggcgtgaagaagctgaacctgtacctgatcatcaactacttcaagggcggcaagctgcggttcaagaagatcaaacctgaagccttcgaagccaacagattctacaccgtgatcaacaaaaagagcggcgagatcgtgcccatggaggtgaacttcaacttcgacgaccccaacctgatcatcctgcctctggcctttggcaagagacagggcagagaattcatctggaacgacctgctgtccctggaaaccggcagcctgaagctggccaacggaagagtgatcgagaagacactgtacaacagaagaacccggcaggatgagcctgccctgttcgtggccctgaccttcgagcggcgggaggtcctggactcctccaatatcaaaccaatgaacctgatcggcgtggcaagaggcgaaaacatccccgccgtgatcgccctgaccgaccccgagggctgcccactgagccggtttaaggatagcctgggaaacccaacccacatcctgagaatcggcgagagctataaggagaagcagcggaccatccaggccaagaaggaggtggagcagcggagagccggcggctacagccggaagtacgccagcaaagccaagaatctggcagacgatatggtgagaaacaccgctagagatctgctgtactacgccgtgacccaggatgccatgctgatcttcgccaacctgagccggggcttcggccggcagggcaagcggaccttcatggccgagagacagtacacacggatggaggactggctgaccgccaagctggcctacgagggcctgagcaagacctacctgtccaagacactggcccagtacacctccaagacatgcagcaactgtgggtttaccatcaccagcgccgactacgacagggtgctggagaagctgaagaagacagcaacaggctggatgaccacaattaacggcaaggagctgaaggtggagggccagattacctactacaacagatacaagagacagaacgtagtcaaggacctgtccgtcgagctggatagactgagcgaagaatctgtgaacaacgacatctcctcctggacaaagggcagaagcggagaagctctgagcctcctgaagaaaagattctcccatagacccgtgcaggagaagttcgtgtgcctgaactgcggcttcgagacacacgcagccgagcaagccgccctgaacatcgccagatcctggctgttcctgcggagccaggagtacaagaaataccagacaaacaagacaaccggcaacaccgataagagagccttcgtcgagacctggcagtccttttaccggaagaagcttaaggaggtgtggaaacctgccgtgcggtctggcggatctggcggaggctccgcccacggcagcgtgatgttcagcgacgtgagcatcgacttcagccaggaggagtgggactacctggacctggagcagagggacctgtacagggacgtgatgctggagaactacagcaacctggtgagcctgggctgcttcgtgagcaagcccgacgtgatcttcctgctggagcagggcaaggagccctggaaggtggtgaggaagggcaggaggaggtaccccgacctggagaccaactacggcggcccaagcagcggcgcccctcctcccagcggcggcagcccagccggctccccaacctctaccgaggagggcacctctgagtccgccacccccgagagcggccctggcacctccaccgagcccagcgagggcagcgcacccggcagccctgccggcagccccacctccacagaggagggaaccagcaccgagcccagcgaaggcagcgccccaggcaccagcaccgagcctagtgagcaggagattaaacggatcaacaagatcagaagaagacttgtgaaagacagcaacaccaagaaggccggcaagacaggccccatgaaaaccctgctggttagagtgatgacacccgatctgagagagcggctggaaaacctgagaaagaagcctgaaaatatcccccagcccatcagcaatacatctagagccaacctgaataagctgctgaccgattacaccgaaatgaagaaggcgatcctgcatgtgtactgggaagagttccagaaggaccctgtgggcctgatgagccgggtggcccagcctgccagcaagaagatcgatcagaacaagctgaaacctgagatggacgagaagggcaacctgaccaccgccggctttgcctgctctcagtgtggccagcccctgttcgtgtacaagctggagcaggtgtctgagaagggcaaggcttacaccaactacttcggacggtgcaatgtggccgagcacgaaaagctgatcctgctggcccagctgaagcccgagaaggatagcgacgaagccgtgacatatagcctgggaaagtttgggcagagggccctggatttctacagcattcatgtgaccaaggagtccacccaccccgtgaagcccctggcccagatcgccggaaacagatacgcctccggacctgtgggaaaggccctgagcgacgcatgtatgggcacaatcgcctccttcctgtctaagtaccaggacatcatcatcgaacaccagaaggtggtgaagggcaaccagaagagactggagagcctgcgggagctggccggcaaggaaaacctggaataccctagcgtgaccctgccacctcagcctcacaccaaggagggcgttgatgcctacaacgaagtgatcgcccgggtgcgaatgtgggtgaacctgaacctgtggcagaagctgaagctaagcagagatgatgccaagcctctgctgagactgaagggattcccttcctttcctctggtcgagagacaggccaacgaagtggactggtgggacatggtgtgtaacgtgaagaagctgatcaacgagaaaaaggaggatggcaaggtgttttggcagaatctggctggctacaagagacaggaagccctgagaccatacctgagcagcgaggaagatcggaagaagggaaagaaattcgctcggtaccagctgggcgacctgctgctgcacctggaaaagaagcacggcgaggactggggaaaggtgtacgacgaggcctgggagcggattgacaagaaagtggaaggcctgagcaagcacatcaagctggaagaggaacggagaagcgaggacgcccagagcaaggccgccctgaccgactggctgcgggctaaggccagcttcgtgatcgagggcctgaaggaggccgacaaggacgagttctgcagatgcgagctgaagctgcagaagtggtacggggacctgcggggaaagcccttcgccatcgaagccgagaacagcatcctggacatcagcggcttcagcaagcagtacaactgtgccttcatctggcagaaggacggcgtgaagaagctgaacctgtacctgatcatcaactacttcaagggcggcaagctgcggttcaagaagatcaaacctgaagccttcgaagccaacagattctacaccgtgatcaacaaaaagagcggcgagatcgtgcccatggaggtgaacttcaacttcgacgaccccaacctgatcatcctgcctctggcctttggcaagagacagggcagagaattcatctggaacgacctgctgtccctggaaaccggcagcctgaagctggccaacggaagagtgatcgagaagacactgtacaacagaagaacccggcaggatgagcctgccctgttcgtggccctgaccttcgagcggcgggaggtcctggactcctccaatatcaaaccaatgaacctgatcggcgtggcaagaggcgaaaacatccccgccgtgatcgccctgaccgaccccgagggctgcccactgagccggtttaaggatagcctgggaaacccaacccacatcctgagaatcggcgagagctataaggagaagcagcggaccatccaggccaagaaggaggtggagcagcggagagccggcggctacagccggaagtacgccagcaaagccaagaatctggcagacgatatggtgagaaacaccgctagagatctgctgtactacgccgtgacccaggatgccatgctgatcttcgccaacctgagccggggcttcggccggcagggcaagcggaccttcatggccgagagacagtacacacggatggaggactggctgaccgccaagctggcctacgagggcctgagcaagacctacctgtccaagacactggcccagtacacctccaagacatgcagcaactgtgggtttaccatcaccagcgccgactacgacagggtgctggagaagctgaagaagacagcaacaggctggatgaccacaattaacggcaaggagctgaaggtggagggccagattacctactacaacagatacaagagacagaacgtagtcaaggacctgtccgtcgagctggatagactgagcgaagaatctgtgaacaacgacatctcctcctggacaaagggcagaagcggagaagctctgagcctcctgaagaaaagattctcccatagacccgtgcaggagaagttcgtgtgcctgaactgcggcttcgagacacacgcagccgagcaagccgccctgaacatcgccagatcctggctgttcctgcggagccaggagtacaagaaataccagacaaacaagacaaccggcaacaccgataagagagccttcgtcgagacctggcagtccttttaccggaagaagcttaaggaggtgtggaaacctgccgtgcggtctggcggatctggcggaggctcctgcccacggcagcgtgatgttcagcgacgtgagcatcgacttcagccaggaggagtgggactacctggacctggagcagagggacctgtacagggacgtgatgctggagaactacagcaacctggtgagcctgggctgcttcgtgagcaagcccgacgtgatcttcctgctggagcagggcaaggagccctggaaggtggtgaggaagggcaggaggaggtaccccgacctggagaccaactacggatctggctccggcagcggccccaagaaaaagagaaaagtctaagctgccttctgcggggcttgccttctggccatgcccttcttctctcccttgcacctgtacctcttggtctttgaataaagcctgagtaggaaggctagcaaaaaaaaaaaaaaaaaaaaaaaaaaaaaaaaaaaaaaaaaaaaaaaaaaaaaaaaaaaaaaaaaaaaaaaaaaaaaaaa

SEQ ID NO: 15418 - RNA, 9485 nt, synthetic construct
  source 1..9485: mol_type = other RNA
aggaaataagagagaaaagaagagtaagaagaaatataagagccaccatggcccctaagaagaagcgtaaagtgagccggatggaacgcctcgtctacgaggtgcggcagaagtgcagaaacatcgaggacatctgcatctcctgcggatctctgaacgtgaccctggagcacccactgttcatcggcggcatgtgccagaactgtaaaaactgttttctggagtgtgcctatcaatacgacgatgacggctaccagagctactgcaccatctgttgcggcggaagagaggtgctgatgtgtggaaataacaactgctgccggtgcttctgcgtggaatgcgtggacctgctggtgggccccggcgccgcccaggccgctattaaggaagatccttggaactgctacatgtgcggccacaagggcacatacggcctgctgagacggagagaggactggcctagcagactgcagatgttcttcgccaataaccacgaccaggagttcgacccccctaaggtgtaccctcccgtccccgccgagaagagaaagcccatccgggtcctgagcctgttcgatggcatcgccaccggtctgctggtgctgaaggacctgggcatccaggtggataggtacattgcctccgaggtgtgcgaggactccatcaccgtgggaatggtgcgtcatcagggcaagatcatgtacgtgggcgacgtgcggagcgtgacacagaagcatatccaggagtggggccctttcgacctggtgatcggcggcagcccttgcaatgacctgagcatcgtgaacccagcccggaagggcctgtacgagggaaccggcagactgttcttcgagttttacagactgctgcacgacgcccggcctaaggaaggcgacgaccggcccttcttttggctgttcgagaatgtggtggccatgggagtcagcgacaagcgggatattagccggttcctggagagcaaccccgtgatgatcgatgccaaggaagtgagcgccgcccaccgggccagatacttctggggcaatctgcctggcatgaacagacccctggccagcaccgtgaacgacaagctggagctgcaggagtgcctggagcacggccggatcgccaagttcagcaaggtgagaaccatcaccacccgaagcaacagcatcaaacaaggcaaggaccagcactttcctgtgttcatgaacgagaaggaggacatcctgtggtgtaccgagatggagagagtgttcgggttcccagtccactacacagatgtcagcaacatgtctagactggccagacagagactgctgggaagaagctggtccgtccctgtgatcagacacctgttcgcccctctgaaggagtacttcgcctgcgtgagcagcggcaacagcaacgccaacagccggggccccagcttctctagcggcctggtgccactgtccctgagagggagccacatgggccccatggagatctacaaaaccgtgagcgcctggaagcggcagcctgtgcgcgtgctgagcctgtttcggaatatcgataaagtcctgaaaagcctgggattcctggagagcggctctggctccggcggtggcaccctgaagtacgtggaggatgtgacaaacgtggtcagacgggatgtggagaagtggggccccttcgatctggtgtacggcagcacccaacccctgggcagctcttgtgaccggtgccctggctggtacatgtttcagttccaccggatcctgcagtacgccctgccgagacaggagtcccagcggccattcttttggattttcatggacaacttgctgctgaccgaggatgaccaggaaactaccactcggttcctgcagaccgaagccgtgaccctgcaggacgtgagaggccgggactaccagaacgccatgcgggtgtggtccaacatccctggactgaaaagcaagcacgcacctctgacccctaaagaagaggagtacctgcaggcccaggtgcggagcagaagcaagctggacgcccctaaggtggatctgctggtgaagaattgcctcctgcccctgagagagtacttcaagtatttcagccagaatagtctgcccctgggaggcagcggcggcggcgccctggtgacatttgaggacgtcgccgtgcggttcacccaggaggaatgggctctgctggatccttctcagaaaatcctgtaccgggacgtgatgagagagacataccggaatctgacctccgtgggcatcaactgggaatgttgggaccttgaagcctgcttcagaagcctgggaagaaacctgagagtgcaggtggtgaagagaaagtgcgagctgaccaacagcggcccctgcgccgagggcggcccaagcagcggcgcccctcctcccagcggcggcagcccagccggctccccaacctctaccgaggagggcacctctgagtccgccacccccgagagcggccctggcacctccaccgagcccagcgagggcagcgcacccggcagccctgccggcagccccacctccacagaggagggaaccagcaccgagcccagcgaaggcagcgccccaggcaccagcaccgagcctagtgagcaggagattaaacggatcaacaagatcagaagaagacttgtgaaagacagcaacaccaagaaggccggcaagacaggccccatgaaaaccctgctggttagagtgatgacacccgatctgagagagcggctggaaaacctgagaaagaagcctgaaaatatcccccagcccatcagcaatacatctagagccaacctgaataagctgctgaccgattacaccgaaatgaagaaggcgatcctgcatgtgtactgggaagagttccagaaggaccctgtgggcctgatgagccgggtggcccagcctgccagcaagaagatcgatcagaacaagctgaaacctgagatggacgagaagggcaacctgaccaccgccggctttgcctgctctcagtgtggccagcccctgttcgtgtacaagctggagcaggtgtctgagaagggcaaggcttacaccaactacttcggacggtgcaatgtggccgagcacgaaaagctgatcctgctggcccagctgaagcccgagaaggatagcgacgaagccgtgacatatagcctgggaaagtttgggcagagggccctggatttctacagcattcatgtgaccaaggagtccacccaccccgtgaagcccctggcccagatcgccggaaacagatacgcctccggacctgtgggaaaggccctgagcgacgcatgtatgggcacaatcgcctccttcctgtctaagtaccaggacatcatcatcgaacaccagaaggtggtgaagggcaaccagaagagactggagagcctgcgggagctggccggcaaggaaaacctggaataccctagcgtgaccctgccacctcagcctcacaccaaggagggcgttgatgcctacaacgaagtgatcgcccgggtgcgaatgtgggtgaacctgaacctgtggcagaagctgaagctaagcagagatgatgccaagcctctgctgagactgaagggattcccttcctttcctctggtcgagagacaggccaacgaagtggactggtgggacatggtgtgtaacgtgaagaagctgatcaacgagaaaaaggaggatggcaaggtgttttggcagaatctggctggctacaagagacaggaagccctgagaccatacctgagcagcgaggaagatcggaagaagggaaagaaattcgctcggtaccagctgggcgacctgctgctgcacctggaaaagaagcacggcgaggactggggaaaggtgtacgacgaggcctgggagcggattgacaagaaagtggaaggcctgagcaagcacatcaagctggaagaggaacggagaagcgaggacgcccagagcaaggccgccctgaccgactggctgcgggctaaggccagcttcgtgatcgagggcctgaaggaggccgacaaggacgagttctgcagatgcgagctgaagctgcagaagtggtacggggacctgcggggaaagcccttcgccatcgaagccgagaacagcatcctggacatcagcggcttcagcaagcagtacaactgtgccttcatctggcagaaggacggcgtgaagaagctgaacctgtacctgatcatcaactacttcaagggcggcaagctgcggttcaagaagatcaaacctgaagccttcgaagccaacagattctacaccgtgatcaacaaaaagagcggcgagatcgtgcccatggaggtgaacttcaacttcgacgaccccaacctgatcatcctgcctctggcctttggcaagagacagggcagagaattcatctggaacgacctgctgtccctggaaaccggcagcctgaagctggccaacggaagagtgatcgagaagacactgtacaacagaagaacccggcaggatgagcctgccctgttcgtggccctgaccttcgagcggcgggaggtcctggactcctccaatatcaaaccaatgaacctgatcggcgtggcaagaggcgaaaacatccccgccgtgatcgccctgaccgaccccgagggctgcccactgagccggtttaaggatagcctgggaaacccaacccacatcctgagaatcggcgagagctataaggagaagcagcggaccatccaggccaagaaggaggtggagcagcggagagccggcggctacagccggaagtacgccagcaaagccaagaatctggcagacgatatggtgagaaacaccgctagagatctgctgtactacgccgtgacccaggatgccatgctgatcttcgccaacctgagccggggcttcggccggcagggcaagcggaccttcatggccgagagacagtacacacggatggaggactggctgaccgccaagctggcctacgagggcctgagcaagacctacctgtccaagacactggcccagtacacctccaagacatgcagcaactgtgggtttaccatcaccagcgccgactacgacagggtgctggagaagctgaagaagacagcaacaggctggatgaccacaattaacggcaaggagctgaaggtggagggccagattacctactacaacagatacaagagacagaacgtagtcaaggacctgtccgtcgagctggatagactgagcgaagaatctgtgaacaacgacatctcctcctggacaaagggcagaagcggagaagctctgagcctcctgaagaaaagattctcccatagacccgtgcaggagaagttcgtgtgcctgaactgcggcttcgagacacacgcagccgagcaagccgccctgaacatcgccagatcctggctgttcctgcggagccaggagtacaagaaataccagacaaacaagacaaccggcaacaccgataagagagccttcgtcgagacctggcagtccttttaccggaagaagcttaaggaggtgtggaaacctgccgtgcggtctggcggatctggcggaggctccgtgcaggagcccgtgaccttcaaggacgtggccgtggacttcacccaggaggagtggggccagctggacctggtgcagaggaccctgtacagggacgtgatgctggagacctacggccacctgctgagcgtgggcaaccagatcgccaagcccgaggtgatcagcctgctggagcagggcgaggagccctggagcctggagcagacctgcccccagagggcctgccccgagtggatgaggaacggcggcccaagcagcggcgcccctcctcccagcggcggcagcccagccggctccccaacctctaccgaggagggcacctctgagtccgccacccccgagagcggccctggcacctccaccgagcccagcgagggcagcgcacccggcagccctgccggcagccccacctccacagaggagggaaccagcaccgagcccagcgaaggcagcgccccaggcaccagcaccgagcctagtgagcaggagattaaacggatcaacaagatcagaagaagacttgtgaaagacagcaacaccaagaaggccggcaagacaggccccatgaaaaccctgctggttagagtgatgacacccgatctgagagagcggctggaaaacctgagaaagaagcctgaaaatatcccccagcccatcagcaatacatctagagccaacctgaataagctgctgaccgattacaccgaaatgaagaaggcgatcctgcatgtgtactgggaagagttccagaaggaccctgtgggcctgatgagccgggtggcccagcctgccagcaagaagatcgatcagaacaagctgaaacctgagatggacgagaagggcaacctgaccaccgccggctttgcctgctctcagtgtggccagcccctgttcgtgtacaagctggagcaggtgtctgagaagggcaaggcttacaccaactacttcggacggtgcaatgtggccgagcacgaaaagctgatcctgctggcccagctgaagcccgagaaggatagcgacgaagccgtgacatatagcctgggaaagtttgggcagagggccctggatttctacagcattcatgtgaccaaggagtccacccaccccgtgaagcccctggcccagatcgccggaaacagatacgcctccggacctgtgggaaaggccctgagcgacgcatgtatgggcacaatcgcctccttcctgtctaagtaccaggacatcatcatcgaacaccagaaggtggtgaagggcaaccagaagagactggagagcctgcgggagctggccggcaaggaaaacctggaataccctagcgtgaccctgccacctcagcctcacaccaaggagggcgttgatgcctacaacgaagtgatcgcccgggtgcgaatgtgggtgaacctgaacctgtggcagaagctgaagctaagcagagatgatgccaagcctctgctgagactgaagggattcccttcctttcctctggtcgagagacaggccaacgaagtggactggtgggacatggtgtgtaacgtgaagaagctgatcaacgagaaaaaggaggatggcaaggtgttttggcagaatctggctggctacaagagacaggaagccctgagaccatacctgagcagcgaggaagatcggaagaagggaaagaaattcgctcggtaccagctgggcgacctgctgctgcacctggaaaagaagcacggcgaggactggggaaaggtgtacgacgaggcctgggagcggattgacaagaaagtggaaggcctgagcaagcacatcaagctggaagaggaacggagaagcgaggacgcccagagcaaggccgccctgaccgactggctgcgggctaaggccagcttcgtgatcgagggcctgaaggaggccgacaaggacgagttctgcagatgcgagctgaagctgcagaagtggtacggggacctgcggggaaagcccttcgccatcgaagccgagaacagcatcctggacatcagcggcttcagcaagcagtacaactgtgccttcatctggcagaaggacggcgtgaagaagctgaacctgtacctgatcatcaactacttcaagggcggcaagctgcggttcaagaagatcaaacctgaagccttcgaagccaacagattctacaccgtgatcaacaaaaagagcggcgagatcgtgcccatggaggtgaacttcaacttcgacgaccccaacctgatcatcctgcctctggcctttggcaagagacagggcagagaattcatctggaacgacctgctgtccctggaaaccggcagcctgaagctggccaacggaagagtgatcgagaagacactgtacaacagaagaacccggcaggatgagcctgccctgttcgtggccctgaccttcgagcggcgggaggtcctggactcctccaatatcaaaccaatgaacctgatcggcgtggcaagaggcgaaaacatccccgccgtgatcgccctgaccgaccccgagggctgcccactgagccggtttaaggatagcctgggaaacccaacccacatcctgagaatcggcgagagctataaggagaagcagcggaccatccaggccaagaaggaggtggagcagcggagagccggcggctacagccggaagtacgccagcaaagccaagaatctggcagacgatatggtgagaaacaccgctagagatctgctgtactacgccgtgacccaggatgccatgctgatcttcgccaacctgagccggggcttcggccggcagggcaagcggaccttcatggccgagagacagtacacacggatggaggactggctgaccgccaagctggcctacgagggcctgagcaagacctacctgtccaagacactggcccagtacacctccaagacatgcagcaactgtgggtttaccatcaccagcgccgactacgacagggtgctggagaagctgaagaagacagcaacaggctggatgaccacaattaacggcaaggagctgaaggtggagggccagattacctactacaacagatacaagagacagaacgtagtcaaggacctgtccgtcgagctggatagactgagcgaagaatctgtgaacaacgacatctcctcctggacaaagggcagaagcggagaagctctgagcctcctgaagaaaagattctcccatagacccgtgcaggagaagttcgtgtgcctgaactgcggcttcgagacacacgcagccgagcaagccgccctgaacatcgccagatcctggctgttcctgcggagccaggagtacaagaaataccagacaaacaagacaaccggcaacaccgataagagagccttcgtcgagacctggcagtccttttaccggaagaagcttaaggaggtgtggaaacctgccgtgcggtctggcggatctggcggaggctcctgtgcaggagcccgtgaccttcaaggacgtggccgtggacttcacccaggaggagtggggccagctggacctggtgcagaggaccctgtacagggacgtgatgctggagacctacggccacctgctgagcgtgggcaaccagatcgccaagcccgaggtgatcagcctgctggagcagggcgaggagccctggagcctggagcagacctgcccccagagggcctgccccgagtggatgaggaacggatctggctccggcagcggccccaagaaaaagagaaaagtctaagctgccttctgcggggcttgccttctggccatgcccttcttctctcccttgcacctgtacctcttggtctttgaataaagcctgagtaggaaggctagcaaaaaaaaaaaaaaaaaaaaaaaaaaaaaaaaaaaaaaaaaaaaaaaaaaaaaaaaaaaaaaaaaaaaaaaaaaaaaaaa

SEQ ID NO: 15419 - RNA, 9485 nt, synthetic construct
  source 1..9485: mol_type = other RNA
aggaaataagagagaaaagaagagtaagaagaaatataagagccaccatggcccctaagaagaagcgtaaagtgagccggatggaacgcctcgtctacgaggtgcggcagaagtgcagaaacatcgaggacatctgcatctcctgcggatctctgaacgtgaccctggagcacccactgttcatcggcggcatgtgccagaactgtaaaaactgttttctggagtgtgcctatcaatacgacgatgacggctaccagagctactgcaccatctgttgcggcggaagagaggtgctgatgtgtggaaataacaactgctgccggtgcttctgcgtggaatgcgtggacctgctggtgggccccggcgccgcccaggccgctattaaggaagatccttggaactgctacatgtgcggccacaagggcacatacggcctgctgagacggagagaggactggcctagcagactgcagatgttcttcgccaataaccacgaccaggagttcgacccccctaaggtgtaccctcccgtccccgccgagaagagaaagcccatccgggtcctgagcctgttcgatggcatcgccaccggtctgctggtgctgaaggacctgggcatccaggtggataggtacattgcctccgaggtgtgcgaggactccatcaccgtgggaatggtgcgtcatcagggcaagatcatgtacgtgggcgacgtgcggagcgtgacacagaagcatatccaggagtggggccctttcgacctggtgatcggcggcagcccttgcaatgacctgagcatcgtgaacccagcccggaagggcctgtacgagggaaccggcagactgttcttcgagttttacagactgctgcacgacgcccggcctaaggaaggcgacgaccggcccttcttttggctgttcgagaatgtggtggccatgggagtcagcgacaagcgggatattagccggttcctggagagcaaccccgtgatgatcgatgccaaggaagtgagcgccgcccaccgggccagatacttctggggcaatctgcctggcatgaacagacccctggccagcaccgtgaacgacaagctggagctgcaggagtgcctggagcacggccggatcgccaagttcagcaaggtgagaaccatcaccacccgaagcaacagcatcaaacaaggcaaggaccagcactttcctgtgttcatgaacgagaaggaggacatcctgtggtgtaccgagatggagagagtgttcgggttcccagtccactacacagatgtcagcaacatgtctagactggccagacagagactgctgggaagaagctggtccgtccctgtgatcagacacctgttcgcccctctgaaggagtacttcgcctgcgtgagcagcggcaacagcaacgccaacagccggggccccagcttctctagcggcctggtgccactgtccctgagagggagccacatgggccccatggagatctacaaaaccgtgagcgcctggaagcggcagcctgtgcgcgtgctgagcctgtttcggaatatcgataaagtcctgaaaagcctgggattcctggagagcggctctggctccggcggtggcaccctgaagtacgtggaggatgtgacaaacgtggtcagacgggatgtggagaagtggggccccttcgatctggtgtacggcagcacccaacccctgggcagctcttgtgaccggtgccctggctggtacatgtttcagttccaccggatcctgcagtacgccctgccgagacaggagtcccagcggccattcttttggattttcatggacaacttgctgctgaccgaggatgaccaggaaactaccactcggttcctgcagaccgaagccgtgaccctgcaggacgtgagaggccgggactaccagaacgccatgcgggtgtggtccaacatccctggactgaaaagcaagcacgcacctctgacccctaaagaagaggagtacctgcaggcccaggtgcggagcagaagcaagctggacgcccctaaggtggatctgctggtgaagaattgcctcctgcccctgagagagtacttcaagtatttcagccagaatagtctgcccctgggaggcagcggcggcggcgccctggtgacatttgaggacgtcgccgtgcggttcacccaggaggaatgggctctgctggatccttctcagaaaatcctgtaccgggacgtgatgagagagacataccggaatctgacctccgtgggcatcaactgggaatgttgggaccttgaagcctgcttcagaagcctgggaagaaacctgagagtgcaggtggtgaagagaaagtgcgagctgaccaacagcggcccctgcgccgagggcggcccaagcagcggcgcccctcctcccagcggcggcagcccagccggctccccaacctctaccgaggagggcacctctgagtccgccacccccgagagcggccctggcacctccaccgagcccagcgagggcagcgcacccggcagccctgccggcagccccacctccacagaggagggaaccagcaccgagcccagcgaaggcagcgccccaggcaccagcaccgagcctagtgagcaggagattaaacggatcaacaagatcagaagaagacttgtgaaagacagcaacaccaagaaggccggcaagacaggccccatgaaaaccctgctggttagagtgatgacacccgatctgagagagcggctggaaaacctgagaaagaagcctgaaaatatcccccagcccatcagcaatacatctagagccaacctgaataagctgctgaccgattacaccgaaatgaagaaggcgatcctgcatgtgtactgggaagagttccagaaggaccctgtgggcctgatgagccgggtggcccagcctgccagcaagaagatcgatcagaacaagctgaaacctgagatggacgagaagggcaacctgaccaccgccggctttgcctgctctcagtgtggccagcccctgttcgtgtacaagctggagcaggtgtctgagaagggcaaggcttacaccaactacttcggacggtgcaatgtggccgagcacgaaaagctgatcctgctggcccagctgaagcccgagaaggatagcgacgaagccgtgacatatagcctgggaaagtttgggcagagggccctggatttctacagcattcatgtgaccaaggagtccacccaccccgtgaagcccctggcccagatcgccggaaacagatacgcctccggacctgtgggaaaggccctgagcgacgcatgtatgggcacaatcgcctccttcctgtctaagtaccaggacatcatcatcgaacaccagaaggtggtgaagggcaaccagaagagactggagagcctgcgggagctggccggcaaggaaaacctggaataccctagcgtgaccctgccacctcagcctcacaccaaggagggcgttgatgcctacaacgaagtgatcgcccgggtgcgaatgtgggtgaacctgaacctgtggcagaagctgaagctaagcagagatgatgccaagcctctgctgagactgaagggattcccttcctttcctctggtcgagagacaggccaacgaagtggactggtgggacatggtgtgtaacgtgaagaagctgatcaacgagaaaaaggaggatggcaaggtgttttggcagaatctggctggctacaagagacaggaagccctgagaccatacctgagcagcgaggaagatcggaagaagggaaagaaattcgctcggtaccagctgggcgacctgctgctgcacctggaaaagaagcacggcgaggactggggaaaggtgtacgacgaggcctgggagcggattgacaagaaagtggaaggcctgagcaagcacatcaagctggaagaggaacggagaagcgaggacgcccagagcaaggccgccctgaccgactggctgcgggctaaggccagcttcgtgatcgagggcctgaaggaggccgacaaggacgagttctgcagatgcgagctgaagctgcagaagtggtacggggacctgcggggaaagcccttcgccatcgaagccgagaacagcatcctggacatcagcggcttcagcaagcagtacaactgtgccttcatctggcagaaggacggcgtgaagaagctgaacctgtacctgatcatcaactacttcaagggcggcaagctgcggttcaagaagatcaaacctgaagccttcgaagccaacagattctacaccgtgatcaacaaaaagagcggcgagatcgtgcccatggaggtgaacttcaacttcgacgaccccaacctgatcatcctgcctctggcctttggcaagagacagggcagagaattcatctggaacgacctgctgtccctggaaaccggcagcctgaagctggccaacggaagagtgatcgagaagacactgtacaacagaagaacccggcaggatgagcctgccctgttcgtggccctgaccttcgagcggcgggaggtcctggactcctccaatatcaaaccaatgaacctgatcggcgtggcaagaggcgaaaacatccccgccgtgatcgccctgaccgaccccgagggctgcccactgagccggtttaaggatagcctgggaaacccaacccacatcctgagaatcggcgagagctataaggagaagcagcggaccatccaggccaagaaggaggtggagcagcggagagccggcggctacagccggaagtacgccagcaaagccaagaatctggcagacgatatggtgagaaacaccgctagagatctgctgtactacgccgtgacccaggatgccatgctgatcttcgccaacctgagccggggcttcggccggcagggcaagcggaccttcatggccgagagacagtacacacggatggaggactggctgaccgccaagctggcctacgagggcctgagcaagacctacctgtccaagacactggcccagtacacctccaagacatgcagcaactgtgggtttaccatcaccagcgccgactacgacagggtgctggagaagctgaagaagacagcaacaggctggatgaccacaattaacggcaaggagctgaaggtggagggccagattacctactacaacagatacaagagacagaacgtagtcaaggacctgtccgtcgagctggatagactgagcgaagaatctgtgaacaacgacatctcctcctggacaaagggcagaagcggagaagctctgagcctcctgaagaaaagattctcccatagacccgtgcaggagaagttcgtgtgcctgaactgcggcttcgagacacacgcagccgagcaagccgccctgaacatcgccagatcctggctgttcctgcggagccaggagtacaagaaataccagacaaacaagacaaccggcaacaccgataagagagccttcgtcgagacctggcagtccttttaccggaagaagcttaaggaggtgtggaaacctgccgtgcggtctggcggatctggcggaggctccttccaggagcccgtgaccttcgaggacgtggccgtgtacttcacccagaacgagtgggccagcctgcaccccatgcagagggccctgtacagggaggtgatgctggagaactacgccaacgtgaccagcctgagcgccttccccttcagcaagcccgacctgatcttccagctggagcagggcgaggccgcctggggccccgacccctggaccctggccggcggcgaggccctgaggggcatgggcggcccaagcagcggcgcccctcctcccagcggcggcagcccagccggctccccaacctctaccgaggagggcacctctgagtccgccacccccgagagcggccctggcacctccaccgagcccagcgagggcagcgcacccggcagccctgccggcagccccacctccacagaggagggaaccagcaccgagcccagcgaaggcagcgccccaggcaccagcaccgagcctagtgagcaggagattaaacggatcaacaagatcagaagaagacttgtgaaagacagcaacaccaagaaggccggcaagacaggccccatgaaaaccctgctggttagagtgatgacacccgatctgagagagcggctggaaaacctgagaaagaagcctgaaaatatcccccagcccatcagcaatacatctagagccaacctgaataagctgctgaccgattacaccgaaatgaagaaggcgatcctgcatgtgtactgggaagagttccagaaggaccctgtgggcctgatgagccgggtggcccagcctgccagcaagaagatcgatcagaacaagctgaaacctgagatggacgagaagggcaacctgaccaccgccggctttgcctgctctcagtgtggccagcccctgttcgtgtacaagctggagcaggtgtctgagaagggcaaggcttacaccaactacttcggacggtgcaatgtggccgagcacgaaaagctgatcctgctggcccagctgaagcccgagaaggatagcgacgaagccgtgacatatagcctgggaaagtttgggcagagggccctggatttctacagcattcatgtgaccaaggagtccacccaccccgtgaagcccctggcccagatcgccggaaacagatacgcctccggacctgtgggaaaggccctgagcgacgcatgtatgggcacaatcgcctccttcctgtctaagtaccaggacatcatcatcgaacaccagaaggtggtgaagggcaaccagaagagactggagagcctgcgggagctggccggcaaggaaaacctggaataccctagcgtgaccctgccacctcagcctcacaccaaggagggcgttgatgcctacaacgaagtgatcgcccgggtgcgaatgtgggtgaacctgaacctgtggcagaagctgaagctaagcagagatgatgccaagcctctgctgagactgaagggattcccttcctttcctctggtcgagagacaggccaacgaagtggactggtgggacatggtgtgtaacgtgaagaagctgatcaacgagaaaaaggaggatggcaaggtgttttggcagaatctggctggctacaagagacaggaagccctgagaccatacctgagcagcgaggaagatcggaagaagggaaagaaattcgctcggtaccagctgggcgacctgctgctgcacctggaaaagaagcacggcgaggactggggaaaggtgtacgacgaggcctgggagcggattgacaagaaagtggaaggcctgagcaagcacatcaagctggaagaggaacggagaagcgaggacgcccagagcaaggccgccctgaccgactggctgcgggctaaggccagcttcgtgatcgagggcctgaaggaggccgacaaggacgagttctgcagatgcgagctgaagctgcagaagtggtacggggacctgcggggaaagcccttcgccatcgaagccgagaacagcatcctggacatcagcggcttcagcaagcagtacaactgtgccttcatctggcagaaggacggcgtgaagaagctgaacctgtacctgatcatcaactacttcaagggcggcaagctgcggttcaagaagatcaaacctgaagccttcgaagccaacagattctacaccgtgatcaacaaaaagagcggcgagatcgtgcccatggaggtgaacttcaacttcgacgaccccaacctgatcatcctgcctctggcctttggcaagagacagggcagagaattcatctggaacgacctgctgtccctggaaaccggcagcctgaagctggccaacggaagagtgatcgagaagacactgtacaacagaagaacccggcaggatgagcctgccctgttcgtggccctgaccttcgagcggcgggaggtcctggactcctccaatatcaaaccaatgaacctgatcggcgtggcaagaggcgaaaacatccccgccgtgatcgccctgaccgaccccgagggctgcccactgagccggtttaaggatagcctgggaaacccaacccacatcctgagaatcggcgagagctataaggagaagcagcggaccatccaggccaagaaggaggtggagcagcggagagccggcggctacagccggaagtacgccagcaaagccaagaatctggcagacgatatggtgagaaacaccgctagagatctgctgtactacgccgtgacccaggatgccatgctgatcttcgccaacctgagccggggcttcggccggcagggcaagcggaccttcatggccgagagacagtacacacggatggaggactggctgaccgccaagctggcctacgagggcctgagcaagacctacctgtccaagacactggcccagtacacctccaagacatgcagcaactgtgggtttaccatcaccagcgccgactacgacagggtgctggagaagctgaagaagacagcaacaggctggatgaccacaattaacggcaaggagctgaaggtggagggccagattacctactacaacagatacaagagacagaacgtagtcaaggacctgtccgtcgagctggatagactgagcgaagaatctgtgaacaacgacatctcctcctggacaaagggcagaagcggagaagctctgagcctcctgaagaaaagattctcccatagacccgtgcaggagaagttcgtgtgcctgaactgcggcttcgagacacacgcagccgagcaagccgccctgaacatcgccagatcctggctgttcctgcggagccaggagtacaagaaataccagacaaacaagacaaccggcaacaccgataagagagccttcgtcgagacctggcagtccttttaccggaagaagcttaaggaggtgtggaaacctgccgtgcggtctggcggatctggcggaggctcctttccaggagcccgtgaccttcgaggacgtggccgtgtacttcacccagaacgagtgggccagcctgcaccccatgcagagggccctgtacagggaggtgatgctggagaactacgccaacgtgaccagcctgagcgccttccccttcagcaagcccgacctgatcttccagctggagcagggcgaggccgcctggggccccgacccctggaccctggccggcggcgaggccctgaggggcatgggatctggctccggcagcggccccaagaaaaagagaaaagtctaagctgccttctgcggggcttgccttctggccatgcccttcttctctcccttgcacctgtacctcttggtctttgaataaagcctgagtaggaaggctagcaaaaaaaaaaaaaaaaaaaaaaaaaaaaaaaaaaaaaaaaaaaaaaaaaaaaaaaaaaaaaaaaaaaaaaaaaaaaaaaa

SEQ ID NO: 15420 - RNA, 9485 nt, synthetic construct
  source 1..9485: mol_type = other RNA
aggaaataagagagaaaagaagagtaagaagaaatataagagccaccatggcccctaagaagaagcgtaaagtgagccggatggaacgcctcgtctacgaggtgcggcagaagtgcagaaacatcgaggacatctgcatctcctgcggatctctgaacgtgaccctggagcacccactgttcatcggcggcatgtgccagaactgtaaaaactgttttctggagtgtgcctatcaatacgacgatgacggctaccagagctactgcaccatctgttgcggcggaagagaggtgctgatgtgtggaaataacaactgctgccggtgcttctgcgtggaatgcgtggacctgctggtgggccccggcgccgcccaggccgctattaaggaagatccttggaactgctacatgtgcggccacaagggcacatacggcctgctgagacggagagaggactggcctagcagactgcagatgttcttcgccaataaccacgaccaggagttcgacccccctaaggtgtaccctcccgtccccgccgagaagagaaagcccatccgggtcctgagcctgttcgatggcatcgccaccggtctgctggtgctgaaggacctgggcatccaggtggataggtacattgcctccgaggtgtgcgaggactccatcaccgtgggaatggtgcgtcatcagggcaagatcatgtacgtgggcgacgtgcggagcgtgacacagaagcatatccaggagtggggccctttcgacctggtgatcggcggcagcccttgcaatgacctgagcatcgtgaacccagcccggaagggcctgtacgagggaaccggcagactgttcttcgagttttacagactgctgcacgacgcccggcctaaggaaggcgacgaccggcccttcttttggctgttcgagaatgtggtggccatgggagtcagcgacaagcgggatattagccggttcctggagagcaaccccgtgatgatcgatgccaaggaagtgagcgccgcccaccgggccagatacttctggggcaatctgcctggcatgaacagacccctggccagcaccgtgaacgacaagctggagctgcaggagtgcctggagcacggccggatcgccaagttcagcaaggtgagaaccatcaccacccgaagcaacagcatcaaacaaggcaaggaccagcactttcctgtgttcatgaacgagaaggaggacatcctgtggtgtaccgagatggagagagtgttcgggttcccagtccactacacagatgtcagcaacatgtctagactggccagacagagactgctgggaagaagctggtccgtccctgtgatcagacacctgttcgcccctctgaaggagtacttcgcctgcgtgagcagcggcaacagcaacgccaacagccggggccccagcttctctagcggcctggtgccactgtccctgagagggagccacatgggccccatggagatctacaaaaccgtgagcgcctggaagcggcagcctgtgcgcgtgctgagcctgtttcggaatatcgataaagtcctgaaaagcctgggattcctggagagcggctctggctccggcggtggcaccctgaagtacgtggaggatgtgacaaacgtggtcagacgggatgtggagaagtggggccccttcgatctggtgtacggcagcacccaacccctgggcagctcttgtgaccggtgccctggctggtacatgtttcagttccaccggatcctgcagtacgccctgccgagacaggagtcccagcggccattcttttggattttcatggacaacttgctgctgaccgaggatgaccaggaaactaccactcggttcctgcagaccgaagccgtgaccctgcaggacgtgagaggccgggactaccagaacgccatgcgggtgtggtccaacatccctggactgaaaagcaagcacgcacctctgacccctaaagaagaggagtacctgcaggcccaggtgcggagcagaagcaagctggacgcccctaaggtggatctgctggtgaagaattgcctcctgcccctgagagagtacttcaagtatttcagccagaatagtctgcccctgggaggcagcggcggcggcgccctggtgacatttgaggacgtcgccgtgcggttcacccaggaggaatgggctctgctggatccttctcagaaaatcctgtaccgggacgtgatgagagagacataccggaatctgacctccgtgggcatcaactgggaatgttgggaccttgaagcctgcttcagaagcctgggaagaaacctgagagtgcaggtggtgaagagaaagtgcgagctgaccaacagcggcccctgcgccgagggcggcccaagcagcggcgcccctcctcccagcggcggcagcccagccggctccccaacctctaccgaggagggcacctctgagtccgccacccccgagagcggccctggcacctccaccgagcccagcgagggcagcgcacccggcagccctgccggcagccccacctccacagaggagggaaccagcaccgagcccagcgaaggcagcgccccaggcaccagcaccgagcctagtgagcaggagattaaacggatcaacaagatcagaagaagacttgtgaaagacagcaacaccaagaaggccggcaagacaggccccatgaaaaccctgctggttagagtgatgacacccgatctgagagagcggctggaaaacctgagaaagaagcctgaaaatatcccccagcccatcagcaatacatctagagccaacctgaataagctgctgaccgattacaccgaaatgaagaaggcgatcctgcatgtgtactgggaagagttccagaaggaccctgtgggcctgatgagccgggtggcccagcctgccagcaagaagatcgatcagaacaagctgaaacctgagatggacgagaagggcaacctgaccaccgccggctttgcctgctctcagtgtggccagcccctgttcgtgtacaagctggagcaggtgtctgagaagggcaaggcttacaccaactacttcggacggtgcaatgtggccgagcacgaaaagctgatcctgctggcccagctgaagcccgagaaggatagcgacgaagccgtgacatatagcctgggaaagtttgggcagagggccctggatttctacagcattcatgtgaccaaggagtccacccaccccgtgaagcccctggcccagatcgccggaaacagatacgcctccggacctgtgggaaaggccctgagcgacgcatgtatgggcacaatcgcctccttcctgtctaagtaccaggacatcatcatcgaacaccagaaggtggtgaagggcaaccagaagagactggagagcctgcgggagctggccggcaaggaaaacctggaataccctagcgtgaccctgccacctcagcctcacaccaaggagggcgttgatgcctacaacgaagtgatcgcccgggtgcgaatgtgggtgaacctgaacctgtggcagaagctgaagctaagcagagatgatgccaagcctctgctgagactgaagggattcccttcctttcctctggtcgagagacaggccaacgaagtggactggtgggacatggtgtgtaacgtgaagaagctgatcaacgagaaaaaggaggatggcaaggtgttttggcagaatctggctggctacaagagacaggaagccctgagaccatacctgagcagcgaggaagatcggaagaagggaaagaaattcgctcggtaccagctgggcgacctgctgctgcacctggaaaagaagcacggcgaggactggggaaaggtgtacgacgaggcctgggagcggattgacaagaaagtggaaggcctgagcaagcacatcaagctggaagaggaacggagaagcgaggacgcccagagcaaggccgccctgaccgactggctgcgggctaaggccagcttcgtgatcgagggcctgaaggaggccgacaaggacgagttctgcagatgcgagctgaagctgcagaagtggtacggggacctgcggggaaagcccttcgccatcgaagccgagaacagcatcctggacatcagcggcttcagcaagcagtacaactgtgccttcatctggcagaaggacggcgtgaagaagctgaacctgtacctgatcatcaactacttcaagggcggcaagctgcggttcaagaagatcaaacctgaagccttcgaagccaacagattctacaccgtgatcaacaaaaagagcggcgagatcgtgcccatggaggtgaacttcaacttcgacgaccccaacctgatcatcctgcctctggcctttggcaagagacagggcagagaattcatctggaacgacctgctgtccctggaaaccggcagcctgaagctggccaacggaagagtgatcgagaagacactgtacaacagaagaacccggcaggatgagcctgccctgttcgtggccctgaccttcgagcggcgggaggtcctggactcctccaatatcaaaccaatgaacctgatcggcgtggcaagaggcgaaaacatccccgccgtgatcgccctgaccgaccccgagggctgcccactgagccggtttaaggatagcctgggaaacccaacccacatcctgagaatcggcgagagctataaggagaagcagcggaccatccaggccaagaaggaggtggagcagcggagagccggcggctacagccggaagtacgccagcaaagccaagaatctggcagacgatatggtgagaaacaccgctagagatctgctgtactacgccgtgacccaggatgccatgctgatcttcgccaacctgagccggggcttcggccggcagggcaagcggaccttcatggccgagagacagtacacacggatggaggactggctgaccgccaagctggcctacgagggcctgagcaagacctacctgtccaagacactggcccagtacacctccaagacatgcagcaactgtgggtttaccatcaccagcgccgactacgacagggtgctggagaagctgaagaagacagcaacaggctggatgaccacaattaacggcaaggagctgaaggtggagggccagattacctactacaacagatacaagagacagaacgtagtcaaggacctgtccgtcgagctggatagactgagcgaagaatctgtgaacaacgacatctcctcctggacaaagggcagaagcggagaagctctgagcctcctgaagaaaagattctcccatagacccgtgcaggagaagttcgtgtgcctgaactgcggcttcgagacacacgcagccgagcaagccgccctgaacatcgccagatcctggctgttcctgcggagccaggagtacaagaaataccagacaaacaagacaaccggcaacaccgataagagagccttcgtcgagacctggcagtccttttaccggaagaagcttaaggaggtgtggaaacctgccgtgcggtctggcggatctggcggaggctcccagccccagggcaccatgaccttcaaggacgtggaggtgaccttcagccaggacgagtggggcctgctggacgccagccagaggaacctgtacagggacgtgatgctggagaactacggcaacatggccagcgtggtgggccccttcaccaagcccgccctgatcagctggctggaggccagggagccctggggcctgaacgtgcagggcgtgcagctgaagggcaaccccggcgccgcccccggcggcccaagcagcggcgcccctcctcccagcggcggcagcccagccggctccccaacctctaccgaggagggcacctctgagtccgccacccccgagagcggccctggcacctccaccgagcccagcgagggcagcgcacccggcagccctgccggcagccccacctccacagaggagggaaccagcaccgagcccagcgaaggcagcgccccaggcaccagcaccgagcctagtgagcaggagattaaacggatcaacaagatcagaagaagacttgtgaaagacagcaacaccaagaaggccggcaagacaggccccatgaaaaccctgctggttagagtgatgacacccgatctgagagagcggctggaaaacctgagaaagaagcctgaaaatatcccccagcccatcagcaatacatctagagccaacctgaataagctgctgaccgattacaccgaaatgaagaaggcgatcctgcatgtgtactgggaagagttccagaaggaccctgtgggcctgatgagccgggtggcccagcctgccagcaagaagatcgatcagaacaagctgaaacctgagatggacgagaagggcaacctgaccaccgccggctttgcctgctctcagtgtggccagcccctgttcgtgtacaagctggagcaggtgtctgagaagggcaaggcttacaccaactacttcggacggtgcaatgtggccgagcacgaaaagctgatcctgctggcccagctgaagcccgagaaggatagcgacgaagccgtgacatatagcctgggaaagtttgggcagagggccctggatttctacagcattcatgtgaccaaggagtccacccaccccgtgaagcccctggcccagatcgccggaaacagatacgcctccggacctgtgggaaaggccctgagcgacgcatgtatgggcacaatcgcctccttcctgtctaagtaccaggacatcatcatcgaacaccagaaggtggtgaagggcaaccagaagagactggagagcctgcgggagctggccggcaaggaaaacctggaataccctagcgtgaccctgccacctcagcctcacaccaaggagggcgttgatgcctacaacgaagtgatcgcccgggtgcgaatgtgggtgaacctgaacctgtggcagaagctgaagctaagcagagatgatgccaagcctctgctgagactgaagggattcccttcctttcctctggtcgagagacaggccaacgaagtggactggtgggacatggtgtgtaacgtgaagaagctgatcaacgagaaaaaggaggatggcaaggtgttttggcagaatctggctggctacaagagacaggaagccctgagaccatacctgagcagcgaggaagatcggaagaagggaaagaaattcgctcggtaccagctgggcgacctgctgctgcacctggaaaagaagcacggcgaggactggggaaaggtgtacgacgaggcctgggagcggattgacaagaaagtggaaggcctgagcaagcacatcaagctggaagaggaacggagaagcgaggacgcccagagcaaggccgccctgaccgactggctgcgggctaaggccagcttcgtgatcgagggcctgaaggaggccgacaaggacgagttctgcagatgcgagctgaagctgcagaagtggtacggggacctgcggggaaagcccttcgccatcgaagccgagaacagcatcctggacatcagcggcttcagcaagcagtacaactgtgccttcatctggcagaaggacggcgtgaagaagctgaacctgtacctgatcatcaactacttcaagggcggcaagctgcggttcaagaagatcaaacctgaagccttcgaagccaacagattctacaccgtgatcaacaaaaagagcggcgagatcgtgcccatggaggtgaacttcaacttcgacgaccccaacctgatcatcctgcctctggcctttggcaagagacagggcagagaattcatctggaacgacctgctgtccctggaaaccggcagcctgaagctggccaacggaagagtgatcgagaagacactgtacaacagaagaacccggcaggatgagcctgccctgttcgtggccctgaccttcgagcggcgggaggtcctggactcctccaatatcaaaccaatgaacctgatcggcgtggcaagaggcgaaaacatccccgccgtgatcgccctgaccgaccccgagggctgcccactgagccggtttaaggatagcctgggaaacccaacccacatcctgagaatcggcgagagctataaggagaagcagcggaccatccaggccaagaaggaggtggagcagcggagagccggcggctacagccggaagtacgccagcaaagccaagaatctggcagacgatatggtgagaaacaccgctagagatctgctgtactacgccgtgacccaggatgccatgctgatcttcgccaacctgagccggggcttcggccggcagggcaagcggaccttcatggccgagagacagtacacacggatggaggactggctgaccgccaagctggcctacgagggcctgagcaagacctacctgtccaagacactggcccagtacacctccaagacatgcagcaactgtgggtttaccatcaccagcgccgactacgacagggtgctggagaagctgaagaagacagcaacaggctggatgaccacaattaacggcaaggagctgaaggtggagggccagattacctactacaacagatacaagagacagaacgtagtcaaggacctgtccgtcgagctggatagactgagcgaagaatctgtgaacaacgacatctcctcctggacaaagggcagaagcggagaagctctgagcctcctgaagaaaagattctcccatagacccgtgcaggagaagttcgtgtgcctgaactgcggcttcgagacacacgcagccgagcaagccgccctgaacatcgccagatcctggctgttcctgcggagccaggagtacaagaaataccagacaaacaagacaaccggcaacaccgataagagagccttcgtcgagacctggcagtccttttaccggaagaagcttaaggaggtgtggaaacctgccgtgcggtctggcggatctggcggaggctcctcagccccagggcaccatgaccttcaaggacgtggaggtgaccttcagccaggacgagtggggcctgctggacgccagccagaggaacctgtacagggacgtgatgctggagaactacggcaacatggccagcgtggtgggccccttcaccaagcccgccctgatcagctggctggaggccagggagccctggggcctgaacgtgcagggcgtgcagctgaagggcaaccccggcgccgcccccggatctggctccggcagcggccccaagaaaaagagaaaagtctaagctgccttctgcggggcttgccttctggccatgcccttcttctctcccttgcacctgtacctcttggtctttgaataaagcctgagtaggaaggctagcaaaaaaaaaaaaaaaaaaaaaaaaaaaaaaaaaaaaaaaaaaaaaaaaaaaaaaaaaaaaaaaaaaaaaaaaaaaaaaaa

SEQ ID NO: 15421 - RNA, 9485 nt, synthetic construct
  source 1..9485: mol_type = other RNA
aggaaataagagagaaaagaagagtaagaagaaatataagagccaccatggcccctaagaagaagcgtaaagtgagccggatggaacgcctcgtctacgaggtgcggcagaagtgcagaaacatcgaggacatctgcatctcctgcggatctctgaacgtgaccctggagcacccactgttcatcggcggcatgtgccagaactgtaaaaactgttttctggagtgtgcctatcaatacgacgatgacggctaccagagctactgcaccatctgttgcggcggaagagaggtgctgatgtgtggaaataacaactgctgccggtgcttctgcgtggaatgcgtggacctgctggtgggccccggcgccgcccaggccgctattaaggaagatccttggaactgctacatgtgcggccacaagggcacatacggcctgctgagacggagagaggactggcctagcagactgcagatgttcttcgccaataaccacgaccaggagttcgacccccctaaggtgtaccctcccgtccccgccgagaagagaaagcccatccgggtcctgagcctgttcgatggcatcgccaccggtctgctggtgctgaaggacctgggcatccaggtggataggtacattgcctccgaggtgtgcgaggactccatcaccgtgggaatggtgcgtcatcagggcaagatcatgtacgtgggcgacgtgcggagcgtgacacagaagcatatccaggagtggggccctttcgacctggtgatcggcggcagcccttgcaatgacctgagcatcgtgaacccagcccggaagggcctgtacgagggaaccggcagactgttcttcgagttttacagactgctgcacgacgcccggcctaaggaaggcgacgaccggcccttcttttggctgttcgagaatgtggtggccatgggagtcagcgacaagcgggatattagccggttcctggagagcaaccccgtgatgatcgatgccaaggaagtgagcgccgcccaccgggccagatacttctggggcaatctgcctggcatgaacagacccctggccagcaccgtgaacgacaagctggagctgcaggagtgcctggagcacggccggatcgccaagttcagcaaggtgagaaccatcaccacccgaagcaacagcatcaaacaaggcaaggaccagcactttcctgtgttcatgaacgagaaggaggacatcctgtggtgtaccgagatggagagagtgttcgggttcccagtccactacacagatgtcagcaacatgtctagactggccagacagagactgctgggaagaagctggtccgtccctgtgatcagacacctgttcgcccctctgaaggagtacttcgcctgcgtgagcagcggcaacagcaacgccaacagccggggccccagcttctctagcggcctggtgccactgtccctgagagggagccacatgggccccatggagatctacaaaaccgtgagcgcctggaagcggcagcctgtgcgcgtgctgagcctgtttcggaatatcgataaagtcctgaaaagcctgggattcctggagagcggctctggctccggcggtggcaccctgaagtacgtggaggatgtgacaaacgtggtcagacgggatgtggagaagtggggccccttcgatctggtgtacggcagcacccaacccctgggcagctcttgtgaccggtgccctggctggtacatgtttcagttccaccggatcctgcagtacgccctgccgagacaggagtcccagcggccattcttttggattttcatggacaacttgctgctgaccgaggatgaccaggaaactaccactcggttcctgcagaccgaagccgtgaccctgcaggacgtgagaggccgggactaccagaacgccatgcgggtgtggtccaacatccctggactgaaaagcaagcacgcacctctgacccctaaagaagaggagtacctgcaggcccaggtgcggagcagaagcaagctggacgcccctaaggtggatctgctggtgaagaattgcctcctgcccctgagagagtacttcaagtatttcagccagaatagtctgcccctgggaggcagcggcggcggcgccctggtgacatttgaggacgtcgccgtgcggttcacccaggaggaatgggctctgctggatccttctcagaaaatcctgtaccgggacgtgatgagagagacataccggaatctgacctccgtgggcatcaactgggaatgttgggaccttgaagcctgcttcagaagcctgggaagaaacctgagagtgcaggtggtgaagagaaagtgcgagctgaccaacagcggcccctgcgccgagggcggcccaagcagcggcgcccctcctcccagcggcggcagcccagccggctccccaacctctaccgaggagggcacctctgagtccgccacccccgagagcggccctggcacctccaccgagcccagcgagggcagcgcacccggcagccctgccggcagccccacctccacagaggagggaaccagcaccgagcccagcgaaggcagcgccccaggcaccagcaccgagcctagtgagcaggagattaaacggatcaacaagatcagaagaagacttgtgaaagacagcaacaccaagaaggccggcaagacaggccccatgaaaaccctgctggttagagtgatgacacccgatctgagagagcggctggaaaacctgagaaagaagcctgaaaatatcccccagcccatcagcaatacatctagagccaacctgaataagctgctgaccgattacaccgaaatgaagaaggcgatcctgcatgtgtactgggaagagttccagaaggaccctgtgggcctgatgagccgggtggcccagcctgccagcaagaagatcgatcagaacaagctgaaacctgagatggacgagaagggcaacctgaccaccgccggctttgcctgctctcagtgtggccagcccctgttcgtgtacaagctggagcaggtgtctgagaagggcaaggcttacaccaactacttcggacggtgcaatgtggccgagcacgaaaagctgatcctgctggcccagctgaagcccgagaaggatagcgacgaagccgtgacatatagcctgggaaagtttgggcagagggccctggatttctacagcattcatgtgaccaaggagtccacccaccccgtgaagcccctggcccagatcgccggaaacagatacgcctccggacctgtgggaaaggccctgagcgacgcatgtatgggcacaatcgcctccttcctgtctaagtaccaggacatcatcatcgaacaccagaaggtggtgaagggcaaccagaagagactggagagcctgcgggagctggccggcaaggaaaacctggaataccctagcgtgaccctgccacctcagcctcacaccaaggagggcgttgatgcctacaacgaagtgatcgcccgggtgcgaatgtgggtgaacctgaacctgtggcagaagctgaagctaagcagagatgatgccaagcctctgctgagactgaagggattcccttcctttcctctggtcgagagacaggccaacgaagtggactggtgggacatggtgtgtaacgtgaagaagctgatcaacgagaaaaaggaggatggcaaggtgttttggcagaatctggctggctacaagagacaggaagccctgagaccatacctgagcagcgaggaagatcggaagaagggaaagaaattcgctcggtaccagctgggcgacctgctgctgcacctggaaaagaagcacggcgaggactggggaaaggtgtacgacgaggcctgggagcggattgacaagaaagtggaaggcctgagcaagcacatcaagctggaagaggaacggagaagcgaggacgcccagagcaaggccgccctgaccgactggctgcgggctaaggccagcttcgtgatcgagggcctgaaggaggccgacaaggacgagttctgcagatgcgagctgaagctgcagaagtggtacggggacctgcggggaaagcccttcgccatcgaagccgagaacagcatcctggacatcagcggcttcagcaagcagtacaactgtgccttcatctggcagaaggacggcgtgaagaagctgaacctgtacctgatcatcaactacttcaagggcggcaagctgcggttcaagaagatcaaacctgaagccttcgaagccaacagattctacaccgtgatcaacaaaaagagcggcgagatcgtgcccatggaggtgaacttcaacttcgacgaccccaacctgatcatcctgcctctggcctttggcaagagacagggcagagaattcatctggaacgacctgctgtccctggaaaccggcagcctgaagctggccaacggaagagtgatcgagaagacactgtacaacagaagaacccggcaggatgagcctgccctgttcgtggccctgaccttcgagcggcgggaggtcctggactcctccaatatcaaaccaatgaacctgatcggcgtggcaagaggcgaaaacatccccgccgtgatcgccctgaccgaccccgagggctgcccactgagccggtttaaggatagcctgggaaacccaacccacatcctgagaatcggcgagagctataaggagaagcagcggaccatccaggccaagaaggaggtggagcagcggagagccggcggctacagccggaagtacgccagcaaagccaagaatctggcagacgatatggtgagaaacaccgctagagatctgctgtactacgccgtgacccaggatgccatgctgatcttcgccaacctgagccggggcttcggccggcagggcaagcggaccttcatggccgagagacagtacacacggatggaggactggctgaccgccaagctggcctacgagggcctgagcaagacctacctgtccaagacactggcccagtacacctccaagacatgcagcaactgtgggtttaccatcaccagcgccgactacgacagggtgctggagaagctgaagaagacagcaacaggctggatgaccacaattaacggcaaggagctgaaggtggagggccagattacctactacaacagatacaagagacagaacgtagtcaaggacctgtccgtcgagctggatagactgagcgaagaatctgtgaacaacgacatctcctcctggacaaagggcagaagcggagaagctctgagcctcctgaagaaaagattctcccatagacccgtgcaggagaagttcgtgtgcctgaactgcggcttcgagacacacgcagccgagcaagccgccctgaacatcgccagatcctggctgttcctgcggagccaggagtacaagaaataccagacaaacaagacaaccggcaacaccgataagagagccttcgtcgagacctggcagtccttttaccggaagaagcttaaggaggtgtggaaacctgccgtgcggtctggcggatctggcggaggctccagccagggcaggctgaggttccaggacgtggccatcgacttcaccctggaggagtgggagtgcctggacctgggccagagggagctgtacagggacgtgatgctggagaactacggcaacctggccagcctgggcctgatcgtgtgcaagcccgacctggtgaccttcctggagaagatgagggacccccaggacgtgaggggcatcgagaccaccgccatccaccccgacctggccagcttcggcggcccaagcagcggcgcccctcctcccagcggcggcagcccagccggctccccaacctctaccgaggagggcacctctgagtccgccacccccgagagcggccctggcacctccaccgagcccagcgagggcagcgcacccggcagccctgccggcagccccacctccacagaggagggaaccagcaccgagcccagcgaaggcagcgccccaggcaccagcaccgagcctagtgagcaggagattaaacggatcaacaagatcagaagaagacttgtgaaagacagcaacaccaagaaggccggcaagacaggccccatgaaaaccctgctggttagagtgatgacacccgatctgagagagcggctggaaaacctgagaaagaagcctgaaaatatcccccagcccatcagcaatacatctagagccaacctgaataagctgctgaccgattacaccgaaatgaagaaggcgatcctgcatgtgtactgggaagagttccagaaggaccctgtgggcctgatgagccgggtggcccagcctgccagcaagaagatcgatcagaacaagctgaaacctgagatggacgagaagggcaacctgaccaccgccggctttgcctgctctcagtgtggccagcccctgttcgtgtacaagctggagcaggtgtctgagaagggcaaggcttacaccaactacttcggacggtgcaatgtggccgagcacgaaaagctgatcctgctggcccagctgaagcccgagaaggatagcgacgaagccgtgacatatagcctgggaaagtttgggcagagggccctggatttctacagcattcatgtgaccaaggagtccacccaccccgtgaagcccctggcccagatcgccggaaacagatacgcctccggacctgtgggaaaggccctgagcgacgcatgtatgggcacaatcgcctccttcctgtctaagtaccaggacatcatcatcgaacaccagaaggtggtgaagggcaaccagaagagactggagagcctgcgggagctggccggcaaggaaaacctggaataccctagcgtgaccctgccacctcagcctcacaccaaggagggcgttgatgcctacaacgaagtgatcgcccgggtgcgaatgtgggtgaacctgaacctgtggcagaagctgaagctaagcagagatgatgccaagcctctgctgagactgaagggattcccttcctttcctctggtcgagagacaggccaacgaagtggactggtgggacatggtgtgtaacgtgaagaagctgatcaacgagaaaaaggaggatggcaaggtgttttggcagaatctggctggctacaagagacaggaagccctgagaccatacctgagcagcgaggaagatcggaagaagggaaagaaattcgctcggtaccagctgggcgacctgctgctgcacctggaaaagaagcacggcgaggactggggaaaggtgtacgacgaggcctgggagcggattgacaagaaagtggaaggcctgagcaagcacatcaagctggaagaggaacggagaagcgaggacgcccagagcaaggccgccctgaccgactggctgcgggctaaggccagcttcgtgatcgagggcctgaaggaggccgacaaggacgagttctgcagatgcgagctgaagctgcagaagtggtacggggacctgcggggaaagcccttcgccatcgaagccgagaacagcatcctggacatcagcggcttcagcaagcagtacaactgtgccttcatctggcagaaggacggcgtgaagaagctgaacctgtacctgatcatcaactacttcaagggcggcaagctgcggttcaagaagatcaaacctgaagccttcgaagccaacagattctacaccgtgatcaacaaaaagagcggcgagatcgtgcccatggaggtgaacttcaacttcgacgaccccaacctgatcatcctgcctctggcctttggcaagagacagggcagagaattcatctggaacgacctgctgtccctggaaaccggcagcctgaagctggccaacggaagagtgatcgagaagacactgtacaacagaagaacccggcaggatgagcctgccctgttcgtggccctgaccttcgagcggcgggaggtcctggactcctccaatatcaaaccaatgaacctgatcggcgtggcaagaggcgaaaacatccccgccgtgatcgccctgaccgaccccgagggctgcccactgagccggtttaaggatagcctgggaaacccaacccacatcctgagaatcggcgagagctataaggagaagcagcggaccatccaggccaagaaggaggtggagcagcggagagccggcggctacagccggaagtacgccagcaaagccaagaatctggcagacgatatggtgagaaacaccgctagagatctgctgtactacgccgtgacccaggatgccatgctgatcttcgccaacctgagccggggcttcggccggcagggcaagcggaccttcatggccgagagacagtacacacggatggaggactggctgaccgccaagctggcctacgagggcctgagcaagacctacctgtccaagacactggcccagtacacctccaagacatgcagcaactgtgggtttaccatcaccagcgccgactacgacagggtgctggagaagctgaagaagacagcaacaggctggatgaccacaattaacggcaaggagctgaaggtggagggccagattacctactacaacagatacaagagacagaacgtagtcaaggacctgtccgtcgagctggatagactgagcgaagaatctgtgaacaacgacatctcctcctggacaaagggcagaagcggagaagctctgagcctcctgaagaaaagattctcccatagacccgtgcaggagaagttcgtgtgcctgaactgcggcttcgagacacacgcagccgagcaagccgccctgaacatcgccagatcctggctgttcctgcggagccaggagtacaagaaataccagacaaacaagacaaccggcaacaccgataagagagccttcgtcgagacctggcagtccttttaccggaagaagcttaaggaggtgtggaaacctgccgtgcggtctggcggatctggcggaggctcctagccagggcaggctgaggttccaggacgtggccatcgacttcaccctggaggagtgggagtgcctggacctgggccagagggagctgtacagggacgtgatgctggagaactacggcaacctggccagcctgggcctgatcgtgtgcaagcccgacctggtgaccttcctggagaagatgagggacccccaggacgtgaggggcatcgagaccaccgccatccaccccgacctggccagcttcggatctggctccggcagcggccccaagaaaaagagaaaagtctaagctgccttctgcggggcttgccttctggccatgcccttcttctctcccttgcacctgtacctcttggtctttgaataaagcctgagtaggaaggctagcaaaaaaaaaaaaaaaaaaaaaaaaaaaaaaaaaaaaaaaaaaaaaaaaaaaaaaaaaaaaaaaaaaaaaaaaaaaaaaaa

SEQ ID NO: 15422 - RNA, 9485 nt, synthetic construct
  source 1..9485: mol_type = other RNA
aggaaataagagagaaaagaagagtaagaagaaatataagagccaccatggcccctaagaagaagcgtaaagtgagccggatggaacgcctcgtctacgaggtgcggcagaagtgcagaaacatcgaggacatctgcatctcctgcggatctctgaacgtgaccctggagcacccactgttcatcggcggcatgtgccagaactgtaaaaactgttttctggagtgtgcctatcaatacgacgatgacggctaccagagctactgcaccatctgttgcggcggaagagaggtgctgatgtgtggaaataacaactgctgccggtgcttctgcgtggaatgcgtggacctgctggtgggccccggcgccgcccaggccgctattaaggaagatccttggaactgctacatgtgcggccacaagggcacatacggcctgctgagacggagagaggactggcctagcagactgcagatgttcttcgccaataaccacgaccaggagttcgacccccctaaggtgtaccctcccgtccccgccgagaagagaaagcccatccgggtcctgagcctgttcgatggcatcgccaccggtctgctggtgctgaaggacctgggcatccaggtggataggtacattgcctccgaggtgtgcgaggactccatcaccgtgggaatggtgcgtcatcagggcaagatcatgtacgtgggcgacgtgcggagcgtgacacagaagcatatccaggagtggggccctttcgacctggtgatcggcggcagcccttgcaatgacctgagcatcgtgaacccagcccggaagggcctgtacgagggaaccggcagactgttcttcgagttttacagactgctgcacgacgcccggcctaaggaaggcgacgaccggcccttcttttggctgttcgagaatgtggtggccatgggagtcagcgacaagcgggatattagccggttcctggagagcaaccccgtgatgatcgatgccaaggaagtgagcgccgcccaccgggccagatacttctggggcaatctgcctggcatgaacagacccctggccagcaccgtgaacgacaagctggagctgcaggagtgcctggagcacggccggatcgccaagttcagcaaggtgagaaccatcaccacccgaagcaacagcatcaaacaaggcaaggaccagcactttcctgtgttcatgaacgagaaggaggacatcctgtggtgtaccgagatggagagagtgttcgggttcccagtccactacacagatgtcagcaacatgtctagactggccagacagagactgctgggaagaagctggtccgtccctgtgatcagacacctgttcgcccctctgaaggagtacttcgcctgcgtgagcagcggcaacagcaacgccaacagccggggccccagcttctctagcggcctggtgccactgtccctgagagggagccacatgggccccatggagatctacaaaaccgtgagcgcctggaagcggcagcctgtgcgcgtgctgagcctgtttcggaatatcgataaagtcctgaaaagcctgggattcctggagagcggctctggctccggcggtggcaccctgaagtacgtggaggatgtgacaaacgtggtcagacgggatgtggagaagtggggccccttcgatctggtgtacggcagcacccaacccctgggcagctcttgtgaccggtgccctggctggtacatgtttcagttccaccggatcctgcagtacgccctgccgagacaggagtcccagcggccattcttttggattttcatggacaacttgctgctgaccgaggatgaccaggaaactaccactcggttcctgcagaccgaagccgtgaccctgcaggacgtgagaggccgggactaccagaacgccatgcgggtgtggtccaacatccctggactgaaaagcaagcacgcacctctgacccctaaagaagaggagtacctgcaggcccaggtgcggagcagaagcaagctggacgcccctaaggtggatctgctggtgaagaattgcctcctgcccctgagagagtacttcaagtatttcagccagaatagtctgcccctgggaggcagcggcggcggcgccctggtgacatttgaggacgtcgccgtgcggttcacccaggaggaatgggctctgctggatccttctcagaaaatcctgtaccgggacgtgatgagagagacataccggaatctgacctccgtgggcatcaactgggaatgttgggaccttgaagcctgcttcagaagcctgggaagaaacctgagagtgcaggtggtgaagagaaagtgcgagctgaccaacagcggcccctgcgccgagggcggcccaagcagcggcgcccctcctcccagcggcggcagcccagccggctccccaacctctaccgaggagggcacctctgagtccgccacccccgagagcggccctggcacctccaccgagcccagcgagggcagcgcacccggcagccctgccggcagccccacctccacagaggagggaaccagcaccgagcccagcgaaggcagcgccccaggcaccagcaccgagcctagtgagcaggagattaaacggatcaacaagatcagaagaagacttgtgaaagacagcaacaccaagaaggccggcaagacaggccccatgaaaaccctgctggttagagtgatgacacccgatctgagagagcggctggaaaacctgagaaagaagcctgaaaatatcccccagcccatcagcaatacatctagagccaacctgaataagctgctgaccgattacaccgaaatgaagaaggcgatcctgcatgtgtactgggaagagttccagaaggaccctgtgggcctgatgagccgggtggcccagcctgccagcaagaagatcgatcagaacaagctgaaacctgagatggacgagaagggcaacctgaccaccgccggctttgcctgctctcagtgtggccagcccctgttcgtgtacaagctggagcaggtgtctgagaagggcaaggcttacaccaactacttcggacggtgcaatgtggccgagcacgaaaagctgatcctgctggcccagctgaagcccgagaaggatagcgacgaagccgtgacatatagcctgggaaagtttgggcagagggccctggatttctacagcattcatgtgaccaaggagtccacccaccccgtgaagcccctggcccagatcgccggaaacagatacgcctccggacctgtgggaaaggccctgagcgacgcatgtatgggcacaatcgcctccttcctgtctaagtaccaggacatcatcatcgaacaccagaaggtggtgaagggcaaccagaagagactggagagcctgcgggagctggccggcaaggaaaacctggaataccctagcgtgaccctgccacctcagcctcacaccaaggagggcgttgatgcctacaacgaagtgatcgcccgggtgcgaatgtgggtgaacctgaacctgtggcagaagctgaagctaagcagagatgatgccaagcctctgctgagactgaagggattcccttcctttcctctggtcgagagacaggccaacgaagtggactggtgggacatggtgtgtaacgtgaagaagctgatcaacgagaaaaaggaggatggcaaggtgttttggcagaatctggctggctacaagagacaggaagccctgagaccatacctgagcagcgaggaagatcggaagaagggaaagaaattcgctcggtaccagctgggcgacctgctgctgcacctggaaaagaagcacggcgaggactggggaaaggtgtacgacgaggcctgggagcggattgacaagaaagtggaaggcctgagcaagcacatcaagctggaagaggaacggagaagcgaggacgcccagagcaaggccgccctgaccgactggctgcgggctaaggccagcttcgtgatcgagggcctgaaggaggccgacaaggacgagttctgcagatgcgagctgaagctgcagaagtggtacggggacctgcggggaaagcccttcgccatcgaagccgagaacagcatcctggacatcagcggcttcagcaagcagtacaactgtgccttcatctggcagaaggacggcgtgaagaagctgaacctgtacctgatcatcaactacttcaagggcggcaagctgcggttcaagaagatcaaacctgaagccttcgaagccaacagattctacaccgtgatcaacaaaaagagcggcgagatcgtgcccatggaggtgaacttcaacttcgacgaccccaacctgatcatcctgcctctggcctttggcaagagacagggcagagaattcatctggaacgacctgctgtccctggaaaccggcagcctgaagctggccaacggaagagtgatcgagaagacactgtacaacagaagaacccggcaggatgagcctgccctgttcgtggccctgaccttcgagcggcgggaggtcctggactcctccaatatcaaaccaatgaacctgatcggcgtggcaagaggcgaaaacatccccgccgtgatcgccctgaccgaccccgagggctgcccactgagccggtttaaggatagcctgggaaacccaacccacatcctgagaatcggcgagagctataaggagaagcagcggaccatccaggccaagaaggaggtggagcagcggagagccggcggctacagccggaagtacgccagcaaagccaagaatctggcagacgatatggtgagaaacaccgctagagatctgctgtactacgccgtgacccaggatgccatgctgatcttcgccaacctgagccggggcttcggccggcagggcaagcggaccttcatggccgagagacagtacacacggatggaggactggctgaccgccaagctggcctacgagggcctgagcaagacctacctgtccaagacactggcccagtacacctccaagacatgcagcaactgtgggtttaccatcaccagcgccgactacgacagggtgctggagaagctgaagaagacagcaacaggctggatgaccacaattaacggcaaggagctgaaggtggagggccagattacctactacaacagatacaagagacagaacgtagtcaaggacctgtccgtcgagctggatagactgagcgaagaatctgtgaacaacgacatctcctcctggacaaagggcagaagcggagaagctctgagcctcctgaagaaaagattctcccatagacccgtgcaggagaagttcgtgtgcctgaactgcggcttcgagacacacgcagccgagcaagccgccctgaacatcgccagatcctggctgttcctgcggagccaggagtacaagaaataccagacaaacaagacaaccggcaacaccgataagagagccttcgtcgagacctggcagtccttttaccggaagaagcttaaggaggtgtggaaacctgccgtgcggtctggcggatctggcggaggctccgcccaggaccccgtgaccttcgacgacatcagcgtgtacttcagcagggacgagtgggccctgctggacgccggccagaagcagctgtacagggaggtgatggccgagaactacagggccctggtgagcgtgggctacgtgatggaggagcccggcctggtgagccacatcgagcacgagcagcagggcagccccatcaggagcaggagcagcctgcacgccggcaggcactgcggcttcatcggcggcccaagcagcggcgcccctcctcccagcggcggcagcccagccggctccccaacctctaccgaggagggcacctctgagtccgccacccccgagagcggccctggcacctccaccgagcccagcgagggcagcgcacccggcagccctgccggcagccccacctccacagaggagggaaccagcaccgagcccagcgaaggcagcgccccaggcaccagcaccgagcctagtgagcaggagattaaacggatcaacaagatcagaagaagacttgtgaaagacagcaacaccaagaaggccggcaagacaggccccatgaaaaccctgctggttagagtgatgacacccgatctgagagagcggctggaaaacctgagaaagaagcctgaaaatatcccccagcccatcagcaatacatctagagccaacctgaataagctgctgaccgattacaccgaaatgaagaaggcgatcctgcatgtgtactgggaagagttccagaaggaccctgtgggcctgatgagccgggtggcccagcctgccagcaagaagatcgatcagaacaagctgaaacctgagatggacgagaagggcaacctgaccaccgccggctttgcctgctctcagtgtggccagcccctgttcgtgtacaagctggagcaggtgtctgagaagggcaaggcttacaccaactacttcggacggtgcaatgtggccgagcacgaaaagctgatcctgctggcccagctgaagcccgagaaggatagcgacgaagccgtgacatatagcctgggaaagtttgggcagagggccctggatttctacagcattcatgtgaccaaggagtccacccaccccgtgaagcccctggcccagatcgccggaaacagatacgcctccggacctgtgggaaaggccctgagcgacgcatgtatgggcacaatcgcctccttcctgtctaagtaccaggacatcatcatcgaacaccagaaggtggtgaagggcaaccagaagagactggagagcctgcgggagctggccggcaaggaaaacctggaataccctagcgtgaccctgccacctcagcctcacaccaaggagggcgttgatgcctacaacgaagtgatcgcccgggtgcgaatgtgggtgaacctgaacctgtggcagaagctgaagctaagcagagatgatgccaagcctctgctgagactgaagggattcccttcctttcctctggtcgagagacaggccaacgaagtggactggtgggacatggtgtgtaacgtgaagaagctgatcaacgagaaaaaggaggatggcaaggtgttttggcagaatctggctggctacaagagacaggaagccctgagaccatacctgagcagcgaggaagatcggaagaagggaaagaaattcgctcggtaccagctgggcgacctgctgctgcacctggaaaagaagcacggcgaggactggggaaaggtgtacgacgaggcctgggagcggattgacaagaaagtggaaggcctgagcaagcacatcaagctggaagaggaacggagaagcgaggacgcccagagcaaggccgccctgaccgactggctgcgggctaaggccagcttcgtgatcgagggcctgaaggaggccgacaaggacgagttctgcagatgcgagctgaagctgcagaagtggtacggggacctgcggggaaagcccttcgccatcgaagccgagaacagcatcctggacatcagcggcttcagcaagcagtacaactgtgccttcatctggcagaaggacggcgtgaagaagctgaacctgtacctgatcatcaactacttcaagggcggcaagctgcggttcaagaagatcaaacctgaagccttcgaagccaacagattctacaccgtgatcaacaaaaagagcggcgagatcgtgcccatggaggtgaacttcaacttcgacgaccccaacctgatcatcctgcctctggcctttggcaagagacagggcagagaattcatctggaacgacctgctgtccctggaaaccggcagcctgaagctggccaacggaagagtgatcgagaagacactgtacaacagaagaacccggcaggatgagcctgccctgttcgtggccctgaccttcgagcggcgggaggtcctggactcctccaatatcaaaccaatgaacctgatcggcgtggcaagaggcgaaaacatccccgccgtgatcgccctgaccgaccccgagggctgcccactgagccggtttaaggatagcctgggaaacccaacccacatcctgagaatcggcgagagctataaggagaagcagcggaccatccaggccaagaaggaggtggagcagcggagagccggcggctacagccggaagtacgccagcaaagccaagaatctggcagacgatatggtgagaaacaccgctagagatctgctgtactacgccgtgacccaggatgccatgctgatcttcgccaacctgagccggggcttcggccggcagggcaagcggaccttcatggccgagagacagtacacacggatggaggactggctgaccgccaagctggcctacgagggcctgagcaagacctacctgtccaagacactggcccagtacacctccaagacatgcagcaactgtgggtttaccatcaccagcgccgactacgacagggtgctggagaagctgaagaagacagcaacaggctggatgaccacaattaacggcaaggagctgaaggtggagggccagattacctactacaacagatacaagagacagaacgtagtcaaggacctgtccgtcgagctggatagactgagcgaagaatctgtgaacaacgacatctcctcctggacaaagggcagaagcggagaagctctgagcctcctgaagaaaagattctcccatagacccgtgcaggagaagttcgtgtgcctgaactgcggcttcgagacacacgcagccgagcaagccgccctgaacatcgccagatcctggctgttcctgcggagccaggagtacaagaaataccagacaaacaagacaaccggcaacaccgataagagagccttcgtcgagacctggcagtccttttaccggaagaagcttaaggaggtgtggaaacctgccgtgcggtctggcggatctggcggaggctcctgcccaggaccccgtgaccttcgacgacatcagcgtgtacttcagcagggacgagtgggccctgctggacgccggccagaagcagctgtacagggaggtgatggccgagaactacagggccctggtgagcgtgggctacgtgatggaggagcccggcctggtgagccacatcgagcacgagcagcagggcagccccatcaggagcaggagcagcctgcacgccggcaggcactgcggcttcatcggatctggctccggcagcggccccaagaaaaagagaaaagtctaagctgccttctgcggggcttgccttctggccatgcccttcttctctcccttgcacctgtacctcttggtctttgaataaagcctgagtaggaaggctagcaaaaaaaaaaaaaaaaaaaaaaaaaaaaaaaaaaaaaaaaaaaaaaaaaaaaaaaaaaaaaaaaaaaaaaaaaaaaaaaa

SEQ ID NO: 15423 - RNA, 9485 nt, synthetic construct
  source 1..9485: mol_type = other RNA
aggaaataagagagaaaagaagagtaagaagaaatataagagccaccatggcccctaagaagaagcgtaaagtgagccggatggaacgcctcgtctacgaggtgcggcagaagtgcagaaacatcgaggacatctgcatctcctgcggatctctgaacgtgaccctggagcacccactgttcatcggcggcatgtgccagaactgtaaaaactgttttctggagtgtgcctatcaatacgacgatgacggctaccagagctactgcaccatctgttgcggcggaagagaggtgctgatgtgtggaaataacaactgctgccggtgcttctgcgtggaatgcgtggacctgctggtgggccccggcgccgcccaggccgctattaaggaagatccttggaactgctacatgtgcggccacaagggcacatacggcctgctgagacggagagaggactggcctagcagactgcagatgttcttcgccaataaccacgaccaggagttcgacccccctaaggtgtaccctcccgtccccgccgagaagagaaagcccatccgggtcctgagcctgttcgatggcatcgccaccggtctgctggtgctgaaggacctgggcatccaggtggataggtacattgcctccgaggtgtgcgaggactccatcaccgtgggaatggtgcgtcatcagggcaagatcatgtacgtgggcgacgtgcggagcgtgacacagaagcatatccaggagtggggccctttcgacctggtgatcggcggcagcccttgcaatgacctgagcatcgtgaacccagcccggaagggcctgtacgagggaaccggcagactgttcttcgagttttacagactgctgcacgacgcccggcctaaggaaggcgacgaccggcccttcttttggctgttcgagaatgtggtggccatgggagtcagcgacaagcgggatattagccggttcctggagagcaaccccgtgatgatcgatgccaaggaagtgagcgccgcccaccgggccagatacttctggggcaatctgcctggcatgaacagacccctggccagcaccgtgaacgacaagctggagctgcaggagtgcctggagcacggccggatcgccaagttcagcaaggtgagaaccatcaccacccgaagcaacagcatcaaacaaggcaaggaccagcactttcctgtgttcatgaacgagaaggaggacatcctgtggtgtaccgagatggagagagtgttcgggttcccagtccactacacagatgtcagcaacatgtctagactggccagacagagactgctgggaagaagctggtccgtccctgtgatcagacacctgttcgcccctctgaaggagtacttcgcctgcgtgagcagcggcaacagcaacgccaacagccggggccccagcttctctagcggcctggtgccactgtccctgagagggagccacatgggccccatggagatctacaaaaccgtgagcgcctggaagcggcagcctgtgcgcgtgctgagcctgtttcggaatatcgataaagtcctgaaaagcctgggattcctggagagcggctctggctccggcggtggcaccctgaagtacgtggaggatgtgacaaacgtggtcagacgggatgtggagaagtggggccccttcgatctggtgtacggcagcacccaacccctgggcagctcttgtgaccggtgccctggctggtacatgtttcagttccaccggatcctgcagtacgccctgccgagacaggagtcccagcggccattcttttggattttcatggacaacttgctgctgaccgaggatgaccaggaaactaccactcggttcctgcagaccgaagccgtgaccctgcaggacgtgagaggccgggactaccagaacgccatgcgggtgtggtccaacatccctggactgaaaagcaagcacgcacctctgacccctaaagaagaggagtacctgcaggcccaggtgcggagcagaagcaagctggacgcccctaaggtggatctgctggtgaagaattgcctcctgcccctgagagagtacttcaagtatttcagccagaatagtctgcccctgggaggcagcggcggcggcgccctggtgacatttgaggacgtcgccgtgcggttcacccaggaggaatgggctctgctggatccttctcagaaaatcctgtaccgggacgtgatgagagagacataccggaatctgacctccgtgggcatcaactgggaatgttgggaccttgaagcctgcttcagaagcctgggaagaaacctgagagtgcaggtggtgaagagaaagtgcgagctgaccaacagcggcccctgcgccgagggcggcccaagcagcggcgcccctcctcccagcggcggcagcccagccggctccccaacctctaccgaggagggcacctctgagtccgccacccccgagagcggccctggcacctccaccgagcccagcgagggcagcgcacccggcagccctgccggcagccccacctccacagaggagggaaccagcaccgagcccagcgaaggcagcgccccaggcaccagcaccgagcctagtgagcaggagattaaacggatcaacaagatcagaagaagacttgtgaaagacagcaacaccaagaaggccggcaagacaggccccatgaaaaccctgctggttagagtgatgacacccgatctgagagagcggctggaaaacctgagaaagaagcctgaaaatatcccccagcccatcagcaatacatctagagccaacctgaataagctgctgaccgattacaccgaaatgaagaaggcgatcctgcatgtgtactgggaagagttccagaaggaccctgtgggcctgatgagccgggtggcccagcctgccagcaagaagatcgatcagaacaagctgaaacctgagatggacgagaagggcaacctgaccaccgccggctttgcctgctctcagtgtggccagcccctgttcgtgtacaagctggagcaggtgtctgagaagggcaaggcttacaccaactacttcggacggtgcaatgtggccgagcacgaaaagctgatcctgctggcccagctgaagcccgagaaggatagcgacgaagccgtgacatatagcctgggaaagtttgggcagagggccctggatttctacagcattcatgtgaccaaggagtccacccaccccgtgaagcccctggcccagatcgccggaaacagatacgcctccggacctgtgggaaaggccctgagcgacgcatgtatgggcacaatcgcctccttcctgtctaagtaccaggacatcatcatcgaacaccagaaggtggtgaagggcaaccagaagagactggagagcctgcgggagctggccggcaaggaaaacctggaataccctagcgtgaccctgccacctcagcctcacaccaaggagggcgttgatgcctacaacgaagtgatcgcccgggtgcgaatgtgggtgaacctgaacctgtggcagaagctgaagctaagcagagatgatgccaagcctctgctgagactgaagggattcccttcctttcctctggtcgagagacaggccaacgaagtggactggtgggacatggtgtgtaacgtgaagaagctgatcaacgagaaaaaggaggatggcaaggtgttttggcagaatctggctggctacaagagacaggaagccctgagaccatacctgagcagcgaggaagatcggaagaagggaaagaaattcgctcggtaccagctgggcgacctgctgctgcacctggaaaagaagcacggcgaggactggggaaaggtgtacgacgaggcctgggagcggattgacaagaaagtggaaggcctgagcaagcacatcaagctggaagaggaacggagaagcgaggacgcccagagcaaggccgccctgaccgactggctgcgggctaaggccagcttcgtgatcgagggcctgaaggaggccgacaaggacgagttctgcagatgcgagctgaagctgcagaagtggtacggggacctgcggggaaagcccttcgccatcgaagccgagaacagcatcctggacatcagcggcttcagcaagcagtacaactgtgccttcatctggcagaaggacggcgtgaagaagctgaacctgtacctgatcatcaactacttcaagggcggcaagctgcggttcaagaagatcaaacctgaagccttcgaagccaacagattctacaccgtgatcaacaaaaagagcggcgagatcgtgcccatggaggtgaacttcaacttcgacgaccccaacctgatcatcctgcctctggcctttggcaagagacagggcagagaattcatctggaacgacctgctgtccctggaaaccggcagcctgaagctggccaacggaagagtgatcgagaagacactgtacaacagaagaacccggcaggatgagcctgccctgttcgtggccctgaccttcgagcggcgggaggtcctggactcctccaatatcaaaccaatgaacctgatcggcgtggcaagaggcgaaaacatccccgccgtgatcgccctgaccgaccccgagggctgcccactgagccggtttaaggatagcctgggaaacccaacccacatcctgagaatcggcgagagctataaggagaagcagcggaccatccaggccaagaaggaggtggagcagcggagagccggcggctacagccggaagtacgccagcaaagccaagaatctggcagacgatatggtgagaaacaccgctagagatctgctgtactacgccgtgacccaggatgccatgctgatcttcgccaacctgagccggggcttcggccggcagggcaagcggaccttcatggccgagagacagtacacacggatggaggactggctgaccgccaagctggcctacgagggcctgagcaagacctacctgtccaagacactggcccagtacacctccaagacatgcagcaactgtgggtttaccatcaccagcgccgactacgacagggtgctggagaagctgaagaagacagcaacaggctggatgaccacaattaacggcaaggagctgaaggtggagggccagattacctactacaacagatacaagagacagaacgtagtcaaggacctgtccgtcgagctggatagactgagcgaagaatctgtgaacaacgacatctcctcctggacaaagggcagaagcggagaagctctgagcctcctgaagaaaagattctcccatagacccgtgcaggagaagttcgtgtgcctgaactgcggcttcgagacacacgcagccgagcaagccgccctgaacatcgccagatcctggctgttcctgcggagccaggagtacaagaaataccagacaaacaagacaaccggcaacaccgataagagagccttcgtcgagacctggcagtccttttaccggaagaagcttaaggaggtgtggaaacctgccgtgcggtctggcggatctggcggaggctccatggccttcgaggacgtggccgtgtacttcagccaggaggagtggggcctgctggacaccgcccagagggccctgtacaggcacgtgatgctggagaacttcaccctggtgaccagcctgggcctgagcaccagcaggccccacgtggtgatccagctggagaggggcgaggagccctgggtgcccagcggcaaggacatgaccctggccaggaacacctacaggaggctgaacgccggcgagggcggcccaagcagcggcgcccctcctcccagcggcggcagcccagccggctccccaacctctaccgaggagggcacctctgagtccgccacccccgagagcggccctggcacctccaccgagcccagcgagggcagcgcacccggcagccctgccggcagccccacctccacagaggagggaaccagcaccgagcccagcgaaggcagcgccccaggcaccagcaccgagcctagtgagcaggagattaaacggatcaacaagatcagaagaagacttgtgaaagacagcaacaccaagaaggccggcaagacaggccccatgaaaaccctgctggttagagtgatgacacccgatctgagagagcggctggaaaacctgagaaagaagcctgaaaatatcccccagcccatcagcaatacatctagagccaacctgaataagctgctgaccgattacaccgaaatgaagaaggcgatcctgcatgtgtactgggaagagttccagaaggaccctgtgggcctgatgagccgggtggcccagcctgccagcaagaagatcgatcagaacaagctgaaacctgagatggacgagaagggcaacctgaccaccgccggctttgcctgctctcagtgtggccagcccctgttcgtgtacaagctggagcaggtgtctgagaagggcaaggcttacaccaactacttcggacggtgcaatgtggccgagcacgaaaagctgatcctgctggcccagctgaagcccgagaaggatagcgacgaagccgtgacatatagcctgggaaagtttgggcagagggccctggatttctacagcattcatgtgaccaaggagtccacccaccccgtgaagcccctggcccagatcgccggaaacagatacgcctccggacctgtgggaaaggccctgagcgacgcatgtatgggcacaatcgcctccttcctgtctaagtaccaggacatcatcatcgaacaccagaaggtggtgaagggcaaccagaagagactggagagcctgcgggagctggccggcaaggaaaacctggaataccctagcgtgaccctgccacctcagcctcacaccaaggagggcgttgatgcctacaacgaagtgatcgcccgggtgcgaatgtgggtgaacctgaacctgtggcagaagctgaagctaagcagagatgatgccaagcctctgctgagactgaagggattcccttcctttcctctggtcgagagacaggccaacgaagtggactggtgggacatggtgtgtaacgtgaagaagctgatcaacgagaaaaaggaggatggcaaggtgttttggcagaatctggctggctacaagagacaggaagccctgagaccatacctgagcagcgaggaagatcggaagaagggaaagaaattcgctcggtaccagctgggcgacctgctgctgcacctggaaaagaagcacggcgaggactggggaaaggtgtacgacgaggcctgggagcggattgacaagaaagtggaaggcctgagcaagcacatcaagctggaagaggaacggagaagcgaggacgcccagagcaaggccgccctgaccgactggctgcgggctaaggccagcttcgtgatcgagggcctgaaggaggccgacaaggacgagttctgcagatgcgagctgaagctgcagaagtggtacggggacctgcggggaaagcccttcgccatcgaagccgagaacagcatcctggacatcagcggcttcagcaagcagtacaactgtgccttcatctggcagaaggacggcgtgaagaagctgaacctgtacctgatcatcaactacttcaagggcggcaagctgcggttcaagaagatcaaacctgaagccttcgaagccaacagattctacaccgtgatcaacaaaaagagcggcgagatcgtgcccatggaggtgaacttcaacttcgacgaccccaacctgatcatcctgcctctggcctttggcaagagacagggcagagaattcatctggaacgacctgctgtccctggaaaccggcagcctgaagctggccaacggaagagtgatcgagaagacactgtacaacagaagaacccggcaggatgagcctgccctgttcgtggccctgaccttcgagcggcgggaggtcctggactcctccaatatcaaaccaatgaacctgatcggcgtggcaagaggcgaaaacatccccgccgtgatcgccctgaccgaccccgagggctgcccactgagccggtttaaggatagcctgggaaacccaacccacatcctgagaatcggcgagagctataaggagaagcagcggaccatccaggccaagaaggaggtggagcagcggagagccggcggctacagccggaagtacgccagcaaagccaagaatctggcagacgatatggtgagaaacaccgctagagatctgctgtactacgccgtgacccaggatgccatgctgatcttcgccaacctgagccggggcttcggccggcagggcaagcggaccttcatggccgagagacagtacacacggatggaggactggctgaccgccaagctggcctacgagggcctgagcaagacctacctgtccaagacactggcccagtacacctccaagacatgcagcaactgtgggtttaccatcaccagcgccgactacgacagggtgctggagaagctgaagaagacagcaacaggctggatgaccacaattaacggcaaggagctgaaggtggagggccagattacctactacaacagatacaagagacagaacgtagtcaaggacctgtccgtcgagctggatagactgagcgaagaatctgtgaacaacgacatctcctcctggacaaagggcagaagcggagaagctctgagcctcctgaagaaaagattctcccatagacccgtgcaggagaagttcgtgtgcctgaactgcggcttcgagacacacgcagccgagcaagccgccctgaacatcgccagatcctggctgttcctgcggagccaggagtacaagaaataccagacaaacaagacaaccggcaacaccgataagagagccttcgtcgagacctggcagtccttttaccggaagaagcttaaggaggtgtggaaacctgccgtgcggtctggcggatctggcggaggctcctatggccttcgaggacgtggccgtgtacttcagccaggaggagtggggcctgctggacaccgcccagagggccctgtacaggcacgtgatgctggagaacttcaccctggtgaccagcctgggcctgagcaccagcaggccccacgtggtgatccagctggagaggggcgaggagccctgggtgcccagcggcaaggacatgaccctggccaggaacacctacaggaggctgaacgccggcgagggatctggctccggcagcggccccaagaaaaagagaaaagtctaagctgccttctgcggggcttgccttctggccatgcccttcttctctcccttgcacctgtacctcttggtctttgaataaagcctgagtaggaaggctagcaaaaaaaaaaaaaaaaaaaaaaaaaaaaaaaaaaaaaaaaaaaaaaaaaaaaaaaaaaaaaaaaaaaaaaaaaaaaaaaa

SEQ ID NO: 15424 - RNA, 9485 nt, synthetic construct
  source 1..9485: mol_type = other RNA
aggaaataagagagaaaagaagagtaagaagaaatataagagccaccatggcccctaagaagaagcgtaaagtgagccggatggaacgcctcgtctacgaggtgcggcagaagtgcagaaacatcgaggacatctgcatctcctgcggatctctgaacgtgaccctggagcacccactgttcatcggcggcatgtgccagaactgtaaaaactgttttctggagtgtgcctatcaatacgacgatgacggctaccagagctactgcaccatctgttgcggcggaagagaggtgctgatgtgtggaaataacaactgctgccggtgcttctgcgtggaatgcgtggacctgctggtgggccccggcgccgcccaggccgctattaaggaagatccttggaactgctacatgtgcggccacaagggcacatacggcctgctgagacggagagaggactggcctagcagactgcagatgttcttcgccaataaccacgaccaggagttcgacccccctaaggtgtaccctcccgtccccgccgagaagagaaagcccatccgggtcctgagcctgttcgatggcatcgccaccggtctgctggtgctgaaggacctgggcatccaggtggataggtacattgcctccgaggtgtgcgaggactccatcaccgtgggaatggtgcgtcatcagggcaagatcatgtacgtgggcgacgtgcggagcgtgacacagaagcatatccaggagtggggccctttcgacctggtgatcggcggcagcccttgcaatgacctgagcatcgtgaacccagcccggaagggcctgtacgagggaaccggcagactgttcttcgagttttacagactgctgcacgacgcccggcctaaggaaggcgacgaccggcccttcttttggctgttcgagaatgtggtggccatgggagtcagcgacaagcgggatattagccggttcctggagagcaaccccgtgatgatcgatgccaaggaagtgagcgccgcccaccgggccagatacttctggggcaatctgcctggcatgaacagacccctggccagcaccgtgaacgacaagctggagctgcaggagtgcctggagcacggccggatcgccaagttcagcaaggtgagaaccatcaccacccgaagcaacagcatcaaacaaggcaaggaccagcactttcctgtgttcatgaacgagaaggaggacatcctgtggtgtaccgagatggagagagtgttcgggttcccagtccactacacagatgtcagcaacatgtctagactggccagacagagactgctgggaagaagctggtccgtccctgtgatcagacacctgttcgcccctctgaaggagtacttcgcctgcgtgagcagcggcaacagcaacgccaacagccggggccccagcttctctagcggcctggtgccactgtccctgagagggagccacatgggccccatggagatctacaaaaccgtgagcgcctggaagcggcagcctgtgcgcgtgctgagcctgtttcggaatatcgataaagtcctgaaaagcctgggattcctggagagcggctctggctccggcggtggcaccctgaagtacgtggaggatgtgacaaacgtggtcagacgggatgtggagaagtggggccccttcgatctggtgtacggcagcacccaacccctgggcagctcttgtgaccggtgccctggctggtacatgtttcagttccaccggatcctgcagtacgccctgccgagacaggagtcccagcggccattcttttggattttcatggacaacttgctgctgaccgaggatgaccaggaaactaccactcggttcctgcagaccgaagccgtgaccctgcaggacgtgagaggccgggactaccagaacgccatgcgggtgtggtccaacatccctggactgaaaagcaagcacgcacctctgacccctaaagaagaggagtacctgcaggcccaggtgcggagcagaagcaagctggacgcccctaaggtggatctgctggtgaagaattgcctcctgcccctgagagagtacttcaagtatttcagccagaatagtctgcccctgggaggcagcggcggcggcgccctggtgacatttgaggacgtcgccgtgcggttcacccaggaggaatgggctctgctggatccttctcagaaaatcctgtaccgggacgtgatgagagagacataccggaatctgacctccgtgggcatcaactgggaatgttgggaccttgaagcctgcttcagaagcctgggaagaaacctgagagtgcaggtggtgaagagaaagtgcgagctgaccaacagcggcccctgcgccgagggcggcccaagcagcggcgcccctcctcccagcggcggcagcccagccggctccccaacctctaccgaggagggcacctctgagtccgccacccccgagagcggccctggcacctccaccgagcccagcgagggcagcgcacccggcagccctgccggcagccccacctccacagaggagggaaccagcaccgagcccagcgaaggcagcgccccaggcaccagcaccgagcctagtgagcaggagattaaacggatcaacaagatcagaagaagacttgtgaaagacagcaacaccaagaaggccggcaagacaggccccatgaaaaccctgctggttagagtgatgacacccgatctgagagagcggctggaaaacctgagaaagaagcctgaaaatatcccccagcccatcagcaatacatctagagccaacctgaataagctgctgaccgattacaccgaaatgaagaaggcgatcctgcatgtgtactgggaagagttccagaaggaccctgtgggcctgatgagccgggtggcccagcctgccagcaagaagatcgatcagaacaagctgaaacctgagatggacgagaagggcaacctgaccaccgccggctttgcctgctctcagtgtggccagcccctgttcgtgtacaagctggagcaggtgtctgagaagggcaaggcttacaccaactacttcggacggtgcaatgtggccgagcacgaaaagctgatcctgctggcccagctgaagcccgagaaggatagcgacgaagccgtgacatatagcctgggaaagtttgggcagagggccctggatttctacagcattcatgtgaccaaggagtccacccaccccgtgaagcccctggcccagatcgccggaaacagatacgcctccggacctgtgggaaaggccctgagcgacgcatgtatgggcacaatcgcctccttcctgtctaagtaccaggacatcatcatcgaacaccagaaggtggtgaagggcaaccagaagagactggagagcctgcgggagctggccggcaaggaaaacctggaataccctagcgtgaccctgccacctcagcctcacaccaaggagggcgttgatgcctacaacgaagtgatcgcccgggtgcgaatgtgggtgaacctgaacctgtggcagaagctgaagctaagcagagatgatgccaagcctctgctgagactgaagggattcccttcctttcctctggtcgagagacaggccaacgaagtggactggtgggacatggtgtgtaacgtgaagaagctgatcaacgagaaaaaggaggatggcaaggtgttttggcagaatctggctggctacaagagacaggaagccctgagaccatacctgagcagcgaggaagatcggaagaagggaaagaaattcgctcggtaccagctgggcgacctgctgctgcacctggaaaagaagcacggcgaggactggggaaaggtgtacgacgaggcctgggagcggattgacaagaaagtggaaggcctgagcaagcacatcaagctggaagaggaacggagaagcgaggacgcccagagcaaggccgccctgaccgactggctgcgggctaaggccagcttcgtgatcgagggcctgaaggaggccgacaaggacgagttctgcagatgcgagctgaagctgcagaagtggtacggggacctgcggggaaagcccttcgccatcgaagccgagaacagcatcctggacatcagcggcttcagcaagcagtacaactgtgccttcatctggcagaaggacggcgtgaagaagctgaacctgtacctgatcatcaactacttcaagggcggcaagctgcggttcaagaagatcaaacctgaagccttcgaagccaacagattctacaccgtgatcaacaaaaagagcggcgagatcgtgcccatggaggtgaacttcaacttcgacgaccccaacctgatcatcctgcctctggcctttggcaagagacagggcagagaattcatctggaacgacctgctgtccctggaaaccggcagcctgaagctggccaacggaagagtgatcgagaagacactgtacaacagaagaacccggcaggatgagcctgccctgttcgtggccctgaccttcgagcggcgggaggtcctggactcctccaatatcaaaccaatgaacctgatcggcgtggcaagaggcgaaaacatccccgccgtgatcgccctgaccgaccccgagggctgcccactgagccggtttaaggatagcctgggaaacccaacccacatcctgagaatcggcgagagctataaggagaagcagcggaccatccaggccaagaaggaggtggagcagcggagagccggcggctacagccggaagtacgccagcaaagccaagaatctggcagacgatatggtgagaaacaccgctagagatctgctgtactacgccgtgacccaggatgccatgctgatcttcgccaacctgagccggggcttcggccggcagggcaagcggaccttcatggccgagagacagtacacacggatggaggactggctgaccgccaagctggcctacgagggcctgagcaagacctacctgtccaagacactggcccagtacacctccaagacatgcagcaactgtgggtttaccatcaccagcgccgactacgacagggtgctggagaagctgaagaagacagcaacaggctggatgaccacaattaacggcaaggagctgaaggtggagggccagattacctactacaacagatacaagagacagaacgtagtcaaggacctgtccgtcgagctggatagactgagcgaagaatctgtgaacaacgacatctcctcctggacaaagggcagaagcggagaagctctgagcctcctgaagaaaagattctcccatagacccgtgcaggagaagttcgtgtgcctgaactgcggcttcgagacacacgcagccgagcaagccgccctgaacatcgccagatcctggctgttcctgcggagccaggagtacaagaaataccagacaaacaagacaaccggcaacaccgataagagagccttcgtcgagacctggcagtccttttaccggaagaagcttaaggaggtgtggaaacctgccgtgcggtctggcggatctggcggaggctccatggtgaccttcgaggacgtggccgtgcacttcaccaagaccgagtggaccggcctgagccccgcccagagggccctgtacaggagcgtgatgctggagaacttcggcaacctgaccgccctgggctaccccgtgcccaagcccgccctgatcagcctgctggagggcggcgacatggactggggcctggaggcccaggacgacccccccgccgagaggaccaagaacgtgtgcaaggtgatcggcggcccaagcagcggcgcccctcctcccagcggcggcagcccagccggctccccaacctctaccgaggagggcacctctgagtccgccacccccgagagcggccctggcacctccaccgagcccagcgagggcagcgcacccggcagccctgccggcagccccacctccacagaggagggaaccagcaccgagcccagcgaaggcagcgccccaggcaccagcaccgagcctagtgagcaggagattaaacggatcaacaagatcagaagaagacttgtgaaagacagcaacaccaagaaggccggcaagacaggccccatgaaaaccctgctggttagagtgatgacacccgatctgagagagcggctggaaaacctgagaaagaagcctgaaaatatcccccagcccatcagcaatacatctagagccaacctgaataagctgctgaccgattacaccgaaatgaagaaggcgatcctgcatgtgtactgggaagagttccagaaggaccctgtgggcctgatgagccgggtggcccagcctgccagcaagaagatcgatcagaacaagctgaaacctgagatggacgagaagggcaacctgaccaccgccggctttgcctgctctcagtgtggccagcccctgttcgtgtacaagctggagcaggtgtctgagaagggcaaggcttacaccaactacttcggacggtgcaatgtggccgagcacgaaaagctgatcctgctggcccagctgaagcccgagaaggatagcgacgaagccgtgacatatagcctgggaaagtttgggcagagggccctggatttctacagcattcatgtgaccaaggagtccacccaccccgtgaagcccctggcccagatcgccggaaacagatacgcctccggacctgtgggaaaggccctgagcgacgcatgtatgggcacaatcgcctccttcctgtctaagtaccaggacatcatcatcgaacaccagaaggtggtgaagggcaaccagaagagactggagagcctgcgggagctggccggcaaggaaaacctggaataccctagcgtgaccctgccacctcagcctcacaccaaggagggcgttgatgcctacaacgaagtgatcgcccgggtgcgaatgtgggtgaacctgaacctgtggcagaagctgaagctaagcagagatgatgccaagcctctgctgagactgaagggattcccttcctttcctctggtcgagagacaggccaacgaagtggactggtgggacatggtgtgtaacgtgaagaagctgatcaacgagaaaaaggaggatggcaaggtgttttggcagaatctggctggctacaagagacaggaagccctgagaccatacctgagcagcgaggaagatcggaagaagggaaagaaattcgctcggtaccagctgggcgacctgctgctgcacctggaaaagaagcacggcgaggactggggaaaggtgtacgacgaggcctgggagcggattgacaagaaagtggaaggcctgagcaagcacatcaagctggaagaggaacggagaagcgaggacgcccagagcaaggccgccctgaccgactggctgcgggctaaggccagcttcgtgatcgagggcctgaaggaggccgacaaggacgagttctgcagatgcgagctgaagctgcagaagtggtacggggacctgcggggaaagcccttcgccatcgaagccgagaacagcatcctggacatcagcggcttcagcaagcagtacaactgtgccttcatctggcagaaggacggcgtgaagaagctgaacctgtacctgatcatcaactacttcaagggcggcaagctgcggttcaagaagatcaaacctgaagccttcgaagccaacagattctacaccgtgatcaacaaaaagagcggcgagatcgtgcccatggaggtgaacttcaacttcgacgaccccaacctgatcatcctgcctctggcctttggcaagagacagggcagagaattcatctggaacgacctgctgtccctggaaaccggcagcctgaagctggccaacggaagagtgatcgagaagacactgtacaacagaagaacccggcaggatgagcctgccctgttcgtggccctgaccttcgagcggcgggaggtcctggactcctccaatatcaaaccaatgaacctgatcggcgtggcaagaggcgaaaacatccccgccgtgatcgccctgaccgaccccgagggctgcccactgagccggtttaaggatagcctgggaaacccaacccacatcctgagaatcggcgagagctataaggagaagcagcggaccatccaggccaagaaggaggtggagcagcggagagccggcggctacagccggaagtacgccagcaaagccaagaatctggcagacgatatggtgagaaacaccgctagagatctgctgtactacgccgtgacccaggatgccatgctgatcttcgccaacctgagccggggcttcggccggcagggcaagcggaccttcatggccgagagacagtacacacggatggaggactggctgaccgccaagctggcctacgagggcctgagcaagacctacctgtccaagacactggcccagtacacctccaagacatgcagcaactgtgggtttaccatcaccagcgccgactacgacagggtgctggagaagctgaagaagacagcaacaggctggatgaccacaattaacggcaaggagctgaaggtggagggccagattacctactacaacagatacaagagacagaacgtagtcaaggacctgtccgtcgagctggatagactgagcgaagaatctgtgaacaacgacatctcctcctggacaaagggcagaagcggagaagctctgagcctcctgaagaaaagattctcccatagacccgtgcaggagaagttcgtgtgcctgaactgcggcttcgagacacacgcagccgagcaagccgccctgaacatcgccagatcctggctgttcctgcggagccaggagtacaagaaataccagacaaacaagacaaccggcaacaccgataagagagccttcgtcgagacctggcagtccttttaccggaagaagcttaaggaggtgtggaaacctgccgtgcggtctggcggatctggcggaggctcctatggtgaccttcgaggacgtggccgtgcacttcaccaagaccgagtggaccggcctgagccccgcccagagggccctgtacaggagcgtgatgctggagaacttcggcaacctgaccgccctgggctaccccgtgcccaagcccgccctgatcagcctgctggagggcggcgacatggactggggcctggaggcccaggacgacccccccgccgagaggaccaagaacgtgtgcaaggtgatcggatctggctccggcagcggccccaagaaaaagagaaaagtctaagctgccttctgcggggcttgccttctggccatgcccttcttctctcccttgcacctgtacctcttggtctttgaataaagcctgagtaggaaggctagcaaaaaaaaaaaaaaaaaaaaaaaaaaaaaaaaaaaaaaaaaaaaaaaaaaaaaaaaaaaaaaaaaaaaaaaaaaaaaaaa

SEQ ID NO: 15425 - RNA, 9485 nt, synthetic construct
  source 1..9485: mol_type = other RNA
aggaaataagagagaaaagaagagtaagaagaaatataagagccaccatggcccctaagaagaagcgtaaagtgagccggatggaacgcctcgtctacgaggtgcggcagaagtgcagaaacatcgaggacatctgcatctcctgcggatctctgaacgtgaccctggagcacccactgttcatcggcggcatgtgccagaactgtaaaaactgttttctggagtgtgcctatcaatacgacgatgacggctaccagagctactgcaccatctgttgcggcggaagagaggtgctgatgtgtggaaataacaactgctgccggtgcttctgcgtggaatgcgtggacctgctggtgggccccggcgccgcccaggccgctattaaggaagatccttggaactgctacatgtgcggccacaagggcacatacggcctgctgagacggagagaggactggcctagcagactgcagatgttcttcgccaataaccacgaccaggagttcgacccccctaaggtgtaccctcccgtccccgccgagaagagaaagcccatccgggtcctgagcctgttcgatggcatcgccaccggtctgctggtgctgaaggacctgggcatccaggtggataggtacattgcctccgaggtgtgcgaggactccatcaccgtgggaatggtgcgtcatcagggcaagatcatgtacgtgggcgacgtgcggagcgtgacacagaagcatatccaggagtggggccctttcgacctggtgatcggcggcagcccttgcaatgacctgagcatcgtgaacccagcccggaagggcctgtacgagggaaccggcagactgttcttcgagttttacagactgctgcacgacgcccggcctaaggaaggcgacgaccggcccttcttttggctgttcgagaatgtggtggccatgggagtcagcgacaagcgggatattagccggttcctggagagcaaccccgtgatgatcgatgccaaggaagtgagcgccgcccaccgggccagatacttctggggcaatctgcctggcatgaacagacccctggccagcaccgtgaacgacaagctggagctgcaggagtgcctggagcacggccggatcgccaagttcagcaaggtgagaaccatcaccacccgaagcaacagcatcaaacaaggcaaggaccagcactttcctgtgttcatgaacgagaaggaggacatcctgtggtgtaccgagatggagagagtgttcgggttcccagtccactacacagatgtcagcaacatgtctagactggccagacagagactgctgggaagaagctggtccgtccctgtgatcagacacctgttcgcccctctgaaggagtacttcgcctgcgtgagcagcggcaacagcaacgccaacagccggggccccagcttctctagcggcctggtgccactgtccctgagagggagccacatgggccccatggagatctacaaaaccgtgagcgcctggaagcggcagcctgtgcgcgtgctgagcctgtttcggaatatcgataaagtcctgaaaagcctgggattcctggagagcggctctggctccggcggtggcaccctgaagtacgtggaggatgtgacaaacgtggtcagacgggatgtggagaagtggggccccttcgatctggtgtacggcagcacccaacccctgggcagctcttgtgaccggtgccctggctggtacatgtttcagttccaccggatcctgcagtacgccctgccgagacaggagtcccagcggccattcttttggattttcatggacaacttgctgctgaccgaggatgaccaggaaactaccactcggttcctgcagaccgaagccgtgaccctgcaggacgtgagaggccgggactaccagaacgccatgcgggtgtggtccaacatccctggactgaaaagcaagcacgcacctctgacccctaaagaagaggagtacctgcaggcccaggtgcggagcagaagcaagctggacgcccctaaggtggatctgctggtgaagaattgcctcctgcccctgagagagtacttcaagtatttcagccagaatagtctgcccctgggaggcagcggcggcggcgccctggtgacatttgaggacgtcgccgtgcggttcacccaggaggaatgggctctgctggatccttctcagaaaatcctgtaccgggacgtgatgagagagacataccggaatctgacctccgtgggcatcaactgggaatgttgggaccttgaagcctgcttcagaagcctgggaagaaacctgagagtgcaggtggtgaagagaaagtgcgagctgaccaacagcggcccctgcgccgagggcggcccaagcagcggcgcccctcctcccagcggcggcagcccagccggctccccaacctctaccgaggagggcacctctgagtccgccacccccgagagcggccctggcacctccaccgagcccagcgagggcagcgcacccggcagccctgccggcagccccacctccacagaggagggaaccagcaccgagcccagcgaaggcagcgccccaggcaccagcaccgagcctagtgagcaggagattaaacggatcaacaagatcagaagaagacttgtgaaagacagcaacaccaagaaggccggcaagacaggccccatgaaaaccctgctggttagagtgatgacacccgatctgagagagcggctggaaaacctgagaaagaagcctgaaaatatcccccagcccatcagcaatacatctagagccaacctgaataagctgctgaccgattacaccgaaatgaagaaggcgatcctgcatgtgtactgggaagagttccagaaggaccctgtgggcctgatgagccgggtggcccagcctgccagcaagaagatcgatcagaacaagctgaaacctgagatggacgagaagggcaacctgaccaccgccggctttgcctgctctcagtgtggccagcccctgttcgtgtacaagctggagcaggtgtctgagaagggcaaggcttacaccaactacttcggacggtgcaatgtggccgagcacgaaaagctgatcctgctggcccagctgaagcccgagaaggatagcgacgaagccgtgacatatagcctgggaaagtttgggcagagggccctggatttctacagcattcatgtgaccaaggagtccacccaccccgtgaagcccctggcccagatcgccggaaacagatacgcctccggacctgtgggaaaggccctgagcgacgcatgtatgggcacaatcgcctccttcctgtctaagtaccaggacatcatcatcgaacaccagaaggtggtgaagggcaaccagaagagactggagagcctgcgggagctggccggcaaggaaaacctggaataccctagcgtgaccctgccacctcagcctcacaccaaggagggcgttgatgcctacaacgaagtgatcgcccgggtgcgaatgtgggtgaacctgaacctgtggcagaagctgaagctaagcagagatgatgccaagcctctgctgagactgaagggattcccttcctttcctctggtcgagagacaggccaacgaagtggactggtgggacatggtgtgtaacgtgaagaagctgatcaacgagaaaaaggaggatggcaaggtgttttggcagaatctggctggctacaagagacaggaagccctgagaccatacctgagcagcgaggaagatcggaagaagggaaagaaattcgctcggtaccagctgggcgacctgctgctgcacctggaaaagaagcacggcgaggactggggaaaggtgtacgacgaggcctgggagcggattgacaagaaagtggaaggcctgagcaagcacatcaagctggaagaggaacggagaagcgaggacgcccagagcaaggccgccctgaccgactggctgcgggctaaggccagcttcgtgatcgagggcctgaaggaggccgacaaggacgagttctgcagatgcgagctgaagctgcagaagtggtacggggacctgcggggaaagcccttcgccatcgaagccgagaacagcatcctggacatcagcggcttcagcaagcagtacaactgtgccttcatctggcagaaggacggcgtgaagaagctgaacctgtacctgatcatcaactacttcaagggcggcaagctgcggttcaagaagatcaaacctgaagccttcgaagccaacagattctacaccgtgatcaacaaaaagagcggcgagatcgtgcccatggaggtgaacttcaacttcgacgaccccaacctgatcatcctgcctctggcctttggcaagagacagggcagagaattcatctggaacgacctgctgtccctggaaaccggcagcctgaagctggccaacggaagagtgatcgagaagacactgtacaacagaagaacccggcaggatgagcctgccctgttcgtggccctgaccttcgagcggcgggaggtcctggactcctccaatatcaaaccaatgaacctgatcggcgtggcaagaggcgaaaacatccccgccgtgatcgccctgaccgaccccgagggctgcccactgagccggtttaaggatagcctgggaaacccaacccacatcctgagaatcggcgagagctataaggagaagcagcggaccatccaggccaagaaggaggtggagcagcggagagccggcggctacagccggaagtacgccagcaaagccaagaatctggcagacgatatggtgagaaacaccgctagagatctgctgtactacgccgtgacccaggatgccatgctgatcttcgccaacctgagccggggcttcggccggcagggcaagcggaccttcatggccgagagacagtacacacggatggaggactggctgaccgccaagctggcctacgagggcctgagcaagacctacctgtccaagacactggcccagtacacctccaagacatgcagcaactgtgggtttaccatcaccagcgccgactacgacagggtgctggagaagctgaagaagacagcaacaggctggatgaccacaattaacggcaaggagctgaaggtggagggccagattacctactacaacagatacaagagacagaacgtagtcaaggacctgtccgtcgagctggatagactgagcgaagaatctgtgaacaacgacatctcctcctggacaaagggcagaagcggagaagctctgagcctcctgaagaaaagattctcccatagacccgtgcaggagaagttcgtgtgcctgaactgcggcttcgagacacacgcagccgagcaagccgccctgaacatcgccagatcctggctgttcctgcggagccaggagtacaagaaataccagacaaacaagacaaccggcaacaccgataagagagccttcgtcgagacctggcagtccttttaccggaagaagcttaaggaggtgtggaaacctgccgtgcggtctggcggatctggcggaggctccatggccttcgaggacgtggccgtgtacttcagccaggaggagtggggcctgctggacaccgcccagagggccctgtacaggcacgtgatgctggacaacttcaccctggtgaccagcctgggcctgagcaccagcaggccccacgtggtgatccagctggagaggggcgaggagccctgggtgcccagcggcaaggacatgaccctggccaggaacacctacaggaggctgaacgccggcgagggcggcccaagcagcggcgcccctcctcccagcggcggcagcccagccggctccccaacctctaccgaggagggcacctctgagtccgccacccccgagagcggccctggcacctccaccgagcccagcgagggcagcgcacccggcagccctgccggcagccccacctccacagaggagggaaccagcaccgagcccagcgaaggcagcgccccaggcaccagcaccgagcctagtgagcaggagattaaacggatcaacaagatcagaagaagacttgtgaaagacagcaacaccaagaaggccggcaagacaggccccatgaaaaccctgctggttagagtgatgacacccgatctgagagagcggctggaaaacctgagaaagaagcctgaaaatatcccccagcccatcagcaatacatctagagccaacctgaataagctgctgaccgattacaccgaaatgaagaaggcgatcctgcatgtgtactgggaagagttccagaaggaccctgtgggcctgatgagccgggtggcccagcctgccagcaagaagatcgatcagaacaagctgaaacctgagatggacgagaagggcaacctgaccaccgccggctttgcctgctctcagtgtggccagcccctgttcgtgtacaagctggagcaggtgtctgagaagggcaaggcttacaccaactacttcggacggtgcaatgtggccgagcacgaaaagctgatcctgctggcccagctgaagcccgagaaggatagcgacgaagccgtgacatatagcctgggaaagtttgggcagagggccctggatttctacagcattcatgtgaccaaggagtccacccaccccgtgaagcccctggcccagatcgccggaaacagatacgcctccggacctgtgggaaaggccctgagcgacgcatgtatgggcacaatcgcctccttcctgtctaagtaccaggacatcatcatcgaacaccagaaggtggtgaagggcaaccagaagagactggagagcctgcgggagctggccggcaaggaaaacctggaataccctagcgtgaccctgccacctcagcctcacaccaaggagggcgttgatgcctacaacgaagtgatcgcccgggtgcgaatgtgggtgaacctgaacctgtggcagaagctgaagctaagcagagatgatgccaagcctctgctgagactgaagggattcccttcctttcctctggtcgagagacaggccaacgaagtggactggtgggacatggtgtgtaacgtgaagaagctgatcaacgagaaaaaggaggatggcaaggtgttttggcagaatctggctggctacaagagacaggaagccctgagaccatacctgagcagcgaggaagatcggaagaagggaaagaaattcgctcggtaccagctgggcgacctgctgctgcacctggaaaagaagcacggcgaggactggggaaaggtgtacgacgaggcctgggagcggattgacaagaaagtggaaggcctgagcaagcacatcaagctggaagaggaacggagaagcgaggacgcccagagcaaggccgccctgaccgactggctgcgggctaaggccagcttcgtgatcgagggcctgaaggaggccgacaaggacgagttctgcagatgcgagctgaagctgcagaagtggtacggggacctgcggggaaagcccttcgccatcgaagccgagaacagcatcctggacatcagcggcttcagcaagcagtacaactgtgccttcatctggcagaaggacggcgtgaagaagctgaacctgtacctgatcatcaactacttcaagggcggcaagctgcggttcaagaagatcaaacctgaagccttcgaagccaacagattctacaccgtgatcaacaaaaagagcggcgagatcgtgcccatggaggtgaacttcaacttcgacgaccccaacctgatcatcctgcctctggcctttggcaagagacagggcagagaattcatctggaacgacctgctgtccctggaaaccggcagcctgaagctggccaacggaagagtgatcgagaagacactgtacaacagaagaacccggcaggatgagcctgccctgttcgtggccctgaccttcgagcggcgggaggtcctggactcctccaatatcaaaccaatgaacctgatcggcgtggcaagaggcgaaaacatccccgccgtgatcgccctgaccgaccccgagggctgcccactgagccggtttaaggatagcctgggaaacccaacccacatcctgagaatcggcgagagctataaggagaagcagcggaccatccaggccaagaaggaggtggagcagcggagagccggcggctacagccggaagtacgccagcaaagccaagaatctggcagacgatatggtgagaaacaccgctagagatctgctgtactacgccgtgacccaggatgccatgctgatcttcgccaacctgagccggggcttcggccggcagggcaagcggaccttcatggccgagagacagtacacacggatggaggactggctgaccgccaagctggcctacgagggcctgagcaagacctacctgtccaagacactggcccagtacacctccaagacatgcagcaactgtgggtttaccatcaccagcgccgactacgacagggtgctggagaagctgaagaagacagcaacaggctggatgaccacaattaacggcaaggagctgaaggtggagggccagattacctactacaacagatacaagagacagaacgtagtcaaggacctgtccgtcgagctggatagactgagcgaagaatctgtgaacaacgacatctcctcctggacaaagggcagaagcggagaagctctgagcctcctgaagaaaagattctcccatagacccgtgcaggagaagttcgtgtgcctgaactgcggcttcgagacacacgcagccgagcaagccgccctgaacatcgccagatcctggctgttcctgcggagccaggagtacaagaaataccagacaaacaagacaaccggcaacaccgataagagagccttcgtcgagacctggcagtccttttaccggaagaagcttaaggaggtgtggaaacctgccgtgcggtctggcggatctggcggaggctcctatggccttcgaggacgtggccgtgtacttcagccaggaggagtggggcctgctggacaccgcccagagggccctgtacaggcacgtgatgctggacaacttcaccctggtgaccagcctgggcctgagcaccagcaggccccacgtggtgatccagctggagaggggcgaggagccctgggtgcccagcggcaaggacatgaccctggccaggaacacctacaggaggctgaacgccggcgagggatctggctccggcagcggccccaagaaaaagagaaaagtctaagctgccttctgcggggcttgccttctggccatgcccttcttctctcccttgcacctgtacctcttggtctttgaataaagcctgagtaggaaggctagcaaaaaaaaaaaaaaaaaaaaaaaaaaaaaaaaaaaaaaaaaaaaaaaaaaaaaaaaaaaaaaaaaaaaaaaaaaaaaaaa

SEQ ID NO: 15426 - RNA, 9485 nt, synthetic construct
  source 1..9485: mol_type = other RNA
aggaaataagagagaaaagaagagtaagaagaaatataagagccaccatggcccctaagaagaagcgtaaagtgagccggatggaacgcctcgtctacgaggtgcggcagaagtgcagaaacatcgaggacatctgcatctcctgcggatctctgaacgtgaccctggagcacccactgttcatcggcggcatgtgccagaactgtaaaaactgttttctggagtgtgcctatcaatacgacgatgacggctaccagagctactgcaccatctgttgcggcggaagagaggtgctgatgtgtggaaataacaactgctgccggtgcttctgcgtggaatgcgtggacctgctggtgggccccggcgccgcccaggccgctattaaggaagatccttggaactgctacatgtgcggccacaagggcacatacggcctgctgagacggagagaggactggcctagcagactgcagatgttcttcgccaataaccacgaccaggagttcgacccccctaaggtgtaccctcccgtccccgccgagaagagaaagcccatccgggtcctgagcctgttcgatggcatcgccaccggtctgctggtgctgaaggacctgggcatccaggtggataggtacattgcctccgaggtgtgcgaggactccatcaccgtgggaatggtgcgtcatcagggcaagatcatgtacgtgggcgacgtgcggagcgtgacacagaagcatatccaggagtggggccctttcgacctggtgatcggcggcagcccttgcaatgacctgagcatcgtgaacccagcccggaagggcctgtacgagggaaccggcagactgttcttcgagttttacagactgctgcacgacgcccggcctaaggaaggcgacgaccggcccttcttttggctgttcgagaatgtggtggccatgggagtcagcgacaagcgggatattagccggttcctggagagcaaccccgtgatgatcgatgccaaggaagtgagcgccgcccaccgggccagatacttctggggcaatctgcctggcatgaacagacccctggccagcaccgtgaacgacaagctggagctgcaggagtgcctggagcacggccggatcgccaagttcagcaaggtgagaaccatcaccacccgaagcaacagcatcaaacaaggcaaggaccagcactttcctgtgttcatgaacgagaaggaggacatcctgtggtgtaccgagatggagagagtgttcgggttcccagtccactacacagatgtcagcaacatgtctagactggccagacagagactgctgggaagaagctggtccgtccctgtgatcagacacctgttcgcccctctgaaggagtacttcgcctgcgtgagcagcggcaacagcaacgccaacagccggggccccagcttctctagcggcctggtgccactgtccctgagagggagccacatgggccccatggagatctacaaaaccgtgagcgcctggaagcggcagcctgtgcgcgtgctgagcctgtttcggaatatcgataaagtcctgaaaagcctgggattcctggagagcggctctggctccggcggtggcaccctgaagtacgtggaggatgtgacaaacgtggtcagacgggatgtggagaagtggggccccttcgatctggtgtacggcagcacccaacccctgggcagctcttgtgaccggtgccctggctggtacatgtttcagttccaccggatcctgcagtacgccctgccgagacaggagtcccagcggccattcttttggattttcatggacaacttgctgctgaccgaggatgaccaggaaactaccactcggttcctgcagaccgaagccgtgaccctgcaggacgtgagaggccgggactaccagaacgccatgcgggtgtggtccaacatccctggactgaaaagcaagcacgcacctctgacccctaaagaagaggagtacctgcaggcccaggtgcggagcagaagcaagctggacgcccctaaggtggatctgctggtgaagaattgcctcctgcccctgagagagtacttcaagtatttcagccagaatagtctgcccctgggaggcagcggcggcggcgccctggtgacatttgaggacgtcgccgtgcggttcacccaggaggaatgggctctgctggatccttctcagaaaatcctgtaccgggacgtgatgagagagacataccggaatctgacctccgtgggcatcaactgggaatgttgggaccttgaagcctgcttcagaagcctgggaagaaacctgagagtgcaggtggtgaagagaaagtgcgagctgaccaacagcggcccctgcgccgagggcggcccaagcagcggcgcccctcctcccagcggcggcagcccagccggctccccaacctctaccgaggagggcacctctgagtccgccacccccgagagcggccctggcacctccaccgagcccagcgagggcagcgcacccggcagccctgccggcagccccacctccacagaggagggaaccagcaccgagcccagcgaaggcagcgccccaggcaccagcaccgagcctagtgagcaggagattaaacggatcaacaagatcagaagaagacttgtgaaagacagcaacaccaagaaggccggcaagacaggccccatgaaaaccctgctggttagagtgatgacacccgatctgagagagcggctggaaaacctgagaaagaagcctgaaaatatcccccagcccatcagcaatacatctagagccaacctgaataagctgctgaccgattacaccgaaatgaagaaggcgatcctgcatgtgtactgggaagagttccagaaggaccctgtgggcctgatgagccgggtggcccagcctgccagcaagaagatcgatcagaacaagctgaaacctgagatggacgagaagggcaacctgaccaccgccggctttgcctgctctcagtgtggccagcccctgttcgtgtacaagctggagcaggtgtctgagaagggcaaggcttacaccaactacttcggacggtgcaatgtggccgagcacgaaaagctgatcctgctggcccagctgaagcccgagaaggatagcgacgaagccgtgacatatagcctgggaaagtttgggcagagggccctggatttctacagcattcatgtgaccaaggagtccacccaccccgtgaagcccctggcccagatcgccggaaacagatacgcctccggacctgtgggaaaggccctgagcgacgcatgtatgggcacaatcgcctccttcctgtctaagtaccaggacatcatcatcgaacaccagaaggtggtgaagggcaaccagaagagactggagagcctgcgggagctggccggcaaggaaaacctggaataccctagcgtgaccctgccacctcagcctcacaccaaggagggcgttgatgcctacaacgaagtgatcgcccgggtgcgaatgtgggtgaacctgaacctgtggcagaagctgaagctaagcagagatgatgccaagcctctgctgagactgaagggattcccttcctttcctctggtcgagagacaggccaacgaagtggactggtgggacatggtgtgtaacgtgaagaagctgatcaacgagaaaaaggaggatggcaaggtgttttggcagaatctggctggctacaagagacaggaagccctgagaccatacctgagcagcgaggaagatcggaagaagggaaagaaattcgctcggtaccagctgggcgacctgctgctgcacctggaaaagaagcacggcgaggactggggaaaggtgtacgacgaggcctgggagcggattgacaagaaagtggaaggcctgagcaagcacatcaagctggaagaggaacggagaagcgaggacgcccagagcaaggccgccctgaccgactggctgcgggctaaggccagcttcgtgatcgagggcctgaaggaggccgacaaggacgagttctgcagatgcgagctgaagctgcagaagtggtacggggacctgcggggaaagcccttcgccatcgaagccgagaacagcatcctggacatcagcggcttcagcaagcagtacaactgtgccttcatctggcagaaggacggcgtgaagaagctgaacctgtacctgatcatcaactacttcaagggcggcaagctgcggttcaagaagatcaaacctgaagccttcgaagccaacagattctacaccgtgatcaacaaaaagagcggcgagatcgtgcccatggaggtgaacttcaacttcgacgaccccaacctgatcatcctgcctctggcctttggcaagagacagggcagagaattcatctggaacgacctgctgtccctggaaaccggcagcctgaagctggccaacggaagagtgatcgagaagacactgtacaacagaagaacccggcaggatgagcctgccctgttcgtggccctgaccttcgagcggcgggaggtcctggactcctccaatatcaaaccaatgaacctgatcggcgtggcaagaggcgaaaacatccccgccgtgatcgccctgaccgaccccgagggctgcccactgagccggtttaaggatagcctgggaaacccaacccacatcctgagaatcggcgagagctataaggagaagcagcggaccatccaggccaagaaggaggtggagcagcggagagccggcggctacagccggaagtacgccagcaaagccaagaatctggcagacgatatggtgagaaacaccgctagagatctgctgtactacgccgtgacccaggatgccatgctgatcttcgccaacctgagccggggcttcggccggcagggcaagcggaccttcatggccgagagacagtacacacggatggaggactggctgaccgccaagctggcctacgagggcctgagcaagacctacctgtccaagacactggcccagtacacctccaagacatgcagcaactgtgggtttaccatcaccagcgccgactacgacagggtgctggagaagctgaagaagacagcaacaggctggatgaccacaattaacggcaaggagctgaaggtggagggccagattacctactacaacagatacaagagacagaacgtagtcaaggacctgtccgtcgagctggatagactgagcgaagaatctgtgaacaacgacatctcctcctggacaaagggcagaagcggagaagctctgagcctcctgaagaaaagattctcccatagacccgtgcaggagaagttcgtgtgcctgaactgcggcttcgagacacacgcagccgagcaagccgccctgaacatcgccagatcctggctgttcctgcggagccaggagtacaagaaataccagacaaacaagacaaccggcaacaccgataagagagccttcgtcgagacctggcagtccttttaccggaagaagcttaaggaggtgtggaaacctgccgtgcggtctggcggatctggcggaggctccgtgcaggagcccgtgaccttcaaggacgtggccgtggacttcacccaggaggagtggggccagctggacctggtgcagaggaccctgtacagggacgtgatgctggagacctacggccacctgctgagcgtgggcaaccagatcaccaagcccgaggtgatcagcctgctggagcagggcgaggagccctggagcgtggagcaggcctacccccagagcacctgccccgagtggatgaggaacggcggcccaagcagcggcgcccctcctcccagcggcggcagcccagccggctccccaacctctaccgaggagggcacctctgagtccgccacccccgagagcggccctggcacctccaccgagcccagcgagggcagcgcacccggcagccctgccggcagccccacctccacagaggagggaaccagcaccgagcccagcgaaggcagcgccccaggcaccagcaccgagcctagtgagcaggagattaaacggatcaacaagatcagaagaagacttgtgaaagacagcaacaccaagaaggccggcaagacaggccccatgaaaaccctgctggttagagtgatgacacccgatctgagagagcggctggaaaacctgagaaagaagcctgaaaatatcccccagcccatcagcaatacatctagagccaacctgaataagctgctgaccgattacaccgaaatgaagaaggcgatcctgcatgtgtactgggaagagttccagaaggaccctgtgggcctgatgagccgggtggcccagcctgccagcaagaagatcgatcagaacaagctgaaacctgagatggacgagaagggcaacctgaccaccgccggctttgcctgctctcagtgtggccagcccctgttcgtgtacaagctggagcaggtgtctgagaagggcaaggcttacaccaactacttcggacggtgcaatgtggccgagcacgaaaagctgatcctgctggcccagctgaagcccgagaaggatagcgacgaagccgtgacatatagcctgggaaagtttgggcagagggccctggatttctacagcattcatgtgaccaaggagtccacccaccccgtgaagcccctggcccagatcgccggaaacagatacgcctccggacctgtgggaaaggccctgagcgacgcatgtatgggcacaatcgcctccttcctgtctaagtaccaggacatcatcatcgaacaccagaaggtggtgaagggcaaccagaagagactggagagcctgcgggagctggccggcaaggaaaacctggaataccctagcgtgaccctgccacctcagcctcacaccaaggagggcgttgatgcctacaacgaagtgatcgcccgggtgcgaatgtgggtgaacctgaacctgtggcagaagctgaagctaagcagagatgatgccaagcctctgctgagactgaagggattcccttcctttcctctggtcgagagacaggccaacgaagtggactggtgggacatggtgtgtaacgtgaagaagctgatcaacgagaaaaaggaggatggcaaggtgttttggcagaatctggctggctacaagagacaggaagccctgagaccatacctgagcagcgaggaagatcggaagaagggaaagaaattcgctcggtaccagctgggcgacctgctgctgcacctggaaaagaagcacggcgaggactggggaaaggtgtacgacgaggcctgggagcggattgacaagaaagtggaaggcctgagcaagcacatcaagctggaagaggaacggagaagcgaggacgcccagagcaaggccgccctgaccgactggctgcgggctaaggccagcttcgtgatcgagggcctgaaggaggccgacaaggacgagttctgcagatgcgagctgaagctgcagaagtggtacggggacctgcggggaaagcccttcgccatcgaagccgagaacagcatcctggacatcagcggcttcagcaagcagtacaactgtgccttcatctggcagaaggacggcgtgaagaagctgaacctgtacctgatcatcaactacttcaagggcggcaagctgcggttcaagaagatcaaacctgaagccttcgaagccaacagattctacaccgtgatcaacaaaaagagcggcgagatcgtgcccatggaggtgaacttcaacttcgacgaccccaacctgatcatcctgcctctggcctttggcaagagacagggcagagaattcatctggaacgacctgctgtccctggaaaccggcagcctgaagctggccaacggaagagtgatcgagaagacactgtacaacagaagaacccggcaggatgagcctgccctgttcgtggccctgaccttcgagcggcgggaggtcctggactcctccaatatcaaaccaatgaacctgatcggcgtggcaagaggcgaaaacatccccgccgtgatcgccctgaccgaccccgagggctgcccactgagccggtttaaggatagcctgggaaacccaacccacatcctgagaatcggcgagagctataaggagaagcagcggaccatccaggccaagaaggaggtggagcagcggagagccggcggctacagccggaagtacgccagcaaagccaagaatctggcagacgatatggtgagaaacaccgctagagatctgctgtactacgccgtgacccaggatgccatgctgatcttcgccaacctgagccggggcttcggccggcagggcaagcggaccttcatggccgagagacagtacacacggatggaggactggctgaccgccaagctggcctacgagggcctgagcaagacctacctgtccaagacactggcccagtacacctccaagacatgcagcaactgtgggtttaccatcaccagcgccgactacgacagggtgctggagaagctgaagaagacagcaacaggctggatgaccacaattaacggcaaggagctgaaggtggagggccagattacctactacaacagatacaagagacagaacgtagtcaaggacctgtccgtcgagctggatagactgagcgaagaatctgtgaacaacgacatctcctcctggacaaagggcagaagcggagaagctctgagcctcctgaagaaaagattctcccatagacccgtgcaggagaagttcgtgtgcctgaactgcggcttcgagacacacgcagccgagcaagccgccctgaacatcgccagatcctggctgttcctgcggagccaggagtacaagaaataccagacaaacaagacaaccggcaacaccgataagagagccttcgtcgagacctggcagtccttttaccggaagaagcttaaggaggtgtggaaacctgccgtgcggtctggcggatctggcggaggctcctgtgcaggagcccgtgaccttcaaggacgtggccgtggacttcacccaggaggagtggggccagctggacctggtgcagaggaccctgtacagggacgtgatgctggagacctacggccacctgctgagcgtgggcaaccagatcaccaagcccgaggtgatcagcctgctggagcagggcgaggagccctggagcgtggagcaggcctacccccagagcacctgccccgagtggatgaggaacggatctggctccggcagcggccccaagaaaaagagaaaagtctaagctgccttctgcggggcttgccttctggccatgcccttcttctctcccttgcacctgtacctcttggtctttgaataaagcctgagtaggaaggctagcaaaaaaaaaaaaaaaaaaaaaaaaaaaaaaaaaaaaaaaaaaaaaaaaaaaaaaaaaaaaaaaaaaaaaaaaaaaaaaaa

SEQ ID NO: 15427 - RNA, 9485 nt, synthetic construct
  source 1..9485: mol_type = other RNA
aggaaataagagagaaaagaagagtaagaagaaatataagagccaccatggcccctaagaagaagcgtaaagtgagccggatggaacgcctcgtctacgaggtgcggcagaagtgcagaaacatcgaggacatctgcatctcctgcggatctctgaacgtgaccctggagcacccactgttcatcggcggcatgtgccagaactgtaaaaactgttttctggagtgtgcctatcaatacgacgatgacggctaccagagctactgcaccatctgttgcggcggaagagaggtgctgatgtgtggaaataacaactgctgccggtgcttctgcgtggaatgcgtggacctgctggtgggccccggcgccgcccaggccgctattaaggaagatccttggaactgctacatgtgcggccacaagggcacatacggcctgctgagacggagagaggactggcctagcagactgcagatgttcttcgccaataaccacgaccaggagttcgacccccctaaggtgtaccctcccgtccccgccgagaagagaaagcccatccgggtcctgagcctgttcgatggcatcgccaccggtctgctggtgctgaaggacctgggcatccaggtggataggtacattgcctccgaggtgtgcgaggactccatcaccgtgggaatggtgcgtcatcagggcaagatcatgtacgtgggcgacgtgcggagcgtgacacagaagcatatccaggagtggggccctttcgacctggtgatcggcggcagcccttgcaatgacctgagcatcgtgaacccagcccggaagggcctgtacgagggaaccggcagactgttcttcgagttttacagactgctgcacgacgcccggcctaaggaaggcgacgaccggcccttcttttggctgttcgagaatgtggtggccatgggagtcagcgacaagcgggatattagccggttcctggagagcaaccccgtgatgatcgatgccaaggaagtgagcgccgcccaccgggccagatacttctggggcaatctgcctggcatgaacagacccctggccagcaccgtgaacgacaagctggagctgcaggagtgcctggagcacggccggatcgccaagttcagcaaggtgagaaccatcaccacccgaagcaacagcatcaaacaaggcaaggaccagcactttcctgtgttcatgaacgagaaggaggacatcctgtggtgtaccgagatggagagagtgttcgggttcccagtccactacacagatgtcagcaacatgtctagactggccagacagagactgctgggaagaagctggtccgtccctgtgatcagacacctgttcgcccctctgaaggagtacttcgcctgcgtgagcagcggcaacagcaacgccaacagccggggccccagcttctctagcggcctggtgccactgtccctgagagggagccacatgggccccatggagatctacaaaaccgtgagcgcctggaagcggcagcctgtgcgcgtgctgagcctgtttcggaatatcgataaagtcctgaaaagcctgggattcctggagagcggctctggctccggcggtggcaccctgaagtacgtggaggatgtgacaaacgtggtcagacgggatgtggagaagtggggccccttcgatctggtgtacggcagcacccaacccctgggcagctcttgtgaccggtgccctggctggtacatgtttcagttccaccggatcctgcagtacgccctgccgagacaggagtcccagcggccattcttttggattttcatggacaacttgctgctgaccgaggatgaccaggaaactaccactcggttcctgcagaccgaagccgtgaccctgcaggacgtgagaggccgggactaccagaacgccatgcgggtgtggtccaacatccctggactgaaaagcaagcacgcacctctgacccctaaagaagaggagtacctgcaggcccaggtgcggagcagaagcaagctggacgcccctaaggtggatctgctggtgaagaattgcctcctgcccctgagagagtacttcaagtatttcagccagaatagtctgcccctgggaggcagcggcggcggcgccctggtgacatttgaggacgtcgccgtgcggttcacccaggaggaatgggctctgctggatccttctcagaaaatcctgtaccgggacgtgatgagagagacataccggaatctgacctccgtgggcatcaactgggaatgttgggaccttgaagcctgcttcagaagcctgggaagaaacctgagagtgcaggtggtgaagagaaagtgcgagctgaccaacagcggcccctgcgccgagggcggcccaagcagcggcgcccctcctcccagcggcggcagcccagccggctccccaacctctaccgaggagggcacctctgagtccgccacccccgagagcggccctggcacctccaccgagcccagcgagggcagcgcacccggcagccctgccggcagccccacctccacagaggagggaaccagcaccgagcccagcgaaggcagcgccccaggcaccagcaccgagcctagtgagcaggagattaaacggatcaacaagatcagaagaagacttgtgaaagacagcaacaccaagaaggccggcaagacaggccccatgaaaaccctgctggttagagtgatgacacccgatctgagagagcggctggaaaacctgagaaagaagcctgaaaatatcccccagcccatcagcaatacatctagagccaacctgaataagctgctgaccgattacaccgaaatgaagaaggcgatcctgcatgtgtactgggaagagttccagaaggaccctgtgggcctgatgagccgggtggcccagcctgccagcaagaagatcgatcagaacaagctgaaacctgagatggacgagaagggcaacctgaccaccgccggctttgcctgctctcagtgtggccagcccctgttcgtgtacaagctggagcaggtgtctgagaagggcaaggcttacaccaactacttcggacggtgcaatgtggccgagcacgaaaagctgatcctgctggcccagctgaagcccgagaaggatagcgacgaagccgtgacatatagcctgggaaagtttgggcagagggccctggatttctacagcattcatgtgaccaaggagtccacccaccccgtgaagcccctggcccagatcgccggaaacagatacgcctccggacctgtgggaaaggccctgagcgacgcatgtatgggcacaatcgcctccttcctgtctaagtaccaggacatcatcatcgaacaccagaaggtggtgaagggcaaccagaagagactggagagcctgcgggagctggccggcaaggaaaacctggaataccctagcgtgaccctgccacctcagcctcacaccaaggagggcgttgatgcctacaacgaagtgatcgcccgggtgcgaatgtgggtgaacctgaacctgtggcagaagctgaagctaagcagagatgatgccaagcctctgctgagactgaagggattcccttcctttcctctggtcgagagacaggccaacgaagtggactggtgggacatggtgtgtaacgtgaagaagctgatcaacgagaaaaaggaggatggcaaggtgttttggcagaatctggctggctacaagagacaggaagccctgagaccatacctgagcagcgaggaagatcggaagaagggaaagaaattcgctcggtaccagctgggcgacctgctgctgcacctggaaaagaagcacggcgaggactggggaaaggtgtacgacgaggcctgggagcggattgacaagaaagtggaaggcctgagcaagcacatcaagctggaagaggaacggagaagcgaggacgcccagagcaaggccgccctgaccgactggctgcgggctaaggccagcttcgtgatcgagggcctgaaggaggccgacaaggacgagttctgcagatgcgagctgaagctgcagaagtggtacggggacctgcggggaaagcccttcgccatcgaagccgagaacagcatcctggacatcagcggcttcagcaagcagtacaactgtgccttcatctggcagaaggacggcgtgaagaagctgaacctgtacctgatcatcaactacttcaagggcggcaagctgcggttcaagaagatcaaacctgaagccttcgaagccaacagattctacaccgtgatcaacaaaaagagcggcgagatcgtgcccatggaggtgaacttcaacttcgacgaccccaacctgatcatcctgcctctggcctttggcaagagacagggcagagaattcatctggaacgacctgctgtccctggaaaccggcagcctgaagctggccaacggaagagtgatcgagaagacactgtacaacagaagaacccggcaggatgagcctgccctgttcgtggccctgaccttcgagcggcgggaggtcctggactcctccaatatcaaaccaatgaacctgatcggcgtggcaagaggcgaaaacatccccgccgtgatcgccctgaccgaccccgagggctgcccactgagccggtttaaggatagcctgggaaacccaacccacatcctgagaatcggcgagagctataaggagaagcagcggaccatccaggccaagaaggaggtggagcagcggagagccggcggctacagccggaagtacgccagcaaagccaagaatctggcagacgatatggtgagaaacaccgctagagatctgctgtactacgccgtgacccaggatgccatgctgatcttcgccaacctgagccggggcttcggccggcagggcaagcggaccttcatggccgagagacagtacacacggatggaggactggctgaccgccaagctggcctacgagggcctgagcaagacctacctgtccaagacactggcccagtacacctccaagacatgcagcaactgtgggtttaccatcaccagcgccgactacgacagggtgctggagaagctgaagaagacagcaacaggctggatgaccacaattaacggcaaggagctgaaggtggagggccagattacctactacaacagatacaagagacagaacgtagtcaaggacctgtccgtcgagctggatagactgagcgaagaatctgtgaacaacgacatctcctcctggacaaagggcagaagcggagaagctctgagcctcctgaagaaaagattctcccatagacccgtgcaggagaagttcgtgtgcctgaactgcggcttcgagacacacgcagccgagcaagccgccctgaacatcgccagatcctggctgttcctgcggagccaggagtacaagaaataccagacaaacaagacaaccggcaacaccgataagagagccttcgtcgagacctggcagtccttttaccggaagaagcttaaggaggtgtggaaacctgccgtgcggtctggcggatctggcggaggctccagcaaggtgcccgtgaccttcggcgacctggccatctacttcagccaggaggagtgggagtggctgagccccatccagaaggacctgtacgaggacgtgatgctggagaactaccagaacctggtgagcctgggcctgagcttcaggaggcccaacgtgatcaccctgctggagaagggcaaggccccctggatggtggagcccgtgaggaagaggaggggcgtggacagcggcagcaagtgcggcggcccaagcagcggcgcccctcctcccagcggcggcagcccagccggctccccaacctctaccgaggagggcacctctgagtccgccacccccgagagcggccctggcacctccaccgagcccagcgagggcagcgcacccggcagccctgccggcagccccacctccacagaggagggaaccagcaccgagcccagcgaaggcagcgccccaggcaccagcaccgagcctagtgagcaggagattaaacggatcaacaagatcagaagaagacttgtgaaagacagcaacaccaagaaggccggcaagacaggccccatgaaaaccctgctggttagagtgatgacacccgatctgagagagcggctggaaaacctgagaaagaagcctgaaaatatcccccagcccatcagcaatacatctagagccaacctgaataagctgctgaccgattacaccgaaatgaagaaggcgatcctgcatgtgtactgggaagagttccagaaggaccctgtgggcctgatgagccgggtggcccagcctgccagcaagaagatcgatcagaacaagctgaaacctgagatggacgagaagggcaacctgaccaccgccggctttgcctgctctcagtgtggccagcccctgttcgtgtacaagctggagcaggtgtctgagaagggcaaggcttacaccaactacttcggacggtgcaatgtggccgagcacgaaaagctgatcctgctggcccagctgaagcccgagaaggatagcgacgaagccgtgacatatagcctgggaaagtttgggcagagggccctggatttctacagcattcatgtgaccaaggagtccacccaccccgtgaagcccctggcccagatcgccggaaacagatacgcctccggacctgtgggaaaggccctgagcgacgcatgtatgggcacaatcgcctccttcctgtctaagtaccaggacatcatcatcgaacaccagaaggtggtgaagggcaaccagaagagactggagagcctgcgggagctggccggcaaggaaaacctggaataccctagcgtgaccctgccacctcagcctcacaccaaggagggcgttgatgcctacaacgaagtgatcgcccgggtgcgaatgtgggtgaacctgaacctgtggcagaagctgaagctaagcagagatgatgccaagcctctgctgagactgaagggattcccttcctttcctctggtcgagagacaggccaacgaagtggactggtgggacatggtgtgtaacgtgaagaagctgatcaacgagaaaaaggaggatggcaaggtgttttggcagaatctggctggctacaagagacaggaagccctgagaccatacctgagcagcgaggaagatcggaagaagggaaagaaattcgctcggtaccagctgggcgacctgctgctgcacctggaaaagaagcacggcgaggactggggaaaggtgtacgacgaggcctgggagcggattgacaagaaagtggaaggcctgagcaagcacatcaagctggaagaggaacggagaagcgaggacgcccagagcaaggccgccctgaccgactggctgcgggctaaggccagcttcgtgatcgagggcctgaaggaggccgacaaggacgagttctgcagatgcgagctgaagctgcagaagtggtacggggacctgcggggaaagcccttcgccatcgaagccgagaacagcatcctggacatcagcggcttcagcaagcagtacaactgtgccttcatctggcagaaggacggcgtgaagaagctgaacctgtacctgatcatcaactacttcaagggcggcaagctgcggttcaagaagatcaaacctgaagccttcgaagccaacagattctacaccgtgatcaacaaaaagagcggcgagatcgtgcccatggaggtgaacttcaacttcgacgaccccaacctgatcatcctgcctctggcctttggcaagagacagggcagagaattcatctggaacgacctgctgtccctggaaaccggcagcctgaagctggccaacggaagagtgatcgagaagacactgtacaacagaagaacccggcaggatgagcctgccctgttcgtggccctgaccttcgagcggcgggaggtcctggactcctccaatatcaaaccaatgaacctgatcggcgtggcaagaggcgaaaacatccccgccgtgatcgccctgaccgaccccgagggctgcccactgagccggtttaaggatagcctgggaaacccaacccacatcctgagaatcggcgagagctataaggagaagcagcggaccatccaggccaagaaggaggtggagcagcggagagccggcggctacagccggaagtacgccagcaaagccaagaatctggcagacgatatggtgagaaacaccgctagagatctgctgtactacgccgtgacccaggatgccatgctgatcttcgccaacctgagccggggcttcggccggcagggcaagcggaccttcatggccgagagacagtacacacggatggaggactggctgaccgccaagctggcctacgagggcctgagcaagacctacctgtccaagacactggcccagtacacctccaagacatgcagcaactgtgggtttaccatcaccagcgccgactacgacagggtgctggagaagctgaagaagacagcaacaggctggatgaccacaattaacggcaaggagctgaaggtggagggccagattacctactacaacagatacaagagacagaacgtagtcaaggacctgtccgtcgagctggatagactgagcgaagaatctgtgaacaacgacatctcctcctggacaaagggcagaagcggagaagctctgagcctcctgaagaaaagattctcccatagacccgtgcaggagaagttcgtgtgcctgaactgcggcttcgagacacacgcagccgagcaagccgccctgaacatcgccagatcctggctgttcctgcggagccaggagtacaagaaataccagacaaacaagacaaccggcaacaccgataagagagccttcgtcgagacctggcagtccttttaccggaagaagcttaaggaggtgtggaaacctgccgtgcggtctggcggatctggcggaggctcctagcaaggtgcccgtgaccttcggcgacctggccatctacttcagccaggaggagtgggagtggctgagccccatccagaaggacctgtacgaggacgtgatgctggagaactaccagaacctggtgagcctgggcctgagcttcaggaggcccaacgtgatcaccctgctggagaagggcaaggccccctggatggtggagcccgtgaggaagaggaggggcgtggacagcggcagcaagtgcggatctggctccggcagcggccccaagaaaaagagaaaagtctaagctgccttctgcggggcttgccttctggccatgcccttcttctctcccttgcacctgtacctcttggtctttgaataaagcctgagtaggaaggctagcaaaaaaaaaaaaaaaaaaaaaaaaaaaaaaaaaaaaaaaaaaaaaaaaaaaaaaaaaaaaaaaaaaaaaaaaaaaaaaaa

SEQ ID NO: 15428 - RNA, 9485 nt, synthetic construct
  source 1..9485: mol_type = other RNA
aggaaataagagagaaaagaagagtaagaagaaatataagagccaccatggcccctaagaagaagcgtaaagtgagccggatggaacgcctcgtctacgaggtgcggcagaagtgcagaaacatcgaggacatctgcatctcctgcggatctctgaacgtgaccctggagcacccactgttcatcggcggcatgtgccagaactgtaaaaactgttttctggagtgtgcctatcaatacgacgatgacggctaccagagctactgcaccatctgttgcggcggaagagaggtgctgatgtgtggaaataacaactgctgccggtgcttctgcgtggaatgcgtggacctgctggtgggccccggcgccgcccaggccgctattaaggaagatccttggaactgctacatgtgcggccacaagggcacatacggcctgctgagacggagagaggactggcctagcagactgcagatgttcttcgccaataaccacgaccaggagttcgacccccctaaggtgtaccctcccgtccccgccgagaagagaaagcccatccgggtcctgagcctgttcgatggcatcgccaccggtctgctggtgctgaaggacctgggcatccaggtggataggtacattgcctccgaggtgtgcgaggactccatcaccgtgggaatggtgcgtcatcagggcaagatcatgtacgtgggcgacgtgcggagcgtgacacagaagcatatccaggagtggggccctttcgacctggtgatcggcggcagcccttgcaatgacctgagcatcgtgaacccagcccggaagggcctgtacgagggaaccggcagactgttcttcgagttttacagactgctgcacgacgcccggcctaaggaaggcgacgaccggcccttcttttggctgttcgagaatgtggtggccatgggagtcagcgacaagcgggatattagccggttcctggagagcaaccccgtgatgatcgatgccaaggaagtgagcgccgcccaccgggccagatacttctggggcaatctgcctggcatgaacagacccctggccagcaccgtgaacgacaagctggagctgcaggagtgcctggagcacggccggatcgccaagttcagcaaggtgagaaccatcaccacccgaagcaacagcatcaaacaaggcaaggaccagcactttcctgtgttcatgaacgagaaggaggacatcctgtggtgtaccgagatggagagagtgttcgggttcccagtccactacacagatgtcagcaacatgtctagactggccagacagagactgctgggaagaagctggtccgtccctgtgatcagacacctgttcgcccctctgaaggagtacttcgcctgcgtgagcagcggcaacagcaacgccaacagccggggccccagcttctctagcggcctggtgccactgtccctgagagggagccacatgggccccatggagatctacaaaaccgtgagcgcctggaagcggcagcctgtgcgcgtgctgagcctgtttcggaatatcgataaagtcctgaaaagcctgggattcctggagagcggctctggctccggcggtggcaccctgaagtacgtggaggatgtgacaaacgtggtcagacgggatgtggagaagtggggccccttcgatctggtgtacggcagcacccaacccctgggcagctcttgtgaccggtgccctggctggtacatgtttcagttccaccggatcctgcagtacgccctgccgagacaggagtcccagcggccattcttttggattttcatggacaacttgctgctgaccgaggatgaccaggaaactaccactcggttcctgcagaccgaagccgtgaccctgcaggacgtgagaggccgggactaccagaacgccatgcgggtgtggtccaacatccctggactgaaaagcaagcacgcacctctgacccctaaagaagaggagtacctgcaggcccaggtgcggagcagaagcaagctggacgcccctaaggtggatctgctggtgaagaattgcctcctgcccctgagagagtacttcaagtatttcagccagaatagtctgcccctgggaggcagcggcggcggcgccctggtgacatttgaggacgtcgccgtgcggttcacccaggaggaatgggctctgctggatccttctcagaaaatcctgtaccgggacgtgatgagagagacataccggaatctgacctccgtgggcatcaactgggaatgttgggaccttgaagcctgcttcagaagcctgggaagaaacctgagagtgcaggtggtgaagagaaagtgcgagctgaccaacagcggcccctgcgccgagggcggcccaagcagcggcgcccctcctcccagcggcggcagcccagccggctccccaacctctaccgaggagggcacctctgagtccgccacccccgagagcggccctggcacctccaccgagcccagcgagggcagcgcacccggcagccctgccggcagccccacctccacagaggagggaaccagcaccgagcccagcgaaggcagcgccccaggcaccagcaccgagcctagtgagcaggagattaaacggatcaacaagatcagaagaagacttgtgaaagacagcaacaccaagaaggccggcaagacaggccccatgaaaaccctgctggttagagtgatgacacccgatctgagagagcggctggaaaacctgagaaagaagcctgaaaatatcccccagcccatcagcaatacatctagagccaacctgaataagctgctgaccgattacaccgaaatgaagaaggcgatcctgcatgtgtactgggaagagttccagaaggaccctgtgggcctgatgagccgggtggcccagcctgccagcaagaagatcgatcagaacaagctgaaacctgagatggacgagaagggcaacctgaccaccgccggctttgcctgctctcagtgtggccagcccctgttcgtgtacaagctggagcaggtgtctgagaagggcaaggcttacaccaactacttcggacggtgcaatgtggccgagcacgaaaagctgatcctgctggcccagctgaagcccgagaaggatagcgacgaagccgtgacatatagcctgggaaagtttgggcagagggccctggatttctacagcattcatgtgaccaaggagtccacccaccccgtgaagcccctggcccagatcgccggaaacagatacgcctccggacctgtgggaaaggccctgagcgacgcatgtatgggcacaatcgcctccttcctgtctaagtaccaggacatcatcatcgaacaccagaaggtggtgaagggcaaccagaagagactggagagcctgcgggagctggccggcaaggaaaacctggaataccctagcgtgaccctgccacctcagcctcacaccaaggagggcgttgatgcctacaacgaagtgatcgcccgggtgcgaatgtgggtgaacctgaacctgtggcagaagctgaagctaagcagagatgatgccaagcctctgctgagactgaagggattcccttcctttcctctggtcgagagacaggccaacgaagtggactggtgggacatggtgtgtaacgtgaagaagctgatcaacgagaaaaaggaggatggcaaggtgttttggcagaatctggctggctacaagagacaggaagccctgagaccatacctgagcagcgaggaagatcggaagaagggaaagaaattcgctcggtaccagctgggcgacctgctgctgcacctggaaaagaagcacggcgaggactggggaaaggtgtacgacgaggcctgggagcggattgacaagaaagtggaaggcctgagcaagcacatcaagctggaagaggaacggagaagcgaggacgcccagagcaaggccgccctgaccgactggctgcgggctaaggccagcttcgtgatcgagggcctgaaggaggccgacaaggacgagttctgcagatgcgagctgaagctgcagaagtggtacggggacctgcggggaaagcccttcgccatcgaagccgagaacagcatcctggacatcagcggcttcagcaagcagtacaactgtgccttcatctggcagaaggacggcgtgaagaagctgaacctgtacctgatcatcaactacttcaagggcggcaagctgcggttcaagaagatcaaacctgaagccttcgaagccaacagattctacaccgtgatcaacaaaaagagcggcgagatcgtgcccatggaggtgaacttcaacttcgacgaccccaacctgatcatcctgcctctggcctttggcaagagacagggcagagaattcatctggaacgacctgctgtccctggaaaccggcagcctgaagctggccaacggaagagtgatcgagaagacactgtacaacagaagaacccggcaggatgagcctgccctgttcgtggccctgaccttcgagcggcgggaggtcctggactcctccaatatcaaaccaatgaacctgatcggcgtggcaagaggcgaaaacatccccgccgtgatcgccctgaccgaccccgagggctgcccactgagccggtttaaggatagcctgggaaacccaacccacatcctgagaatcggcgagagctataaggagaagcagcggaccatccaggccaagaaggaggtggagcagcggagagccggcggctacagccggaagtacgccagcaaagccaagaatctggcagacgatatggtgagaaacaccgctagagatctgctgtactacgccgtgacccaggatgccatgctgatcttcgccaacctgagccggggcttcggccggcagggcaagcggaccttcatggccgagagacagtacacacggatggaggactggctgaccgccaagctggcctacgagggcctgagcaagacctacctgtccaagacactggcccagtacacctccaagacatgcagcaactgtgggtttaccatcaccagcgccgactacgacagggtgctggagaagctgaagaagacagcaacaggctggatgaccacaattaacggcaaggagctgaaggtggagggccagattacctactacaacagatacaagagacagaacgtagtcaaggacctgtccgtcgagctggatagactgagcgaagaatctgtgaacaacgacatctcctcctggacaaagggcagaagcggagaagctctgagcctcctgaagaaaagattctcccatagacccgtgcaggagaagttcgtgtgcctgaactgcggcttcgagacacacgcagccgagcaagccgccctgaacatcgccagatcctggctgttcctgcggagccaggagtacaagaaataccagacaaacaagacaaccggcaacaccgataagagagccttcgtcgagacctggcagtccttttaccggaagaagcttaaggaggtgtggaaacctgccgtgcggtctggcggatctggcggaggctccatggccgccatgcccctgaaggccaggtaccaggagatggtgaccttcgaggacgtggccgtgcacttcaccaagaccgagtggaccggcctgagccccgcccagagggccctgtacaggagcgtgatgctggagaacttcggcaacctgaccgccctgggctaccccgtgcccaagcccgccctgatcagcctgctggagggcggcgacatggactggggcctggaggcccaggacgaccccggcggcccaagcagcggcgcccctcctcccagcggcggcagcccagccggctccccaacctctaccgaggagggcacctctgagtccgccacccccgagagcggccctggcacctccaccgagcccagcgagggcagcgcacccggcagccctgccggcagccccacctccacagaggagggaaccagcaccgagcccagcgaaggcagcgccccaggcaccagcaccgagcctagtgagcaggagattaaacggatcaacaagatcagaagaagacttgtgaaagacagcaacaccaagaaggccggcaagacaggccccatgaaaaccctgctggttagagtgatgacacccgatctgagagagcggctggaaaacctgagaaagaagcctgaaaatatcccccagcccatcagcaatacatctagagccaacctgaataagctgctgaccgattacaccgaaatgaagaaggcgatcctgcatgtgtactgggaagagttccagaaggaccctgtgggcctgatgagccgggtggcccagcctgccagcaagaagatcgatcagaacaagctgaaacctgagatggacgagaagggcaacctgaccaccgccggctttgcctgctctcagtgtggccagcccctgttcgtgtacaagctggagcaggtgtctgagaagggcaaggcttacaccaactacttcggacggtgcaatgtggccgagcacgaaaagctgatcctgctggcccagctgaagcccgagaaggatagcgacgaagccgtgacatatagcctgggaaagtttgggcagagggccctggatttctacagcattcatgtgaccaaggagtccacccaccccgtgaagcccctggcccagatcgccggaaacagatacgcctccggacctgtgggaaaggccctgagcgacgcatgtatgggcacaatcgcctccttcctgtctaagtaccaggacatcatcatcgaacaccagaaggtggtgaagggcaaccagaagagactggagagcctgcgggagctggccggcaaggaaaacctggaataccctagcgtgaccctgccacctcagcctcacaccaaggagggcgttgatgcctacaacgaagtgatcgcccgggtgcgaatgtgggtgaacctgaacctgtggcagaagctgaagctaagcagagatgatgccaagcctctgctgagactgaagggattcccttcctttcctctggtcgagagacaggccaacgaagtggactggtgggacatggtgtgtaacgtgaagaagctgatcaacgagaaaaaggaggatggcaaggtgttttggcagaatctggctggctacaagagacaggaagccctgagaccatacctgagcagcgaggaagatcggaagaagggaaagaaattcgctcggtaccagctgggcgacctgctgctgcacctggaaaagaagcacggcgaggactggggaaaggtgtacgacgaggcctgggagcggattgacaagaaagtggaaggcctgagcaagcacatcaagctggaagaggaacggagaagcgaggacgcccagagcaaggccgccctgaccgactggctgcgggctaaggccagcttcgtgatcgagggcctgaaggaggccgacaaggacgagttctgcagatgcgagctgaagctgcagaagtggtacggggacctgcggggaaagcccttcgccatcgaagccgagaacagcatcctggacatcagcggcttcagcaagcagtacaactgtgccttcatctggcagaaggacggcgtgaagaagctgaacctgtacctgatcatcaactacttcaagggcggcaagctgcggttcaagaagatcaaacctgaagccttcgaagccaacagattctacaccgtgatcaacaaaaagagcggcgagatcgtgcccatggaggtgaacttcaacttcgacgaccccaacctgatcatcctgcctctggcctttggcaagagacagggcagagaattcatctggaacgacctgctgtccctggaaaccggcagcctgaagctggccaacggaagagtgatcgagaagacactgtacaacagaagaacccggcaggatgagcctgccctgttcgtggccctgaccttcgagcggcgggaggtcctggactcctccaatatcaaaccaatgaacctgatcggcgtggcaagaggcgaaaacatccccgccgtgatcgccctgaccgaccccgagggctgcccactgagccggtttaaggatagcctgggaaacccaacccacatcctgagaatcggcgagagctataaggagaagcagcggaccatccaggccaagaaggaggtggagcagcggagagccggcggctacagccggaagtacgccagcaaagccaagaatctggcagacgatatggtgagaaacaccgctagagatctgctgtactacgccgtgacccaggatgccatgctgatcttcgccaacctgagccggggcttcggccggcagggcaagcggaccttcatggccgagagacagtacacacggatggaggactggctgaccgccaagctggcctacgagggcctgagcaagacctacctgtccaagacactggcccagtacacctccaagacatgcagcaactgtgggtttaccatcaccagcgccgactacgacagggtgctggagaagctgaagaagacagcaacaggctggatgaccacaattaacggcaaggagctgaaggtggagggccagattacctactacaacagatacaagagacagaacgtagtcaaggacctgtccgtcgagctggatagactgagcgaagaatctgtgaacaacgacatctcctcctggacaaagggcagaagcggagaagctctgagcctcctgaagaaaagattctcccatagacccgtgcaggagaagttcgtgtgcctgaactgcggcttcgagacacacgcagccgagcaagccgccctgaacatcgccagatcctggctgttcctgcggagccaggagtacaagaaataccagacaaacaagacaaccggcaacaccgataagagagccttcgtcgagacctggcagtccttttaccggaagaagcttaaggaggtgtggaaacctgccgtgcggtctggcggatctggcggaggctcctatggccgccatgcccctgaaggccaggtaccaggagatggtgaccttcgaggacgtggccgtgcacttcaccaagaccgagtggaccggcctgagccccgcccagagggccctgtacaggagcgtgatgctggagaacttcggcaacctgaccgccctgggctaccccgtgcccaagcccgccctgatcagcctgctggagggcggcgacatggactggggcctggaggcccaggacgaccccggatctggctccggcagcggccccaagaaaaagagaaaagtctaagctgccttctgcggggcttgccttctggccatgcccttcttctctcccttgcacctgtacctcttggtctttgaataaagcctgagtaggaaggctagcaaaaaaaaaaaaaaaaaaaaaaaaaaaaaaaaaaaaaaaaaaaaaaaaaaaaaaaaaaaaaaaaaaaaaaaaaaaaaaaa

SEQ ID NO: 15429 - RNA, 9485 nt, synthetic construct
  source 1..9485: mol_type = other RNA
aggaaataagagagaaaagaagagtaagaagaaatataagagccaccatggcccctaagaagaagcgtaaagtgagccggatggaacgcctcgtctacgaggtgcggcagaagtgcagaaacatcgaggacatctgcatctcctgcggatctctgaacgtgaccctggagcacccactgttcatcggcggcatgtgccagaactgtaaaaactgttttctggagtgtgcctatcaatacgacgatgacggctaccagagctactgcaccatctgttgcggcggaagagaggtgctgatgtgtggaaataacaactgctgccggtgcttctgcgtggaatgcgtggacctgctggtgggccccggcgccgcccaggccgctattaaggaagatccttggaactgctacatgtgcggccacaagggcacatacggcctgctgagacggagagaggactggcctagcagactgcagatgttcttcgccaataaccacgaccaggagttcgacccccctaaggtgtaccctcccgtccccgccgagaagagaaagcccatccgggtcctgagcctgttcgatggcatcgccaccggtctgctggtgctgaaggacctgggcatccaggtggataggtacattgcctccgaggtgtgcgaggactccatcaccgtgggaatggtgcgtcatcagggcaagatcatgtacgtgggcgacgtgcggagcgtgacacagaagcatatccaggagtggggccctttcgacctggtgatcggcggcagcccttgcaatgacctgagcatcgtgaacccagcccggaagggcctgtacgagggaaccggcagactgttcttcgagttttacagactgctgcacgacgcccggcctaaggaaggcgacgaccggcccttcttttggctgttcgagaatgtggtggccatgggagtcagcgacaagcgggatattagccggttcctggagagcaaccccgtgatgatcgatgccaaggaagtgagcgccgcccaccgggccagatacttctggggcaatctgcctggcatgaacagacccctggccagcaccgtgaacgacaagctggagctgcaggagtgcctggagcacggccggatcgccaagttcagcaaggtgagaaccatcaccacccgaagcaacagcatcaaacaaggcaaggaccagcactttcctgtgttcatgaacgagaaggaggacatcctgtggtgtaccgagatggagagagtgttcgggttcccagtccactacacagatgtcagcaacatgtctagactggccagacagagactgctgggaagaagctggtccgtccctgtgatcagacacctgttcgcccctctgaaggagtacttcgcctgcgtgagcagcggcaacagcaacgccaacagccggggccccagcttctctagcggcctggtgccactgtccctgagagggagccacatgggccccatggagatctacaaaaccgtgagcgcctggaagcggcagcctgtgcgcgtgctgagcctgtttcggaatatcgataaagtcctgaaaagcctgggattcctggagagcggctctggctccggcggtggcaccctgaagtacgtggaggatgtgacaaacgtggtcagacgggatgtggagaagtggggccccttcgatctggtgtacggcagcacccaacccctgggcagctcttgtgaccggtgccctggctggtacatgtttcagttccaccggatcctgcagtacgccctgccgagacaggagtcccagcggccattcttttggattttcatggacaacttgctgctgaccgaggatgaccaggaaactaccactcggttcctgcagaccgaagccgtgaccctgcaggacgtgagaggccgggactaccagaacgccatgcgggtgtggtccaacatccctggactgaaaagcaagcacgcacctctgacccctaaagaagaggagtacctgcaggcccaggtgcggagcagaagcaagctggacgcccctaaggtggatctgctggtgaagaattgcctcctgcccctgagagagtacttcaagtatttcagccagaatagtctgcccctgggaggcagcggcggcggcgccctggtgacatttgaggacgtcgccgtgcggttcacccaggaggaatgggctctgctggatccttctcagaaaatcctgtaccgggacgtgatgagagagacataccggaatctgacctccgtgggcatcaactgggaatgttgggaccttgaagcctgcttcagaagcctgggaagaaacctgagagtgcaggtggtgaagagaaagtgcgagctgaccaacagcggcccctgcgccgagggcggcccaagcagcggcgcccctcctcccagcggcggcagcccagccggctccccaacctctaccgaggagggcacctctgagtccgccacccccgagagcggccctggcacctccaccgagcccagcgagggcagcgcacccggcagccctgccggcagccccacctccacagaggagggaaccagcaccgagcccagcgaaggcagcgccccaggcaccagcaccgagcctagtgagcaggagattaaacggatcaacaagatcagaagaagacttgtgaaagacagcaacaccaagaaggccggcaagacaggccccatgaaaaccctgctggttagagtgatgacacccgatctgagagagcggctggaaaacctgagaaagaagcctgaaaatatcccccagcccatcagcaatacatctagagccaacctgaataagctgctgaccgattacaccgaaatgaagaaggcgatcctgcatgtgtactgggaagagttccagaaggaccctgtgggcctgatgagccgggtggcccagcctgccagcaagaagatcgatcagaacaagctgaaacctgagatggacgagaagggcaacctgaccaccgccggctttgcctgctctcagtgtggccagcccctgttcgtgtacaagctggagcaggtgtctgagaagggcaaggcttacaccaactacttcggacggtgcaatgtggccgagcacgaaaagctgatcctgctggcccagctgaagcccgagaaggatagcgacgaagccgtgacatatagcctgggaaagtttgggcagagggccctggatttctacagcattcatgtgaccaaggagtccacccaccccgtgaagcccctggcccagatcgccggaaacagatacgcctccggacctgtgggaaaggccctgagcgacgcatgtatgggcacaatcgcctccttcctgtctaagtaccaggacatcatcatcgaacaccagaaggtggtgaagggcaaccagaagagactggagagcctgcgggagctggccggcaaggaaaacctggaataccctagcgtgaccctgccacctcagcctcacaccaaggagggcgttgatgcctacaacgaagtgatcgcccgggtgcgaatgtgggtgaacctgaacctgtggcagaagctgaagctaagcagagatgatgccaagcctctgctgagactgaagggattcccttcctttcctctggtcgagagacaggccaacgaagtggactggtgggacatggtgtgtaacgtgaagaagctgatcaacgagaaaaaggaggatggcaaggtgttttggcagaatctggctggctacaagagacaggaagccctgagaccatacctgagcagcgaggaagatcggaagaagggaaagaaattcgctcggtaccagctgggcgacctgctgctgcacctggaaaagaagcacggcgaggactggggaaaggtgtacgacgaggcctgggagcggattgacaagaaagtggaaggcctgagcaagcacatcaagctggaagaggaacggagaagcgaggacgcccagagcaaggccgccctgaccgactggctgcgggctaaggccagcttcgtgatcgagggcctgaaggaggccgacaaggacgagttctgcagatgcgagctgaagctgcagaagtggtacggggacctgcggggaaagcccttcgccatcgaagccgagaacagcatcctggacatcagcggcttcagcaagcagtacaactgtgccttcatctggcagaaggacggcgtgaagaagctgaacctgtacctgatcatcaactacttcaagggcggcaagctgcggttcaagaagatcaaacctgaagccttcgaagccaacagattctacaccgtgatcaacaaaaagagcggcgagatcgtgcccatggaggtgaacttcaacttcgacgaccccaacctgatcatcctgcctctggcctttggcaagagacagggcagagaattcatctggaacgacctgctgtccctggaaaccggcagcctgaagctggccaacggaagagtgatcgagaagacactgtacaacagaagaacccggcaggatgagcctgccctgttcgtggccctgaccttcgagcggcgggaggtcctggactcctccaatatcaaaccaatgaacctgatcggcgtggcaagaggcgaaaacatccccgccgtgatcgccctgaccgaccccgagggctgcccactgagccggtttaaggatagcctgggaaacccaacccacatcctgagaatcggcgagagctataaggagaagcagcggaccatccaggccaagaaggaggtggagcagcggagagccggcggctacagccggaagtacgccagcaaagccaagaatctggcagacgatatggtgagaaacaccgctagagatctgctgtactacgccgtgacccaggatgccatgctgatcttcgccaacctgagccggggcttcggccggcagggcaagcggaccttcatggccgagagacagtacacacggatggaggactggctgaccgccaagctggcctacgagggcctgagcaagacctacctgtccaagacactggcccagtacacctccaagacatgcagcaactgtgggtttaccatcaccagcgccgactacgacagggtgctggagaagctgaagaagacagcaacaggctggatgaccacaattaacggcaaggagctgaaggtggagggccagattacctactacaacagatacaagagacagaacgtagtcaaggacctgtccgtcgagctggatagactgagcgaagaatctgtgaacaacgacatctcctcctggacaaagggcagaagcggagaagctctgagcctcctgaagaaaagattctcccatagacccgtgcaggagaagttcgtgtgcctgaactgcggcttcgagacacacgcagccgagcaagccgccctgaacatcgccagatcctggctgttcctgcggagccaggagtacaagaaataccagacaaacaagacaaccggcaacaccgataagagagccttcgtcgagacctggcagtccttttaccggaagaagcttaaggaggtgtggaaacctgccgtgcggtctggcggatctggcggaggctcccaggccgaggtgaccttcgaggacgtggccgtgctgctgagcagggaggagtggggcaggctgggccccgtgcagaagggcctgtacagggacgtgatgctggagacctacaggaacctggtgagcctgggcgccggccccgccggccccaagcccgaggtgatcacccagctggagaggggcgacgagccctgggtgcccgacgtgcagggcagggagcagcccaccatcgacggcagcgccggcggcccaagcagcggcgcccctcctcccagcggcggcagcccagccggctccccaacctctaccgaggagggcacctctgagtccgccacccccgagagcggccctggcacctccaccgagcccagcgagggcagcgcacccggcagccctgccggcagccccacctccacagaggagggaaccagcaccgagcccagcgaaggcagcgccccaggcaccagcaccgagcctagtgagcaggagattaaacggatcaacaagatcagaagaagacttgtgaaagacagcaacaccaagaaggccggcaagacaggccccatgaaaaccctgctggttagagtgatgacacccgatctgagagagcggctggaaaacctgagaaagaagcctgaaaatatcccccagcccatcagcaatacatctagagccaacctgaataagctgctgaccgattacaccgaaatgaagaaggcgatcctgcatgtgtactgggaagagttccagaaggaccctgtgggcctgatgagccgggtggcccagcctgccagcaagaagatcgatcagaacaagctgaaacctgagatggacgagaagggcaacctgaccaccgccggctttgcctgctctcagtgtggccagcccctgttcgtgtacaagctggagcaggtgtctgagaagggcaaggcttacaccaactacttcggacggtgcaatgtggccgagcacgaaaagctgatcctgctggcccagctgaagcccgagaaggatagcgacgaagccgtgacatatagcctgggaaagtttgggcagagggccctggatttctacagcattcatgtgaccaaggagtccacccaccccgtgaagcccctggcccagatcgccggaaacagatacgcctccggacctgtgggaaaggccctgagcgacgcatgtatgggcacaatcgcctccttcctgtctaagtaccaggacatcatcatcgaacaccagaaggtggtgaagggcaaccagaagagactggagagcctgcgggagctggccggcaaggaaaacctggaataccctagcgtgaccctgccacctcagcctcacaccaaggagggcgttgatgcctacaacgaagtgatcgcccgggtgcgaatgtgggtgaacctgaacctgtggcagaagctgaagctaagcagagatgatgccaagcctctgctgagactgaagggattcccttcctttcctctggtcgagagacaggccaacgaagtggactggtgggacatggtgtgtaacgtgaagaagctgatcaacgagaaaaaggaggatggcaaggtgttttggcagaatctggctggctacaagagacaggaagccctgagaccatacctgagcagcgaggaagatcggaagaagggaaagaaattcgctcggtaccagctgggcgacctgctgctgcacctggaaaagaagcacggcgaggactggggaaaggtgtacgacgaggcctgggagcggattgacaagaaagtggaaggcctgagcaagcacatcaagctggaagaggaacggagaagcgaggacgcccagagcaaggccgccctgaccgactggctgcgggctaaggccagcttcgtgatcgagggcctgaaggaggccgacaaggacgagttctgcagatgcgagctgaagctgcagaagtggtacggggacctgcggggaaagcccttcgccatcgaagccgagaacagcatcctggacatcagcggcttcagcaagcagtacaactgtgccttcatctggcagaaggacggcgtgaagaagctgaacctgtacctgatcatcaactacttcaagggcggcaagctgcggttcaagaagatcaaacctgaagccttcgaagccaacagattctacaccgtgatcaacaaaaagagcggcgagatcgtgcccatggaggtgaacttcaacttcgacgaccccaacctgatcatcctgcctctggcctttggcaagagacagggcagagaattcatctggaacgacctgctgtccctggaaaccggcagcctgaagctggccaacggaagagtgatcgagaagacactgtacaacagaagaacccggcaggatgagcctgccctgttcgtggccctgaccttcgagcggcgggaggtcctggactcctccaatatcaaaccaatgaacctgatcggcgtggcaagaggcgaaaacatccccgccgtgatcgccctgaccgaccccgagggctgcccactgagccggtttaaggatagcctgggaaacccaacccacatcctgagaatcggcgagagctataaggagaagcagcggaccatccaggccaagaaggaggtggagcagcggagagccggcggctacagccggaagtacgccagcaaagccaagaatctggcagacgatatggtgagaaacaccgctagagatctgctgtactacgccgtgacccaggatgccatgctgatcttcgccaacctgagccggggcttcggccggcagggcaagcggaccttcatggccgagagacagtacacacggatggaggactggctgaccgccaagctggcctacgagggcctgagcaagacctacctgtccaagacactggcccagtacacctccaagacatgcagcaactgtgggtttaccatcaccagcgccgactacgacagggtgctggagaagctgaagaagacagcaacaggctggatgaccacaattaacggcaaggagctgaaggtggagggccagattacctactacaacagatacaagagacagaacgtagtcaaggacctgtccgtcgagctggatagactgagcgaagaatctgtgaacaacgacatctcctcctggacaaagggcagaagcggagaagctctgagcctcctgaagaaaagattctcccatagacccgtgcaggagaagttcgtgtgcctgaactgcggcttcgagacacacgcagccgagcaagccgccctgaacatcgccagatcctggctgttcctgcggagccaggagtacaagaaataccagacaaacaagacaaccggcaacaccgataagagagccttcgtcgagacctggcagtccttttaccggaagaagcttaaggaggtgtggaaacctgccgtgcggtctggcggatctggcggaggctcctcaggccgaggtgaccttcgaggacgtggccgtgctgctgagcagggaggagtggggcaggctgggccccgtgcagaagggcctgtacagggacgtgatgctggagacctacaggaacctggtgagcctgggcgccggccccgccggccccaagcccgaggtgatcacccagctggagaggggcgacgagccctgggtgcccgacgtgcagggcagggagcagcccaccatcgacggcagcgccggatctggctccggcagcggccccaagaaaaagagaaaagtctaagctgccttctgcggggcttgccttctggccatgcccttcttctctcccttgcacctgtacctcttggtctttgaataaagcctgagtaggaaggctagcaaaaaaaaaaaaaaaaaaaaaaaaaaaaaaaaaaaaaaaaaaaaaaaaaaaaaaaaaaaaaaaaaaaaaaaaaaaaaaaa

SEQ ID NO: 15430 - RNA, 9485 nt, synthetic construct
  source 1..9485: mol_type = other RNA
aggaaataagagagaaaagaagagtaagaagaaatataagagccaccatggcccctaagaagaagcgtaaagtgagccggatggaacgcctcgtctacgaggtgcggcagaagtgcagaaacatcgaggacatctgcatctcctgcggatctctgaacgtgaccctggagcacccactgttcatcggcggcatgtgccagaactgtaaaaactgttttctggagtgtgcctatcaatacgacgatgacggctaccagagctactgcaccatctgttgcggcggaagagaggtgctgatgtgtggaaataacaactgctgccggtgcttctgcgtggaatgcgtggacctgctggtgggccccggcgccgcccaggccgctattaaggaagatccttggaactgctacatgtgcggccacaagggcacatacggcctgctgagacggagagaggactggcctagcagactgcagatgttcttcgccaataaccacgaccaggagttcgacccccctaaggtgtaccctcccgtccccgccgagaagagaaagcccatccgggtcctgagcctgttcgatggcatcgccaccggtctgctggtgctgaaggacctgggcatccaggtggataggtacattgcctccgaggtgtgcgaggactccatcaccgtgggaatggtgcgtcatcagggcaagatcatgtacgtgggcgacgtgcggagcgtgacacagaagcatatccaggagtggggccctttcgacctggtgatcggcggcagcccttgcaatgacctgagcatcgtgaacccagcccggaagggcctgtacgagggaaccggcagactgttcttcgagttttacagactgctgcacgacgcccggcctaaggaaggcgacgaccggcccttcttttggctgttcgagaatgtggtggccatgggagtcagcgacaagcgggatattagccggttcctggagagcaaccccgtgatgatcgatgccaaggaagtgagcgccgcccaccgggccagatacttctggggcaatctgcctggcatgaacagacccctggccagcaccgtgaacgacaagctggagctgcaggagtgcctggagcacggccggatcgccaagttcagcaaggtgagaaccatcaccacccgaagcaacagcatcaaacaaggcaaggaccagcactttcctgtgttcatgaacgagaaggaggacatcctgtggtgtaccgagatggagagagtgttcgggttcccagtccactacacagatgtcagcaacatgtctagactggccagacagagactgctgggaagaagctggtccgtccctgtgatcagacacctgttcgcccctctgaaggagtacttcgcctgcgtgagcagcggcaacagcaacgccaacagccggggccccagcttctctagcggcctggtgccactgtccctgagagggagccacatgggccccatggagatctacaaaaccgtgagcgcctggaagcggcagcctgtgcgcgtgctgagcctgtttcggaatatcgataaagtcctgaaaagcctgggattcctggagagcggctctggctccggcggtggcaccctgaagtacgtggaggatgtgacaaacgtggtcagacgggatgtggagaagtggggccccttcgatctggtgtacggcagcacccaacccctgggcagctcttgtgaccggtgccctggctggtacatgtttcagttccaccggatcctgcagtacgccctgccgagacaggagtcccagcggccattcttttggattttcatggacaacttgctgctgaccgaggatgaccaggaaactaccactcggttcctgcagaccgaagccgtgaccctgcaggacgtgagaggccgggactaccagaacgccatgcgggtgtggtccaacatccctggactgaaaagcaagcacgcacctctgacccctaaagaagaggagtacctgcaggcccaggtgcggagcagaagcaagctggacgcccctaaggtggatctgctggtgaagaattgcctcctgcccctgagagagtacttcaagtatttcagccagaatagtctgcccctgggaggcagcggcggcggcgccctggtgacatttgaggacgtcgccgtgcggttcacccaggaggaatgggctctgctggatccttctcagaaaatcctgtaccgggacgtgatgagagagacataccggaatctgacctccgtgggcatcaactgggaatgttgggaccttgaagcctgcttcagaagcctgggaagaaacctgagagtgcaggtggtgaagagaaagtgcgagctgaccaacagcggcccctgcgccgagggcggcccaagcagcggcgcccctcctcccagcggcggcagcccagccggctccccaacctctaccgaggagggcacctctgagtccgccacccccgagagcggccctggcacctccaccgagcccagcgagggcagcgcacccggcagccctgccggcagccccacctccacagaggagggaaccagcaccgagcccagcgaaggcagcgccccaggcaccagcaccgagcctagtgagcaggagattaaacggatcaacaagatcagaagaagacttgtgaaagacagcaacaccaagaaggccggcaagacaggccccatgaaaaccctgctggttagagtgatgacacccgatctgagagagcggctggaaaacctgagaaagaagcctgaaaatatcccccagcccatcagcaatacatctagagccaacctgaataagctgctgaccgattacaccgaaatgaagaaggcgatcctgcatgtgtactgggaagagttccagaaggaccctgtgggcctgatgagccgggtggcccagcctgccagcaagaagatcgatcagaacaagctgaaacctgagatggacgagaagggcaacctgaccaccgccggctttgcctgctctcagtgtggccagcccctgttcgtgtacaagctggagcaggtgtctgagaagggcaaggcttacaccaactacttcggacggtgcaatgtggccgagcacgaaaagctgatcctgctggcccagctgaagcccgagaaggatagcgacgaagccgtgacatatagcctgggaaagtttgggcagagggccctggatttctacagcattcatgtgaccaaggagtccacccaccccgtgaagcccctggcccagatcgccggaaacagatacgcctccggacctgtgggaaaggccctgagcgacgcatgtatgggcacaatcgcctccttcctgtctaagtaccaggacatcatcatcgaacaccagaaggtggtgaagggcaaccagaagagactggagagcctgcgggagctggccggcaaggaaaacctggaataccctagcgtgaccctgccacctcagcctcacaccaaggagggcgttgatgcctacaacgaagtgatcgcccgggtgcgaatgtgggtgaacctgaacctgtggcagaagctgaagctaagcagagatgatgccaagcctctgctgagactgaagggattcccttcctttcctctggtcgagagacaggccaacgaagtggactggtgggacatggtgtgtaacgtgaagaagctgatcaacgagaaaaaggaggatggcaaggtgttttggcagaatctggctggctacaagagacaggaagccctgagaccatacctgagcagcgaggaagatcggaagaagggaaagaaattcgctcggtaccagctgggcgacctgctgctgcacctggaaaagaagcacggcgaggactggggaaaggtgtacgacgaggcctgggagcggattgacaagaaagtggaaggcctgagcaagcacatcaagctggaagaggaacggagaagcgaggacgcccagagcaaggccgccctgaccgactggctgcgggctaaggccagcttcgtgatcgagggcctgaaggaggccgacaaggacgagttctgcagatgcgagctgaagctgcagaagtggtacggggacctgcggggaaagcccttcgccatcgaagccgagaacagcatcctggacatcagcggcttcagcaagcagtacaactgtgccttcatctggcagaaggacggcgtgaagaagctgaacctgtacctgatcatcaactacttcaagggcggcaagctgcggttcaagaagatcaaacctgaagccttcgaagccaacagattctacaccgtgatcaacaaaaagagcggcgagatcgtgcccatggaggtgaacttcaacttcgacgaccccaacctgatcatcctgcctctggcctttggcaagagacagggcagagaattcatctggaacgacctgctgtccctggaaaccggcagcctgaagctggccaacggaagagtgatcgagaagacactgtacaacagaagaacccggcaggatgagcctgccctgttcgtggccctgaccttcgagcggcgggaggtcctggactcctccaatatcaaaccaatgaacctgatcggcgtggcaagaggcgaaaacatccccgccgtgatcgccctgaccgaccccgagggctgcccactgagccggtttaaggatagcctgggaaacccaacccacatcctgagaatcggcgagagctataaggagaagcagcggaccatccaggccaagaaggaggtggagcagcggagagccggcggctacagccggaagtacgccagcaaagccaagaatctggcagacgatatggtgagaaacaccgctagagatctgctgtactacgccgtgacccaggatgccatgctgatcttcgccaacctgagccggggcttcggccggcagggcaagcggaccttcatggccgagagacagtacacacggatggaggactggctgaccgccaagctggcctacgagggcctgagcaagacctacctgtccaagacactggcccagtacacctccaagacatgcagcaactgtgggtttaccatcaccagcgccgactacgacagggtgctggagaagctgaagaagacagcaacaggctggatgaccacaattaacggcaaggagctgaaggtggagggccagattacctactacaacagatacaagagacagaacgtagtcaaggacctgtccgtcgagctggatagactgagcgaagaatctgtgaacaacgacatctcctcctggacaaagggcagaagcggagaagctctgagcctcctgaagaaaagattctcccatagacccgtgcaggagaagttcgtgtgcctgaactgcggcttcgagacacacgcagccgagcaagccgccctgaacatcgccagatcctggctgttcctgcggagccaggagtacaagaaataccagacaaacaagacaaccggcaacaccgataagagagccttcgtcgagacctggcagtccttttaccggaagaagcttaaggaggtgtggaaacctgccgtgcggtctggcggatctggcggaggctccgcccacggcagcgtgatcttcagcgacgtgagcatcgccttcagccaggaggagtgggagtacctggacctggagcagagggacctgtacagggacgtgatgctggagaactacagcaacctggtgagcctgggctgcttcatcagcaagcccaacgtgatcagcctgctggagcagggcaaggagccctggaaggtggtgaggaaggagaggaggtaccccgacatgggcatcaggtacgagggcggcccaagcagcggcgcccctcctcccagcggcggcagcccagccggctccccaacctctaccgaggagggcacctctgagtccgccacccccgagagcggccctggcacctccaccgagcccagcgagggcagcgcacccggcagccctgccggcagccccacctccacagaggagggaaccagcaccgagcccagcgaaggcagcgccccaggcaccagcaccgagcctagtgagcaggagattaaacggatcaacaagatcagaagaagacttgtgaaagacagcaacaccaagaaggccggcaagacaggccccatgaaaaccctgctggttagagtgatgacacccgatctgagagagcggctggaaaacctgagaaagaagcctgaaaatatcccccagcccatcagcaatacatctagagccaacctgaataagctgctgaccgattacaccgaaatgaagaaggcgatcctgcatgtgtactgggaagagttccagaaggaccctgtgggcctgatgagccgggtggcccagcctgccagcaagaagatcgatcagaacaagctgaaacctgagatggacgagaagggcaacctgaccaccgccggctttgcctgctctcagtgtggccagcccctgttcgtgtacaagctggagcaggtgtctgagaagggcaaggcttacaccaactacttcggacggtgcaatgtggccgagcacgaaaagctgatcctgctggcccagctgaagcccgagaaggatagcgacgaagccgtgacatatagcctgggaaagtttgggcagagggccctggatttctacagcattcatgtgaccaaggagtccacccaccccgtgaagcccctggcccagatcgccggaaacagatacgcctccggacctgtgggaaaggccctgagcgacgcatgtatgggcacaatcgcctccttcctgtctaagtaccaggacatcatcatcgaacaccagaaggtggtgaagggcaaccagaagagactggagagcctgcgggagctggccggcaaggaaaacctggaataccctagcgtgaccctgccacctcagcctcacaccaaggagggcgttgatgcctacaacgaagtgatcgcccgggtgcgaatgtgggtgaacctgaacctgtggcagaagctgaagctaagcagagatgatgccaagcctctgctgagactgaagggattcccttcctttcctctggtcgagagacaggccaacgaagtggactggtgggacatggtgtgtaacgtgaagaagctgatcaacgagaaaaaggaggatggcaaggtgttttggcagaatctggctggctacaagagacaggaagccctgagaccatacctgagcagcgaggaagatcggaagaagggaaagaaattcgctcggtaccagctgggcgacctgctgctgcacctggaaaagaagcacggcgaggactggggaaaggtgtacgacgaggcctgggagcggattgacaagaaagtggaaggcctgagcaagcacatcaagctggaagaggaacggagaagcgaggacgcccagagcaaggccgccctgaccgactggctgcgggctaaggccagcttcgtgatcgagggcctgaaggaggccgacaaggacgagttctgcagatgcgagctgaagctgcagaagtggtacggggacctgcggggaaagcccttcgccatcgaagccgagaacagcatcctggacatcagcggcttcagcaagcagtacaactgtgccttcatctggcagaaggacggcgtgaagaagctgaacctgtacctgatcatcaactacttcaagggcggcaagctgcggttcaagaagatcaaacctgaagccttcgaagccaacagattctacaccgtgatcaacaaaaagagcggcgagatcgtgcccatggaggtgaacttcaacttcgacgaccccaacctgatcatcctgcctctggcctttggcaagagacagggcagagaattcatctggaacgacctgctgtccctggaaaccggcagcctgaagctggccaacggaagagtgatcgagaagacactgtacaacagaagaacccggcaggatgagcctgccctgttcgtggccctgaccttcgagcggcgggaggtcctggactcctccaatatcaaaccaatgaacctgatcggcgtggcaagaggcgaaaacatccccgccgtgatcgccctgaccgaccccgagggctgcccactgagccggtttaaggatagcctgggaaacccaacccacatcctgagaatcggcgagagctataaggagaagcagcggaccatccaggccaagaaggaggtggagcagcggagagccggcggctacagccggaagtacgccagcaaagccaagaatctggcagacgatatggtgagaaacaccgctagagatctgctgtactacgccgtgacccaggatgccatgctgatcttcgccaacctgagccggggcttcggccggcagggcaagcggaccttcatggccgagagacagtacacacggatggaggactggctgaccgccaagctggcctacgagggcctgagcaagacctacctgtccaagacactggcccagtacacctccaagacatgcagcaactgtgggtttaccatcaccagcgccgactacgacagggtgctggagaagctgaagaagacagcaacaggctggatgaccacaattaacggcaaggagctgaaggtggagggccagattacctactacaacagatacaagagacagaacgtagtcaaggacctgtccgtcgagctggatagactgagcgaagaatctgtgaacaacgacatctcctcctggacaaagggcagaagcggagaagctctgagcctcctgaagaaaagattctcccatagacccgtgcaggagaagttcgtgtgcctgaactgcggcttcgagacacacgcagccgagcaagccgccctgaacatcgccagatcctggctgttcctgcggagccaggagtacaagaaataccagacaaacaagacaaccggcaacaccgataagagagccttcgtcgagacctggcagtccttttaccggaagaagcttaaggaggtgtggaaacctgccgtgcggtctggcggatctggcggaggctcctgcccacggcagcgtgatcttcagcgacgtgagcatcgccttcagccaggaggagtgggagtacctggacctggagcagagggacctgtacagggacgtgatgctggagaactacagcaacctggtgagcctgggctgcttcatcagcaagcccaacgtgatcagcctgctggagcagggcaaggagccctggaaggtggtgaggaaggagaggaggtaccccgacatgggcatcaggtacgagggatctggctccggcagcggccccaagaaaaagagaaaagtctaagctgccttctgcggggcttgccttctggccatgcccttcttctctcccttgcacctgtacctcttggtctttgaataaagcctgagtaggaaggctagcaaaaaaaaaaaaaaaaaaaaaaaaaaaaaaaaaaaaaaaaaaaaaaaaaaaaaaaaaaaaaaaaaaaaaaaaaaaaaaaa

SEQ ID NO: 15431 - RNA, 9485 nt, synthetic construct
  source 1..9485: mol_type = other RNA
aggaaataagagagaaaagaagagtaagaagaaatataagagccaccatggcccctaagaagaagcgtaaagtgagccggatggaacgcctcgtctacgaggtgcggcagaagtgcagaaacatcgaggacatctgcatctcctgcggatctctgaacgtgaccctggagcacccactgttcatcggcggcatgtgccagaactgtaaaaactgttttctggagtgtgcctatcaatacgacgatgacggctaccagagctactgcaccatctgttgcggcggaagagaggtgctgatgtgtggaaataacaactgctgccggtgcttctgcgtggaatgcgtggacctgctggtgggccccggcgccgcccaggccgctattaaggaagatccttggaactgctacatgtgcggccacaagggcacatacggcctgctgagacggagagaggactggcctagcagactgcagatgttcttcgccaataaccacgaccaggagttcgacccccctaaggtgtaccctcccgtccccgccgagaagagaaagcccatccgggtcctgagcctgttcgatggcatcgccaccggtctgctggtgctgaaggacctgggcatccaggtggataggtacattgcctccgaggtgtgcgaggactccatcaccgtgggaatggtgcgtcatcagggcaagatcatgtacgtgggcgacgtgcggagcgtgacacagaagcatatccaggagtggggccctttcgacctggtgatcggcggcagcccttgcaatgacctgagcatcgtgaacccagcccggaagggcctgtacgagggaaccggcagactgttcttcgagttttacagactgctgcacgacgcccggcctaaggaaggcgacgaccggcccttcttttggctgttcgagaatgtggtggccatgggagtcagcgacaagcgggatattagccggttcctggagagcaaccccgtgatgatcgatgccaaggaagtgagcgccgcccaccgggccagatacttctggggcaatctgcctggcatgaacagacccctggccagcaccgtgaacgacaagctggagctgcaggagtgcctggagcacggccggatcgccaagttcagcaaggtgagaaccatcaccacccgaagcaacagcatcaaacaaggcaaggaccagcactttcctgtgttcatgaacgagaaggaggacatcctgtggtgtaccgagatggagagagtgttcgggttcccagtccactacacagatgtcagcaacatgtctagactggccagacagagactgctgggaagaagctggtccgtccctgtgatcagacacctgttcgcccctctgaaggagtacttcgcctgcgtgagcagcggcaacagcaacgccaacagccggggccccagcttctctagcggcctggtgccactgtccctgagagggagccacatgggccccatggagatctacaaaaccgtgagcgcctggaagcggcagcctgtgcgcgtgctgagcctgtttcggaatatcgataaagtcctgaaaagcctgggattcctggagagcggctctggctccggcggtggcaccctgaagtacgtggaggatgtgacaaacgtggtcagacgggatgtggagaagtggggccccttcgatctggtgtacggcagcacccaacccctgggcagctcttgtgaccggtgccctggctggtacatgtttcagttccaccggatcctgcagtacgccctgccgagacaggagtcccagcggccattcttttggattttcatggacaacttgctgctgaccgaggatgaccaggaaactaccactcggttcctgcagaccgaagccgtgaccctgcaggacgtgagaggccgggactaccagaacgccatgcgggtgtggtccaacatccctggactgaaaagcaagcacgcacctctgacccctaaagaagaggagtacctgcaggcccaggtgcggagcagaagcaagctggacgcccctaaggtggatctgctggtgaagaattgcctcctgcccctgagagagtacttcaagtatttcagccagaatagtctgcccctgggaggcagcggcggcggcgccctggtgacatttgaggacgtcgccgtgcggttcacccaggaggaatgggctctgctggatccttctcagaaaatcctgtaccgggacgtgatgagagagacataccggaatctgacctccgtgggcatcaactgggaatgttgggaccttgaagcctgcttcagaagcctgggaagaaacctgagagtgcaggtggtgaagagaaagtgcgagctgaccaacagcggcccctgcgccgagggcggcccaagcagcggcgcccctcctcccagcggcggcagcccagccggctccccaacctctaccgaggagggcacctctgagtccgccacccccgagagcggccctggcacctccaccgagcccagcgagggcagcgcacccggcagccctgccggcagccccacctccacagaggagggaaccagcaccgagcccagcgaaggcagcgccccaggcaccagcaccgagcctagtgagcaggagattaaacggatcaacaagatcagaagaagacttgtgaaagacagcaacaccaagaaggccggcaagacaggccccatgaaaaccctgctggttagagtgatgacacccgatctgagagagcggctggaaaacctgagaaagaagcctgaaaatatcccccagcccatcagcaatacatctagagccaacctgaataagctgctgaccgattacaccgaaatgaagaaggcgatcctgcatgtgtactgggaagagttccagaaggaccctgtgggcctgatgagccgggtggcccagcctgccagcaagaagatcgatcagaacaagctgaaacctgagatggacgagaagggcaacctgaccaccgccggctttgcctgctctcagtgtggccagcccctgttcgtgtacaagctggagcaggtgtctgagaagggcaaggcttacaccaactacttcggacggtgcaatgtggccgagcacgaaaagctgatcctgctggcccagctgaagcccgagaaggatagcgacgaagccgtgacatatagcctgggaaagtttgggcagagggccctggatttctacagcattcatgtgaccaaggagtccacccaccccgtgaagcccctggcccagatcgccggaaacagatacgcctccggacctgtgggaaaggccctgagcgacgcatgtatgggcacaatcgcctccttcctgtctaagtaccaggacatcatcatcgaacaccagaaggtggtgaagggcaaccagaagagactggagagcctgcgggagctggccggcaaggaaaacctggaataccctagcgtgaccctgccacctcagcctcacaccaaggagggcgttgatgcctacaacgaagtgatcgcccgggtgcgaatgtgggtgaacctgaacctgtggcagaagctgaagctaagcagagatgatgccaagcctctgctgagactgaagggattcccttcctttcctctggtcgagagacaggccaacgaagtggactggtgggacatggtgtgtaacgtgaagaagctgatcaacgagaaaaaggaggatggcaaggtgttttggcagaatctggctggctacaagagacaggaagccctgagaccatacctgagcagcgaggaagatcggaagaagggaaagaaattcgctcggtaccagctgggcgacctgctgctgcacctggaaaagaagcacggcgaggactggggaaaggtgtacgacgaggcctgggagcggattgacaagaaagtggaaggcctgagcaagcacatcaagctggaagaggaacggagaagcgaggacgcccagagcaaggccgccctgaccgactggctgcgggctaaggccagcttcgtgatcgagggcctgaaggaggccgacaaggacgagttctgcagatgcgagctgaagctgcagaagtggtacggggacctgcggggaaagcccttcgccatcgaagccgagaacagcatcctggacatcagcggcttcagcaagcagtacaactgtgccttcatctggcagaaggacggcgtgaagaagctgaacctgtacctgatcatcaactacttcaagggcggcaagctgcggttcaagaagatcaaacctgaagccttcgaagccaacagattctacaccgtgatcaacaaaaagagcggcgagatcgtgcccatggaggtgaacttcaacttcgacgaccccaacctgatcatcctgcctctggcctttggcaagagacagggcagagaattcatctggaacgacctgctgtccctggaaaccggcagcctgaagctggccaacggaagagtgatcgagaagacactgtacaacagaagaacccggcaggatgagcctgccctgttcgtggccctgaccttcgagcggcgggaggtcctggactcctccaatatcaaaccaatgaacctgatcggcgtggcaagaggcgaaaacatccccgccgtgatcgccctgaccgaccccgagggctgcccactgagccggtttaaggatagcctgggaaacccaacccacatcctgagaatcggcgagagctataaggagaagcagcggaccatccaggccaagaaggaggtggagcagcggagagccggcggctacagccggaagtacgccagcaaagccaagaatctggcagacgatatggtgagaaacaccgctagagatctgctgtactacgccgtgacccaggatgccatgctgatcttcgccaacctgagccggggcttcggccggcagggcaagcggaccttcatggccgagagacagtacacacggatggaggactggctgaccgccaagctggcctacgagggcctgagcaagacctacctgtccaagacactggcccagtacacctccaagacatgcagcaactgtgggtttaccatcaccagcgccgactacgacagggtgctggagaagctgaagaagacagcaacaggctggatgaccacaattaacggcaaggagctgaaggtggagggccagattacctactacaacagatacaagagacagaacgtagtcaaggacctgtccgtcgagctggatagactgagcgaagaatctgtgaacaacgacatctcctcctggacaaagggcagaagcggagaagctctgagcctcctgaagaaaagattctcccatagacccgtgcaggagaagttcgtgtgcctgaactgcggcttcgagacacacgcagccgagcaagccgccctgaacatcgccagatcctggctgttcctgcggagccaggagtacaagaaataccagacaaacaagacaaccggcaacaccgataagagagccttcgtcgagacctggcagtccttttaccggaagaagcttaaggaggtgtggaaacctgccgtgcggtctggcggatctggcggaggctccaggcccggcgccgtgagcttcgccgacgtggccgtgtacttcagccccgaggagtggggctgcctgaggcccgcccagagggccctgtacagggacgtgatgagggagacctacggccacctgggcgccctgggcttcgccggcagcaagcccgccctgatcagctggctggagaggaagaaggaggtgtggagccccgaggccgaggaccccgaggacggcgccaggcaccccggcagcggcggcggcccaagcagcggcgcccctcctcccagcggcggcagcccagccggctccccaacctctaccgaggagggcacctctgagtccgccacccccgagagcggccctggcacctccaccgagcccagcgagggcagcgcacccggcagccctgccggcagccccacctccacagaggagggaaccagcaccgagcccagcgaaggcagcgccccaggcaccagcaccgagcctagtgagcaggagattaaacggatcaacaagatcagaagaagacttgtgaaagacagcaacaccaagaaggccggcaagacaggccccatgaaaaccctgctggttagagtgatgacacccgatctgagagagcggctggaaaacctgagaaagaagcctgaaaatatcccccagcccatcagcaatacatctagagccaacctgaataagctgctgaccgattacaccgaaatgaagaaggcgatcctgcatgtgtactgggaagagttccagaaggaccctgtgggcctgatgagccgggtggcccagcctgccagcaagaagatcgatcagaacaagctgaaacctgagatggacgagaagggcaacctgaccaccgccggctttgcctgctctcagtgtggccagcccctgttcgtgtacaagctggagcaggtgtctgagaagggcaaggcttacaccaactacttcggacggtgcaatgtggccgagcacgaaaagctgatcctgctggcccagctgaagcccgagaaggatagcgacgaagccgtgacatatagcctgggaaagtttgggcagagggccctggatttctacagcattcatgtgaccaaggagtccacccaccccgtgaagcccctggcccagatcgccggaaacagatacgcctccggacctgtgggaaaggccctgagcgacgcatgtatgggcacaatcgcctccttcctgtctaagtaccaggacatcatcatcgaacaccagaaggtggtgaagggcaaccagaagagactggagagcctgcgggagctggccggcaaggaaaacctggaataccctagcgtgaccctgccacctcagcctcacaccaaggagggcgttgatgcctacaacgaagtgatcgcccgggtgcgaatgtgggtgaacctgaacctgtggcagaagctgaagctaagcagagatgatgccaagcctctgctgagactgaagggattcccttcctttcctctggtcgagagacaggccaacgaagtggactggtgggacatggtgtgtaacgtgaagaagctgatcaacgagaaaaaggaggatggcaaggtgttttggcagaatctggctggctacaagagacaggaagccctgagaccatacctgagcagcgaggaagatcggaagaagggaaagaaattcgctcggtaccagctgggcgacctgctgctgcacctggaaaagaagcacggcgaggactggggaaaggtgtacgacgaggcctgggagcggattgacaagaaagtggaaggcctgagcaagcacatcaagctggaagaggaacggagaagcgaggacgcccagagcaaggccgccctgaccgactggctgcgggctaaggccagcttcgtgatcgagggcctgaaggaggccgacaaggacgagttctgcagatgcgagctgaagctgcagaagtggtacggggacctgcggggaaagcccttcgccatcgaagccgagaacagcatcctggacatcagcggcttcagcaagcagtacaactgtgccttcatctggcagaaggacggcgtgaagaagctgaacctgtacctgatcatcaactacttcaagggcggcaagctgcggttcaagaagatcaaacctgaagccttcgaagccaacagattctacaccgtgatcaacaaaaagagcggcgagatcgtgcccatggaggtgaacttcaacttcgacgaccccaacctgatcatcctgcctctggcctttggcaagagacagggcagagaattcatctggaacgacctgctgtccctggaaaccggcagcctgaagctggccaacggaagagtgatcgagaagacactgtacaacagaagaacccggcaggatgagcctgccctgttcgtggccctgaccttcgagcggcgggaggtcctggactcctccaatatcaaaccaatgaacctgatcggcgtggcaagaggcgaaaacatccccgccgtgatcgccctgaccgaccccgagggctgcccactgagccggtttaaggatagcctgggaaacccaacccacatcctgagaatcggcgagagctataaggagaagcagcggaccatccaggccaagaaggaggtggagcagcggagagccggcggctacagccggaagtacgccagcaaagccaagaatctggcagacgatatggtgagaaacaccgctagagatctgctgtactacgccgtgacccaggatgccatgctgatcttcgccaacctgagccggggcttcggccggcagggcaagcggaccttcatggccgagagacagtacacacggatggaggactggctgaccgccaagctggcctacgagggcctgagcaagacctacctgtccaagacactggcccagtacacctccaagacatgcagcaactgtgggtttaccatcaccagcgccgactacgacagggtgctggagaagctgaagaagacagcaacaggctggatgaccacaattaacggcaaggagctgaaggtggagggccagattacctactacaacagatacaagagacagaacgtagtcaaggacctgtccgtcgagctggatagactgagcgaagaatctgtgaacaacgacatctcctcctggacaaagggcagaagcggagaagctctgagcctcctgaagaaaagattctcccatagacccgtgcaggagaagttcgtgtgcctgaactgcggcttcgagacacacgcagccgagcaagccgccctgaacatcgccagatcctggctgttcctgcggagccaggagtacaagaaataccagacaaacaagacaaccggcaacaccgataagagagccttcgtcgagacctggcagtccttttaccggaagaagcttaaggaggtgtggaaacctgccgtgcggtctggcggatctggcggaggctcctaggcccggcgccgtgagcttcgccgacgtggccgtgtacttcagccccgaggagtggggctgcctgaggcccgcccagagggccctgtacagggacgtgatgagggagacctacggccacctgggcgccctgggcttcgccggcagcaagcccgccctgatcagctggctggagaggaagaaggaggtgtggagccccgaggccgaggaccccgaggacggcgccaggcaccccggcagcggcggatctggctccggcagcggccccaagaaaaagagaaaagtctaagctgccttctgcggggcttgccttctggccatgcccttcttctctcccttgcacctgtacctcttggtctttgaataaagcctgagtaggaaggctagcaaaaaaaaaaaaaaaaaaaaaaaaaaaaaaaaaaaaaaaaaaaaaaaaaaaaaaaaaaaaaaaaaaaaaaaaaaaaaaaa

SEQ ID NO: 15432 - RNA, 9485 nt, synthetic construct
  source 1..9485: mol_type = other RNA
aggaaataagagagaaaagaagagtaagaagaaatataagagccaccatggcccctaagaagaagcgtaaagtgagccggatggaacgcctcgtctacgaggtgcggcagaagtgcagaaacatcgaggacatctgcatctcctgcggatctctgaacgtgaccctggagcacccactgttcatcggcggcatgtgccagaactgtaaaaactgttttctggagtgtgcctatcaatacgacgatgacggctaccagagctactgcaccatctgttgcggcggaagagaggtgctgatgtgtggaaataacaactgctgccggtgcttctgcgtggaatgcgtggacctgctggtgggccccggcgccgcccaggccgctattaaggaagatccttggaactgctacatgtgcggccacaagggcacatacggcctgctgagacggagagaggactggcctagcagactgcagatgttcttcgccaataaccacgaccaggagttcgacccccctaaggtgtaccctcccgtccccgccgagaagagaaagcccatccgggtcctgagcctgttcgatggcatcgccaccggtctgctggtgctgaaggacctgggcatccaggtggataggtacattgcctccgaggtgtgcgaggactccatcaccgtgggaatggtgcgtcatcagggcaagatcatgtacgtgggcgacgtgcggagcgtgacacagaagcatatccaggagtggggccctttcgacctggtgatcggcggcagcccttgcaatgacctgagcatcgtgaacccagcccggaagggcctgtacgagggaaccggcagactgttcttcgagttttacagactgctgcacgacgcccggcctaaggaaggcgacgaccggcccttcttttggctgttcgagaatgtggtggccatgggagtcagcgacaagcgggatattagccggttcctggagagcaaccccgtgatgatcgatgccaaggaagtgagcgccgcccaccgggccagatacttctggggcaatctgcctggcatgaacagacccctggccagcaccgtgaacgacaagctggagctgcaggagtgcctggagcacggccggatcgccaagttcagcaaggtgagaaccatcaccacccgaagcaacagcatcaaacaaggcaaggaccagcactttcctgtgttcatgaacgagaaggaggacatcctgtggtgtaccgagatggagagagtgttcgggttcccagtccactacacagatgtcagcaacatgtctagactggccagacagagactgctgggaagaagctggtccgtccctgtgatcagacacctgttcgcccctctgaaggagtacttcgcctgcgtgagcagcggcaacagcaacgccaacagccggggccccagcttctctagcggcctggtgccactgtccctgagagggagccacatgggccccatggagatctacaaaaccgtgagcgcctggaagcggcagcctgtgcgcgtgctgagcctgtttcggaatatcgataaagtcctgaaaagcctgggattcctggagagcggctctggctccggcggtggcaccctgaagtacgtggaggatgtgacaaacgtggtcagacgggatgtggagaagtggggccccttcgatctggtgtacggcagcacccaacccctgggcagctcttgtgaccggtgccctggctggtacatgtttcagttccaccggatcctgcagtacgccctgccgagacaggagtcccagcggccattcttttggattttcatggacaacttgctgctgaccgaggatgaccaggaaactaccactcggttcctgcagaccgaagccgtgaccctgcaggacgtgagaggccgggactaccagaacgccatgcgggtgtggtccaacatccctggactgaaaagcaagcacgcacctctgacccctaaagaagaggagtacctgcaggcccaggtgcggagcagaagcaagctggacgcccctaaggtggatctgctggtgaagaattgcctcctgcccctgagagagtacttcaagtatttcagccagaatagtctgcccctgggaggcagcggcggcggcgccctggtgacatttgaggacgtcgccgtgcggttcacccaggaggaatgggctctgctggatccttctcagaaaatcctgtaccgggacgtgatgagagagacataccggaatctgacctccgtgggcatcaactgggaatgttgggaccttgaagcctgcttcagaagcctgggaagaaacctgagagtgcaggtggtgaagagaaagtgcgagctgaccaacagcggcccctgcgccgagggcggcccaagcagcggcgcccctcctcccagcggcggcagcccagccggctccccaacctctaccgaggagggcacctctgagtccgccacccccgagagcggccctggcacctccaccgagcccagcgagggcagcgcacccggcagccctgccggcagccccacctccacagaggagggaaccagcaccgagcccagcgaaggcagcgccccaggcaccagcaccgagcctagtgagcaggagattaaacggatcaacaagatcagaagaagacttgtgaaagacagcaacaccaagaaggccggcaagacaggccccatgaaaaccctgctggttagagtgatgacacccgatctgagagagcggctggaaaacctgagaaagaagcctgaaaatatcccccagcccatcagcaatacatctagagccaacctgaataagctgctgaccgattacaccgaaatgaagaaggcgatcctgcatgtgtactgggaagagttccagaaggaccctgtgggcctgatgagccgggtggcccagcctgccagcaagaagatcgatcagaacaagctgaaacctgagatggacgagaagggcaacctgaccaccgccggctttgcctgctctcagtgtggccagcccctgttcgtgtacaagctggagcaggtgtctgagaagggcaaggcttacaccaactacttcggacggtgcaatgtggccgagcacgaaaagctgatcctgctggcccagctgaagcccgagaaggatagcgacgaagccgtgacatatagcctgggaaagtttgggcagagggccctggatttctacagcattcatgtgaccaaggagtccacccaccccgtgaagcccctggcccagatcgccggaaacagatacgcctccggacctgtgggaaaggccctgagcgacgcatgtatgggcacaatcgcctccttcctgtctaagtaccaggacatcatcatcgaacaccagaaggtggtgaagggcaaccagaagagactggagagcctgcgggagctggccggcaaggaaaacctggaataccctagcgtgaccctgccacctcagcctcacaccaaggagggcgttgatgcctacaacgaagtgatcgcccgggtgcgaatgtgggtgaacctgaacctgtggcagaagctgaagctaagcagagatgatgccaagcctctgctgagactgaagggattcccttcctttcctctggtcgagagacaggccaacgaagtggactggtgggacatggtgtgtaacgtgaagaagctgatcaacgagaaaaaggaggatggcaaggtgttttggcagaatctggctggctacaagagacaggaagccctgagaccatacctgagcagcgaggaagatcggaagaagggaaagaaattcgctcggtaccagctgggcgacctgctgctgcacctggaaaagaagcacggcgaggactggggaaaggtgtacgacgaggcctgggagcggattgacaagaaagtggaaggcctgagcaagcacatcaagctggaagaggaacggagaagcgaggacgcccagagcaaggccgccctgaccgactggctgcgggctaaggccagcttcgtgatcgagggcctgaaggaggccgacaaggacgagttctgcagatgcgagctgaagctgcagaagtggtacggggacctgcggggaaagcccttcgccatcgaagccgagaacagcatcctggacatcagcggcttcagcaagcagtacaactgtgccttcatctggcagaaggacggcgtgaagaagctgaacctgtacctgatcatcaactacttcaagggcggcaagctgcggttcaagaagatcaaacctgaagccttcgaagccaacagattctacaccgtgatcaacaaaaagagcggcgagatcgtgcccatggaggtgaacttcaacttcgacgaccccaacctgatcatcctgcctctggcctttggcaagagacagggcagagaattcatctggaacgacctgctgtccctggaaaccggcagcctgaagctggccaacggaagagtgatcgagaagacactgtacaacagaagaacccggcaggatgagcctgccctgttcgtggccctgaccttcgagcggcgggaggtcctggactcctccaatatcaaaccaatgaacctgatcggcgtggcaagaggcgaaaacatccccgccgtgatcgccctgaccgaccccgagggctgcccactgagccggtttaaggatagcctgggaaacccaacccacatcctgagaatcggcgagagctataaggagaagcagcggaccatccaggccaagaaggaggtggagcagcggagagccggcggctacagccggaagtacgccagcaaagccaagaatctggcagacgatatggtgagaaacaccgctagagatctgctgtactacgccgtgacccaggatgccatgctgatcttcgccaacctgagccggggcttcggccggcagggcaagcggaccttcatggccgagagacagtacacacggatggaggactggctgaccgccaagctggcctacgagggcctgagcaagacctacctgtccaagacactggcccagtacacctccaagacatgcagcaactgtgggtttaccatcaccagcgccgactacgacagggtgctggagaagctgaagaagacagcaacaggctggatgaccacaattaacggcaaggagctgaaggtggagggccagattacctactacaacagatacaagagacagaacgtagtcaaggacctgtccgtcgagctggatagactgagcgaagaatctgtgaacaacgacatctcctcctggacaaagggcagaagcggagaagctctgagcctcctgaagaaaagattctcccatagacccgtgcaggagaagttcgtgtgcctgaactgcggcttcgagacacacgcagccgagcaagccgccctgaacatcgccagatcctggctgttcctgcggagccaggagtacaagaaataccagacaaacaagacaaccggcaacaccgataagagagccttcgtcgagacctggcagtccttttaccggaagaagcttaaggaggtgtggaaacctgccgtgcggtctggcggatctggcggaggctcccaggccgaggtgaccttcgaggacgtggccgtgctgttcagcagggaggagtggggcaggctgggccccgcccagaggggcctgtacagggacgtgatgctggagacctacaggaacctggtgagcctgggcgccggccccgccggccccaagcccggcgtgatcacccagctggagaggggcgacgagccctgggtgctggacgcccagggcgccgagggcaaggagaggctgagggtgagcggcggcccaagcagcggcgcccctcctcccagcggcggcagcccagccggctccccaacctctaccgaggagggcacctctgagtccgccacccccgagagcggccctggcacctccaccgagcccagcgagggcagcgcacccggcagccctgccggcagccccacctccacagaggagggaaccagcaccgagcccagcgaaggcagcgccccaggcaccagcaccgagcctagtgagcaggagattaaacggatcaacaagatcagaagaagacttgtgaaagacagcaacaccaagaaggccggcaagacaggccccatgaaaaccctgctggttagagtgatgacacccgatctgagagagcggctggaaaacctgagaaagaagcctgaaaatatcccccagcccatcagcaatacatctagagccaacctgaataagctgctgaccgattacaccgaaatgaagaaggcgatcctgcatgtgtactgggaagagttccagaaggaccctgtgggcctgatgagccgggtggcccagcctgccagcaagaagatcgatcagaacaagctgaaacctgagatggacgagaagggcaacctgaccaccgccggctttgcctgctctcagtgtggccagcccctgttcgtgtacaagctggagcaggtgtctgagaagggcaaggcttacaccaactacttcggacggtgcaatgtggccgagcacgaaaagctgatcctgctggcccagctgaagcccgagaaggatagcgacgaagccgtgacatatagcctgggaaagtttgggcagagggccctggatttctacagcattcatgtgaccaaggagtccacccaccccgtgaagcccctggcccagatcgccggaaacagatacgcctccggacctgtgggaaaggccctgagcgacgcatgtatgggcacaatcgcctccttcctgtctaagtaccaggacatcatcatcgaacaccagaaggtggtgaagggcaaccagaagagactggagagcctgcgggagctggccggcaaggaaaacctggaataccctagcgtgaccctgccacctcagcctcacaccaaggagggcgttgatgcctacaacgaagtgatcgcccgggtgcgaatgtgggtgaacctgaacctgtggcagaagctgaagctaagcagagatgatgccaagcctctgctgagactgaagggattcccttcctttcctctggtcgagagacaggccaacgaagtggactggtgggacatggtgtgtaacgtgaagaagctgatcaacgagaaaaaggaggatggcaaggtgttttggcagaatctggctggctacaagagacaggaagccctgagaccatacctgagcagcgaggaagatcggaagaagggaaagaaattcgctcggtaccagctgggcgacctgctgctgcacctggaaaagaagcacggcgaggactggggaaaggtgtacgacgaggcctgggagcggattgacaagaaagtggaaggcctgagcaagcacatcaagctggaagaggaacggagaagcgaggacgcccagagcaaggccgccctgaccgactggctgcgggctaaggccagcttcgtgatcgagggcctgaaggaggccgacaaggacgagttctgcagatgcgagctgaagctgcagaagtggtacggggacctgcggggaaagcccttcgccatcgaagccgagaacagcatcctggacatcagcggcttcagcaagcagtacaactgtgccttcatctggcagaaggacggcgtgaagaagctgaacctgtacctgatcatcaactacttcaagggcggcaagctgcggttcaagaagatcaaacctgaagccttcgaagccaacagattctacaccgtgatcaacaaaaagagcggcgagatcgtgcccatggaggtgaacttcaacttcgacgaccccaacctgatcatcctgcctctggcctttggcaagagacagggcagagaattcatctggaacgacctgctgtccctggaaaccggcagcctgaagctggccaacggaagagtgatcgagaagacactgtacaacagaagaacccggcaggatgagcctgccctgttcgtggccctgaccttcgagcggcgggaggtcctggactcctccaatatcaaaccaatgaacctgatcggcgtggcaagaggcgaaaacatccccgccgtgatcgccctgaccgaccccgagggctgcccactgagccggtttaaggatagcctgggaaacccaacccacatcctgagaatcggcgagagctataaggagaagcagcggaccatccaggccaagaaggaggtggagcagcggagagccggcggctacagccggaagtacgccagcaaagccaagaatctggcagacgatatggtgagaaacaccgctagagatctgctgtactacgccgtgacccaggatgccatgctgatcttcgccaacctgagccggggcttcggccggcagggcaagcggaccttcatggccgagagacagtacacacggatggaggactggctgaccgccaagctggcctacgagggcctgagcaagacctacctgtccaagacactggcccagtacacctccaagacatgcagcaactgtgggtttaccatcaccagcgccgactacgacagggtgctggagaagctgaagaagacagcaacaggctggatgaccacaattaacggcaaggagctgaaggtggagggccagattacctactacaacagatacaagagacagaacgtagtcaaggacctgtccgtcgagctggatagactgagcgaagaatctgtgaacaacgacatctcctcctggacaaagggcagaagcggagaagctctgagcctcctgaagaaaagattctcccatagacccgtgcaggagaagttcgtgtgcctgaactgcggcttcgagacacacgcagccgagcaagccgccctgaacatcgccagatcctggctgttcctgcggagccaggagtacaagaaataccagacaaacaagacaaccggcaacaccgataagagagccttcgtcgagacctggcagtccttttaccggaagaagcttaaggaggtgtggaaacctgccgtgcggtctggcggatctggcggaggctcctcaggccgaggtgaccttcgaggacgtggccgtgctgttcagcagggaggagtggggcaggctgggccccgcccagaggggcctgtacagggacgtgatgctggagacctacaggaacctggtgagcctgggcgccggccccgccggccccaagcccggcgtgatcacccagctggagaggggcgacgagccctgggtgctggacgcccagggcgccgagggcaaggagaggctgagggtgagcggatctggctccggcagcggccccaagaaaaagagaaaagtctaagctgccttctgcggggcttgccttctggccatgcccttcttctctcccttgcacctgtacctcttggtctttgaataaagcctgagtaggaaggctagcaaaaaaaaaaaaaaaaaaaaaaaaaaaaaaaaaaaaaaaaaaaaaaaaaaaaaaaaaaaaaaaaaaaaaaaaaaaaaaaa

SEQ ID NO: 15433 - RNA, 9485 nt, synthetic construct
  source 1..9485: mol_type = other RNA
aggaaataagagagaaaagaagagtaagaagaaatataagagccaccatggcccctaagaagaagcgtaaagtgagccggatggaacgcctcgtctacgaggtgcggcagaagtgcagaaacatcgaggacatctgcatctcctgcggatctctgaacgtgaccctggagcacccactgttcatcggcggcatgtgccagaactgtaaaaactgttttctggagtgtgcctatcaatacgacgatgacggctaccagagctactgcaccatctgttgcggcggaagagaggtgctgatgtgtggaaataacaactgctgccggtgcttctgcgtggaatgcgtggacctgctggtgggccccggcgccgcccaggccgctattaaggaagatccttggaactgctacatgtgcggccacaagggcacatacggcctgctgagacggagagaggactggcctagcagactgcagatgttcttcgccaataaccacgaccaggagttcgacccccctaaggtgtaccctcccgtccccgccgagaagagaaagcccatccgggtcctgagcctgttcgatggcatcgccaccggtctgctggtgctgaaggacctgggcatccaggtggataggtacattgcctccgaggtgtgcgaggactccatcaccgtgggaatggtgcgtcatcagggcaagatcatgtacgtgggcgacgtgcggagcgtgacacagaagcatatccaggagtggggccctttcgacctggtgatcggcggcagcccttgcaatgacctgagcatcgtgaacccagcccggaagggcctgtacgagggaaccggcagactgttcttcgagttttacagactgctgcacgacgcccggcctaaggaaggcgacgaccggcccttcttttggctgttcgagaatgtggtggccatgggagtcagcgacaagcgggatattagccggttcctggagagcaaccccgtgatgatcgatgccaaggaagtgagcgccgcccaccgggccagatacttctggggcaatctgcctggcatgaacagacccctggccagcaccgtgaacgacaagctggagctgcaggagtgcctggagcacggccggatcgccaagttcagcaaggtgagaaccatcaccacccgaagcaacagcatcaaacaaggcaaggaccagcactttcctgtgttcatgaacgagaaggaggacatcctgtggtgtaccgagatggagagagtgttcgggttcccagtccactacacagatgtcagcaacatgtctagactggccagacagagactgctgggaagaagctggtccgtccctgtgatcagacacctgttcgcccctctgaaggagtacttcgcctgcgtgagcagcggcaacagcaacgccaacagccggggccccagcttctctagcggcctggtgccactgtccctgagagggagccacatgggccccatggagatctacaaaaccgtgagcgcctggaagcggcagcctgtgcgcgtgctgagcctgtttcggaatatcgataaagtcctgaaaagcctgggattcctggagagcggctctggctccggcggtggcaccctgaagtacgtggaggatgtgacaaacgtggtcagacgggatgtggagaagtggggccccttcgatctggtgtacggcagcacccaacccctgggcagctcttgtgaccggtgccctggctggtacatgtttcagttccaccggatcctgcagtacgccctgccgagacaggagtcccagcggccattcttttggattttcatggacaacttgctgctgaccgaggatgaccaggaaactaccactcggttcctgcagaccgaagccgtgaccctgcaggacgtgagaggccgggactaccagaacgccatgcgggtgtggtccaacatccctggactgaaaagcaagcacgcacctctgacccctaaagaagaggagtacctgcaggcccaggtgcggagcagaagcaagctggacgcccctaaggtggatctgctggtgaagaattgcctcctgcccctgagagagtacttcaagtatttcagccagaatagtctgcccctgggaggcagcggcggcggcgccctggtgacatttgaggacgtcgccgtgcggttcacccaggaggaatgggctctgctggatccttctcagaaaatcctgtaccgggacgtgatgagagagacataccggaatctgacctccgtgggcatcaactgggaatgttgggaccttgaagcctgcttcagaagcctgggaagaaacctgagagtgcaggtggtgaagagaaagtgcgagctgaccaacagcggcccctgcgccgagggcggcccaagcagcggcgcccctcctcccagcggcggcagcccagccggctccccaacctctaccgaggagggcacctctgagtccgccacccccgagagcggccctggcacctccaccgagcccagcgagggcagcgcacccggcagccctgccggcagccccacctccacagaggagggaaccagcaccgagcccagcgaaggcagcgccccaggcaccagcaccgagcctagtgagcaggagattaaacggatcaacaagatcagaagaagacttgtgaaagacagcaacaccaagaaggccggcaagacaggccccatgaaaaccctgctggttagagtgatgacacccgatctgagagagcggctggaaaacctgagaaagaagcctgaaaatatcccccagcccatcagcaatacatctagagccaacctgaataagctgctgaccgattacaccgaaatgaagaaggcgatcctgcatgtgtactgggaagagttccagaaggaccctgtgggcctgatgagccgggtggcccagcctgccagcaagaagatcgatcagaacaagctgaaacctgagatggacgagaagggcaacctgaccaccgccggctttgcctgctctcagtgtggccagcccctgttcgtgtacaagctggagcaggtgtctgagaagggcaaggcttacaccaactacttcggacggtgcaatgtggccgagcacgaaaagctgatcctgctggcccagctgaagcccgagaaggatagcgacgaagccgtgacatatagcctgggaaagtttgggcagagggccctggatttctacagcattcatgtgaccaaggagtccacccaccccgtgaagcccctggcccagatcgccggaaacagatacgcctccggacctgtgggaaaggccctgagcgacgcatgtatgggcacaatcgcctccttcctgtctaagtaccaggacatcatcatcgaacaccagaaggtggtgaagggcaaccagaagagactggagagcctgcgggagctggccggcaaggaaaacctggaataccctagcgtgaccctgccacctcagcctcacaccaaggagggcgttgatgcctacaacgaagtgatcgcccgggtgcgaatgtgggtgaacctgaacctgtggcagaagctgaagctaagcagagatgatgccaagcctctgctgagactgaagggattcccttcctttcctctggtcgagagacaggccaacgaagtggactggtgggacatggtgtgtaacgtgaagaagctgatcaacgagaaaaaggaggatggcaaggtgttttggcagaatctggctggctacaagagacaggaagccctgagaccatacctgagcagcgaggaagatcggaagaagggaaagaaattcgctcggtaccagctgggcgacctgctgctgcacctggaaaagaagcacggcgaggactggggaaaggtgtacgacgaggcctgggagcggattgacaagaaagtggaaggcctgagcaagcacatcaagctggaagaggaacggagaagcgaggacgcccagagcaaggccgccctgaccgactggctgcgggctaaggccagcttcgtgatcgagggcctgaaggaggccgacaaggacgagttctgcagatgcgagctgaagctgcagaagtggtacggggacctgcggggaaagcccttcgccatcgaagccgagaacagcatcctggacatcagcggcttcagcaagcagtacaactgtgccttcatctggcagaaggacggcgtgaagaagctgaacctgtacctgatcatcaactacttcaagggcggcaagctgcggttcaagaagatcaaacctgaagccttcgaagccaacagattctacaccgtgatcaacaaaaagagcggcgagatcgtgcccatggaggtgaacttcaacttcgacgaccccaacctgatcatcctgcctctggcctttggcaagagacagggcagagaattcatctggaacgacctgctgtccctggaaaccggcagcctgaagctggccaacggaagagtgatcgagaagacactgtacaacagaagaacccggcaggatgagcctgccctgttcgtggccctgaccttcgagcggcgggaggtcctggactcctccaatatcaaaccaatgaacctgatcggcgtggcaagaggcgaaaacatccccgccgtgatcgccctgaccgaccccgagggctgcccactgagccggtttaaggatagcctgggaaacccaacccacatcctgagaatcggcgagagctataaggagaagcagcggaccatccaggccaagaaggaggtggagcagcggagagccggcggctacagccggaagtacgccagcaaagccaagaatctggcagacgatatggtgagaaacaccgctagagatctgctgtactacgccgtgacccaggatgccatgctgatcttcgccaacctgagccggggcttcggccggcagggcaagcggaccttcatggccgagagacagtacacacggatggaggactggctgaccgccaagctggcctacgagggcctgagcaagacctacctgtccaagacactggcccagtacacctccaagacatgcagcaactgtgggtttaccatcaccagcgccgactacgacagggtgctggagaagctgaagaagacagcaacaggctggatgaccacaattaacggcaaggagctgaaggtggagggccagattacctactacaacagatacaagagacagaacgtagtcaaggacctgtccgtcgagctggatagactgagcgaagaatctgtgaacaacgacatctcctcctggacaaagggcagaagcggagaagctctgagcctcctgaagaaaagattctcccatagacccgtgcaggagaagttcgtgtgcctgaactgcggcttcgagacacacgcagccgagcaagccgccctgaacatcgccagatcctggctgttcctgcggagccaggagtacaagaaataccagacaaacaagacaaccggcaacaccgataagagagccttcgtcgagacctggcagtccttttaccggaagaagcttaaggaggtgtggaaacctgccgtgcggtctggcggatctggcggaggctccagccagggccccgtgagcttcgaggacgtggccgtggacttcacccaggaggagtggcagcagctggaccccgcccagaggaccctgtacagggacgtgatgctggagaactacagccacctggtgagcgtgggctaccccgtgagcaagcccggcgtgatcagcaagctggagcagggcgaggagccctggatcatgaagagggacatcagcaactggatctaccccgacagggagaccaggggcggcccaagcagcggcgcccctcctcccagcggcggcagcccagccggctccccaacctctaccgaggagggcacctctgagtccgccacccccgagagcggccctggcacctccaccgagcccagcgagggcagcgcacccggcagccctgccggcagccccacctccacagaggagggaaccagcaccgagcccagcgaaggcagcgccccaggcaccagcaccgagcctagtgagcaggagattaaacggatcaacaagatcagaagaagacttgtgaaagacagcaacaccaagaaggccggcaagacaggccccatgaaaaccctgctggttagagtgatgacacccgatctgagagagcggctggaaaacctgagaaagaagcctgaaaatatcccccagcccatcagcaatacatctagagccaacctgaataagctgctgaccgattacaccgaaatgaagaaggcgatcctgcatgtgtactgggaagagttccagaaggaccctgtgggcctgatgagccgggtggcccagcctgccagcaagaagatcgatcagaacaagctgaaacctgagatggacgagaagggcaacctgaccaccgccggctttgcctgctctcagtgtggccagcccctgttcgtgtacaagctggagcaggtgtctgagaagggcaaggcttacaccaactacttcggacggtgcaatgtggccgagcacgaaaagctgatcctgctggcccagctgaagcccgagaaggatagcgacgaagccgtgacatatagcctgggaaagtttgggcagagggccctggatttctacagcattcatgtgaccaaggagtccacccaccccgtgaagcccctggcccagatcgccggaaacagatacgcctccggacctgtgggaaaggccctgagcgacgcatgtatgggcacaatcgcctccttcctgtctaagtaccaggacatcatcatcgaacaccagaaggtggtgaagggcaaccagaagagactggagagcctgcgggagctggccggcaaggaaaacctggaataccctagcgtgaccctgccacctcagcctcacaccaaggagggcgttgatgcctacaacgaagtgatcgcccgggtgcgaatgtgggtgaacctgaacctgtggcagaagctgaagctaagcagagatgatgccaagcctctgctgagactgaagggattcccttcctttcctctggtcgagagacaggccaacgaagtggactggtgggacatggtgtgtaacgtgaagaagctgatcaacgagaaaaaggaggatggcaaggtgttttggcagaatctggctggctacaagagacaggaagccctgagaccatacctgagcagcgaggaagatcggaagaagggaaagaaattcgctcggtaccagctgggcgacctgctgctgcacctggaaaagaagcacggcgaggactggggaaaggtgtacgacgaggcctgggagcggattgacaagaaagtggaaggcctgagcaagcacatcaagctggaagaggaacggagaagcgaggacgcccagagcaaggccgccctgaccgactggctgcgggctaaggccagcttcgtgatcgagggcctgaaggaggccgacaaggacgagttctgcagatgcgagctgaagctgcagaagtggtacggggacctgcggggaaagcccttcgccatcgaagccgagaacagcatcctggacatcagcggcttcagcaagcagtacaactgtgccttcatctggcagaaggacggcgtgaagaagctgaacctgtacctgatcatcaactacttcaagggcggcaagctgcggttcaagaagatcaaacctgaagccttcgaagccaacagattctacaccgtgatcaacaaaaagagcggcgagatcgtgcccatggaggtgaacttcaacttcgacgaccccaacctgatcatcctgcctctggcctttggcaagagacagggcagagaattcatctggaacgacctgctgtccctggaaaccggcagcctgaagctggccaacggaagagtgatcgagaagacactgtacaacagaagaacccggcaggatgagcctgccctgttcgtggccctgaccttcgagcggcgggaggtcctggactcctccaatatcaaaccaatgaacctgatcggcgtggcaagaggcgaaaacatccccgccgtgatcgccctgaccgaccccgagggctgcccactgagccggtttaaggatagcctgggaaacccaacccacatcctgagaatcggcgagagctataaggagaagcagcggaccatccaggccaagaaggaggtggagcagcggagagccggcggctacagccggaagtacgccagcaaagccaagaatctggcagacgatatggtgagaaacaccgctagagatctgctgtactacgccgtgacccaggatgccatgctgatcttcgccaacctgagccggggcttcggccggcagggcaagcggaccttcatggccgagagacagtacacacggatggaggactggctgaccgccaagctggcctacgagggcctgagcaagacctacctgtccaagacactggcccagtacacctccaagacatgcagcaactgtgggtttaccatcaccagcgccgactacgacagggtgctggagaagctgaagaagacagcaacaggctggatgaccacaattaacggcaaggagctgaaggtggagggccagattacctactacaacagatacaagagacagaacgtagtcaaggacctgtccgtcgagctggatagactgagcgaagaatctgtgaacaacgacatctcctcctggacaaagggcagaagcggagaagctctgagcctcctgaagaaaagattctcccatagacccgtgcaggagaagttcgtgtgcctgaactgcggcttcgagacacacgcagccgagcaagccgccctgaacatcgccagatcctggctgttcctgcggagccaggagtacaagaaataccagacaaacaagacaaccggcaacaccgataagagagccttcgtcgagacctggcagtccttttaccggaagaagcttaaggaggtgtggaaacctgccgtgcggtctggcggatctggcggaggctcctagccagggccccgtgagcttcgaggacgtggccgtggacttcacccaggaggagtggcagcagctggaccccgcccagaggaccctgtacagggacgtgatgctggagaactacagccacctggtgagcgtgggctaccccgtgagcaagcccggcgtgatcagcaagctggagcagggcgaggagccctggatcatgaagagggacatcagcaactggatctaccccgacagggagaccaggggatctggctccggcagcggccccaagaaaaagagaaaagtctaagctgccttctgcggggcttgccttctggccatgcccttcttctctcccttgcacctgtacctcttggtctttgaataaagcctgagtaggaaggctagcaaaaaaaaaaaaaaaaaaaaaaaaaaaaaaaaaaaaaaaaaaaaaaaaaaaaaaaaaaaaaaaaaaaaaaaaaaaaaaaa

SEQ ID NO: 15434 - RNA, 9485 nt, synthetic construct
  source 1..9485: mol_type = other RNA
aggaaataagagagaaaagaagagtaagaagaaatataagagccaccatggcccctaagaagaagcgtaaagtgagccggatggaacgcctcgtctacgaggtgcggcagaagtgcagaaacatcgaggacatctgcatctcctgcggatctctgaacgtgaccctggagcacccactgttcatcggcggcatgtgccagaactgtaaaaactgttttctggagtgtgcctatcaatacgacgatgacggctaccagagctactgcaccatctgttgcggcggaagagaggtgctgatgtgtggaaataacaactgctgccggtgcttctgcgtggaatgcgtggacctgctggtgggccccggcgccgcccaggccgctattaaggaagatccttggaactgctacatgtgcggccacaagggcacatacggcctgctgagacggagagaggactggcctagcagactgcagatgttcttcgccaataaccacgaccaggagttcgacccccctaaggtgtaccctcccgtccccgccgagaagagaaagcccatccgggtcctgagcctgttcgatggcatcgccaccggtctgctggtgctgaaggacctgggcatccaggtggataggtacattgcctccgaggtgtgcgaggactccatcaccgtgggaatggtgcgtcatcagggcaagatcatgtacgtgggcgacgtgcggagcgtgacacagaagcatatccaggagtggggccctttcgacctggtgatcggcggcagcccttgcaatgacctgagcatcgtgaacccagcccggaagggcctgtacgagggaaccggcagactgttcttcgagttttacagactgctgcacgacgcccggcctaaggaaggcgacgaccggcccttcttttggctgttcgagaatgtggtggccatgggagtcagcgacaagcgggatattagccggttcctggagagcaaccccgtgatgatcgatgccaaggaagtgagcgccgcccaccgggccagatacttctggggcaatctgcctggcatgaacagacccctggccagcaccgtgaacgacaagctggagctgcaggagtgcctggagcacggccggatcgccaagttcagcaaggtgagaaccatcaccacccgaagcaacagcatcaaacaaggcaaggaccagcactttcctgtgttcatgaacgagaaggaggacatcctgtggtgtaccgagatggagagagtgttcgggttcccagtccactacacagatgtcagcaacatgtctagactggccagacagagactgctgggaagaagctggtccgtccctgtgatcagacacctgttcgcccctctgaaggagtacttcgcctgcgtgagcagcggcaacagcaacgccaacagccggggccccagcttctctagcggcctggtgccactgtccctgagagggagccacatgggccccatggagatctacaaaaccgtgagcgcctggaagcggcagcctgtgcgcgtgctgagcctgtttcggaatatcgataaagtcctgaaaagcctgggattcctggagagcggctctggctccggcggtggcaccctgaagtacgtggaggatgtgacaaacgtggtcagacgggatgtggagaagtggggccccttcgatctggtgtacggcagcacccaacccctgggcagctcttgtgaccggtgccctggctggtacatgtttcagttccaccggatcctgcagtacgccctgccgagacaggagtcccagcggccattcttttggattttcatggacaacttgctgctgaccgaggatgaccaggaaactaccactcggttcctgcagaccgaagccgtgaccctgcaggacgtgagaggccgggactaccagaacgccatgcgggtgtggtccaacatccctggactgaaaagcaagcacgcacctctgacccctaaagaagaggagtacctgcaggcccaggtgcggagcagaagcaagctggacgcccctaaggtggatctgctggtgaagaattgcctcctgcccctgagagagtacttcaagtatttcagccagaatagtctgcccctgggaggcagcggcggcggcgccctggtgacatttgaggacgtcgccgtgcggttcacccaggaggaatgggctctgctggatccttctcagaaaatcctgtaccgggacgtgatgagagagacataccggaatctgacctccgtgggcatcaactgggaatgttgggaccttgaagcctgcttcagaagcctgggaagaaacctgagagtgcaggtggtgaagagaaagtgcgagctgaccaacagcggcccctgcgccgagggcggcccaagcagcggcgcccctcctcccagcggcggcagcccagccggctccccaacctctaccgaggagggcacctctgagtccgccacccccgagagcggccctggcacctccaccgagcccagcgagggcagcgcacccggcagccctgccggcagccccacctccacagaggagggaaccagcaccgagcccagcgaaggcagcgccccaggcaccagcaccgagcctagtgagcaggagattaaacggatcaacaagatcagaagaagacttgtgaaagacagcaacaccaagaaggccggcaagacaggccccatgaaaaccctgctggttagagtgatgacacccgatctgagagagcggctggaaaacctgagaaagaagcctgaaaatatcccccagcccatcagcaatacatctagagccaacctgaataagctgctgaccgattacaccgaaatgaagaaggcgatcctgcatgtgtactgggaagagttccagaaggaccctgtgggcctgatgagccgggtggcccagcctgccagcaagaagatcgatcagaacaagctgaaacctgagatggacgagaagggcaacctgaccaccgccggctttgcctgctctcagtgtggccagcccctgttcgtgtacaagctggagcaggtgtctgagaagggcaaggcttacaccaactacttcggacggtgcaatgtggccgagcacgaaaagctgatcctgctggcccagctgaagcccgagaaggatagcgacgaagccgtgacatatagcctgggaaagtttgggcagagggccctggatttctacagcattcatgtgaccaaggagtccacccaccccgtgaagcccctggcccagatcgccggaaacagatacgcctccggacctgtgggaaaggccctgagcgacgcatgtatgggcacaatcgcctccttcctgtctaagtaccaggacatcatcatcgaacaccagaaggtggtgaagggcaaccagaagagactggagagcctgcgggagctggccggcaaggaaaacctggaataccctagcgtgaccctgccacctcagcctcacaccaaggagggcgttgatgcctacaacgaagtgatcgcccgggtgcgaatgtgggtgaacctgaacctgtggcagaagctgaagctaagcagagatgatgccaagcctctgctgagactgaagggattcccttcctttcctctggtcgagagacaggccaacgaagtggactggtgggacatggtgtgtaacgtgaagaagctgatcaacgagaaaaaggaggatggcaaggtgttttggcagaatctggctggctacaagagacaggaagccctgagaccatacctgagcagcgaggaagatcggaagaagggaaagaaattcgctcggtaccagctgggcgacctgctgctgcacctggaaaagaagcacggcgaggactggggaaaggtgtacgacgaggcctgggagcggattgacaagaaagtggaaggcctgagcaagcacatcaagctggaagaggaacggagaagcgaggacgcccagagcaaggccgccctgaccgactggctgcgggctaaggccagcttcgtgatcgagggcctgaaggaggccgacaaggacgagttctgcagatgcgagctgaagctgcagaagtggtacggggacctgcggggaaagcccttcgccatcgaagccgagaacagcatcctggacatcagcggcttcagcaagcagtacaactgtgccttcatctggcagaaggacggcgtgaagaagctgaacctgtacctgatcatcaactacttcaagggcggcaagctgcggttcaagaagatcaaacctgaagccttcgaagccaacagattctacaccgtgatcaacaaaaagagcggcgagatcgtgcccatggaggtgaacttcaacttcgacgaccccaacctgatcatcctgcctctggcctttggcaagagacagggcagagaattcatctggaacgacctgctgtccctggaaaccggcagcctgaagctggccaacggaagagtgatcgagaagacactgtacaacagaagaacccggcaggatgagcctgccctgttcgtggccctgaccttcgagcggcgggaggtcctggactcctccaatatcaaaccaatgaacctgatcggcgtggcaagaggcgaaaacatccccgccgtgatcgccctgaccgaccccgagggctgcccactgagccggtttaaggatagcctgggaaacccaacccacatcctgagaatcggcgagagctataaggagaagcagcggaccatccaggccaagaaggaggtggagcagcggagagccggcggctacagccggaagtacgccagcaaagccaagaatctggcagacgatatggtgagaaacaccgctagagatctgctgtactacgccgtgacccaggatgccatgctgatcttcgccaacctgagccggggcttcggccggcagggcaagcggaccttcatggccgagagacagtacacacggatggaggactggctgaccgccaagctggcctacgagggcctgagcaagacctacctgtccaagacactggcccagtacacctccaagacatgcagcaactgtgggtttaccatcaccagcgccgactacgacagggtgctggagaagctgaagaagacagcaacaggctggatgaccacaattaacggcaaggagctgaaggtggagggccagattacctactacaacagatacaagagacagaacgtagtcaaggacctgtccgtcgagctggatagactgagcgaagaatctgtgaacaacgacatctcctcctggacaaagggcagaagcggagaagctctgagcctcctgaagaaaagattctcccatagacccgtgcaggagaagttcgtgtgcctgaactgcggcttcgagacacacgcagccgagcaagccgccctgaacatcgccagatcctggctgttcctgcggagccaggagtacaagaaataccagacaaacaagacaaccggcaacaccgataagagagccttcgtcgagacctggcagtccttttaccggaagaagcttaaggaggtgtggaaacctgccgtgcggtctggcggatctggcggaggctccagccagggcctggtgaccttcggcgacgtggccatcgacttcagccaggaggagtgggagtggctgagccccatccagaggaacctgtacaggaaggtgatgctggagaactacaggaacctggccagcctgggcctgtgcgtgagcaagcccgacgtgatcagcctgctggagcagggcaaggagccctggaccgtgaagaggaagatgaccagggccggctgccccgacctgaaggccgtgggcggcccaagcagcggcgcccctcctcccagcggcggcagcccagccggctccccaacctctaccgaggagggcacctctgagtccgccacccccgagagcggccctggcacctccaccgagcccagcgagggcagcgcacccggcagccctgccggcagccccacctccacagaggagggaaccagcaccgagcccagcgaaggcagcgccccaggcaccagcaccgagcctagtgagcaggagattaaacggatcaacaagatcagaagaagacttgtgaaagacagcaacaccaagaaggccggcaagacaggccccatgaaaaccctgctggttagagtgatgacacccgatctgagagagcggctggaaaacctgagaaagaagcctgaaaatatcccccagcccatcagcaatacatctagagccaacctgaataagctgctgaccgattacaccgaaatgaagaaggcgatcctgcatgtgtactgggaagagttccagaaggaccctgtgggcctgatgagccgggtggcccagcctgccagcaagaagatcgatcagaacaagctgaaacctgagatggacgagaagggcaacctgaccaccgccggctttgcctgctctcagtgtggccagcccctgttcgtgtacaagctggagcaggtgtctgagaagggcaaggcttacaccaactacttcggacggtgcaatgtggccgagcacgaaaagctgatcctgctggcccagctgaagcccgagaaggatagcgacgaagccgtgacatatagcctgggaaagtttgggcagagggccctggatttctacagcattcatgtgaccaaggagtccacccaccccgtgaagcccctggcccagatcgccggaaacagatacgcctccggacctgtgggaaaggccctgagcgacgcatgtatgggcacaatcgcctccttcctgtctaagtaccaggacatcatcatcgaacaccagaaggtggtgaagggcaaccagaagagactggagagcctgcgggagctggccggcaaggaaaacctggaataccctagcgtgaccctgccacctcagcctcacaccaaggagggcgttgatgcctacaacgaagtgatcgcccgggtgcgaatgtgggtgaacctgaacctgtggcagaagctgaagctaagcagagatgatgccaagcctctgctgagactgaagggattcccttcctttcctctggtcgagagacaggccaacgaagtggactggtgggacatggtgtgtaacgtgaagaagctgatcaacgagaaaaaggaggatggcaaggtgttttggcagaatctggctggctacaagagacaggaagccctgagaccatacctgagcagcgaggaagatcggaagaagggaaagaaattcgctcggtaccagctgggcgacctgctgctgcacctggaaaagaagcacggcgaggactggggaaaggtgtacgacgaggcctgggagcggattgacaagaaagtggaaggcctgagcaagcacatcaagctggaagaggaacggagaagcgaggacgcccagagcaaggccgccctgaccgactggctgcgggctaaggccagcttcgtgatcgagggcctgaaggaggccgacaaggacgagttctgcagatgcgagctgaagctgcagaagtggtacggggacctgcggggaaagcccttcgccatcgaagccgagaacagcatcctggacatcagcggcttcagcaagcagtacaactgtgccttcatctggcagaaggacggcgtgaagaagctgaacctgtacctgatcatcaactacttcaagggcggcaagctgcggttcaagaagatcaaacctgaagccttcgaagccaacagattctacaccgtgatcaacaaaaagagcggcgagatcgtgcccatggaggtgaacttcaacttcgacgaccccaacctgatcatcctgcctctggcctttggcaagagacagggcagagaattcatctggaacgacctgctgtccctggaaaccggcagcctgaagctggccaacggaagagtgatcgagaagacactgtacaacagaagaacccggcaggatgagcctgccctgttcgtggccctgaccttcgagcggcgggaggtcctggactcctccaatatcaaaccaatgaacctgatcggcgtggcaagaggcgaaaacatccccgccgtgatcgccctgaccgaccccgagggctgcccactgagccggtttaaggatagcctgggaaacccaacccacatcctgagaatcggcgagagctataaggagaagcagcggaccatccaggccaagaaggaggtggagcagcggagagccggcggctacagccggaagtacgccagcaaagccaagaatctggcagacgatatggtgagaaacaccgctagagatctgctgtactacgccgtgacccaggatgccatgctgatcttcgccaacctgagccggggcttcggccggcagggcaagcggaccttcatggccgagagacagtacacacggatggaggactggctgaccgccaagctggcctacgagggcctgagcaagacctacctgtccaagacactggcccagtacacctccaagacatgcagcaactgtgggtttaccatcaccagcgccgactacgacagggtgctggagaagctgaagaagacagcaacaggctggatgaccacaattaacggcaaggagctgaaggtggagggccagattacctactacaacagatacaagagacagaacgtagtcaaggacctgtccgtcgagctggatagactgagcgaagaatctgtgaacaacgacatctcctcctggacaaagggcagaagcggagaagctctgagcctcctgaagaaaagattctcccatagacccgtgcaggagaagttcgtgtgcctgaactgcggcttcgagacacacgcagccgagcaagccgccctgaacatcgccagatcctggctgttcctgcggagccaggagtacaagaaataccagacaaacaagacaaccggcaacaccgataagagagccttcgtcgagacctggcagtccttttaccggaagaagcttaaggaggtgtggaaacctgccgtgcggtctggcggatctggcggaggctcctagccagggcctggtgaccttcggcgacgtggccatcgacttcagccaggaggagtgggagtggctgagccccatccagaggaacctgtacaggaaggtgatgctggagaactacaggaacctggccagcctgggcctgtgcgtgagcaagcccgacgtgatcagcctgctggagcagggcaaggagccctggaccgtgaagaggaagatgaccagggccggctgccccgacctgaaggccgtgggatctggctccggcagcggccccaagaaaaagagaaaagtctaagctgccttctgcggggcttgccttctggccatgcccttcttctctcccttgcacctgtacctcttggtctttgaataaagcctgagtaggaaggctagcaaaaaaaaaaaaaaaaaaaaaaaaaaaaaaaaaaaaaaaaaaaaaaaaaaaaaaaaaaaaaaaaaaaaaaaaaaaaaaaa

SEQ ID NO: 15435 - RNA, 9485 nt, synthetic construct
  source 1..9485: mol_type = other RNA
aggaaataagagagaaaagaagagtaagaagaaatataagagccaccatggcccctaagaagaagcgtaaagtgagccggatggaacgcctcgtctacgaggtgcggcagaagtgcagaaacatcgaggacatctgcatctcctgcggatctctgaacgtgaccctggagcacccactgttcatcggcggcatgtgccagaactgtaaaaactgttttctggagtgtgcctatcaatacgacgatgacggctaccagagctactgcaccatctgttgcggcggaagagaggtgctgatgtgtggaaataacaactgctgccggtgcttctgcgtggaatgcgtggacctgctggtgggccccggcgccgcccaggccgctattaaggaagatccttggaactgctacatgtgcggccacaagggcacatacggcctgctgagacggagagaggactggcctagcagactgcagatgttcttcgccaataaccacgaccaggagttcgacccccctaaggtgtaccctcccgtccccgccgagaagagaaagcccatccgggtcctgagcctgttcgatggcatcgccaccggtctgctggtgctgaaggacctgggcatccaggtggataggtacattgcctccgaggtgtgcgaggactccatcaccgtgggaatggtgcgtcatcagggcaagatcatgtacgtgggcgacgtgcggagcgtgacacagaagcatatccaggagtggggccctttcgacctggtgatcggcggcagcccttgcaatgacctgagcatcgtgaacccagcccggaagggcctgtacgagggaaccggcagactgttcttcgagttttacagactgctgcacgacgcccggcctaaggaaggcgacgaccggcccttcttttggctgttcgagaatgtggtggccatgggagtcagcgacaagcgggatattagccggttcctggagagcaaccccgtgatgatcgatgccaaggaagtgagcgccgcccaccgggccagatacttctggggcaatctgcctggcatgaacagacccctggccagcaccgtgaacgacaagctggagctgcaggagtgcctggagcacggccggatcgccaagttcagcaaggtgagaaccatcaccacccgaagcaacagcatcaaacaaggcaaggaccagcactttcctgtgttcatgaacgagaaggaggacatcctgtggtgtaccgagatggagagagtgttcgggttcccagtccactacacagatgtcagcaacatgtctagactggccagacagagactgctgggaagaagctggtccgtccctgtgatcagacacctgttcgcccctctgaaggagtacttcgcctgcgtgagcagcggcaacagcaacgccaacagccggggccccagcttctctagcggcctggtgccactgtccctgagagggagccacatgggccccatggagatctacaaaaccgtgagcgcctggaagcggcagcctgtgcgcgtgctgagcctgtttcggaatatcgataaagtcctgaaaagcctgggattcctggagagcggctctggctccggcggtggcaccctgaagtacgtggaggatgtgacaaacgtggtcagacgggatgtggagaagtggggccccttcgatctggtgtacggcagcacccaacccctgggcagctcttgtgaccggtgccctggctggtacatgtttcagttccaccggatcctgcagtacgccctgccgagacaggagtcccagcggccattcttttggattttcatggacaacttgctgctgaccgaggatgaccaggaaactaccactcggttcctgcagaccgaagccgtgaccctgcaggacgtgagaggccgggactaccagaacgccatgcgggtgtggtccaacatccctggactgaaaagcaagcacgcacctctgacccctaaagaagaggagtacctgcaggcccaggtgcggagcagaagcaagctggacgcccctaaggtggatctgctggtgaagaattgcctcctgcccctgagagagtacttcaagtatttcagccagaatagtctgcccctgggaggcagcggcggcggcgccctggtgacatttgaggacgtcgccgtgcggttcacccaggaggaatgggctctgctggatccttctcagaaaatcctgtaccgggacgtgatgagagagacataccggaatctgacctccgtgggcatcaactgggaatgttgggaccttgaagcctgcttcagaagcctgggaagaaacctgagagtgcaggtggtgaagagaaagtgcgagctgaccaacagcggcccctgcgccgagggcggcccaagcagcggcgcccctcctcccagcggcggcagcccagccggctccccaacctctaccgaggagggcacctctgagtccgccacccccgagagcggccctggcacctccaccgagcccagcgagggcagcgcacccggcagccctgccggcagccccacctccacagaggagggaaccagcaccgagcccagcgaaggcagcgccccaggcaccagcaccgagcctagtgagcaggagattaaacggatcaacaagatcagaagaagacttgtgaaagacagcaacaccaagaaggccggcaagacaggccccatgaaaaccctgctggttagagtgatgacacccgatctgagagagcggctggaaaacctgagaaagaagcctgaaaatatcccccagcccatcagcaatacatctagagccaacctgaataagctgctgaccgattacaccgaaatgaagaaggcgatcctgcatgtgtactgggaagagttccagaaggaccctgtgggcctgatgagccgggtggcccagcctgccagcaagaagatcgatcagaacaagctgaaacctgagatggacgagaagggcaacctgaccaccgccggctttgcctgctctcagtgtggccagcccctgttcgtgtacaagctggagcaggtgtctgagaagggcaaggcttacaccaactacttcggacggtgcaatgtggccgagcacgaaaagctgatcctgctggcccagctgaagcccgagaaggatagcgacgaagccgtgacatatagcctgggaaagtttgggcagagggccctggatttctacagcattcatgtgaccaaggagtccacccaccccgtgaagcccctggcccagatcgccggaaacagatacgcctccggacctgtgggaaaggccctgagcgacgcatgtatgggcacaatcgcctccttcctgtctaagtaccaggacatcatcatcgaacaccagaaggtggtgaagggcaaccagaagagactggagagcctgcgggagctggccggcaaggaaaacctggaataccctagcgtgaccctgccacctcagcctcacaccaaggagggcgttgatgcctacaacgaagtgatcgcccgggtgcgaatgtgggtgaacctgaacctgtggcagaagctgaagctaagcagagatgatgccaagcctctgctgagactgaagggattcccttcctttcctctggtcgagagacaggccaacgaagtggactggtgggacatggtgtgtaacgtgaagaagctgatcaacgagaaaaaggaggatggcaaggtgttttggcagaatctggctggctacaagagacaggaagccctgagaccatacctgagcagcgaggaagatcggaagaagggaaagaaattcgctcggtaccagctgggcgacctgctgctgcacctggaaaagaagcacggcgaggactggggaaaggtgtacgacgaggcctgggagcggattgacaagaaagtggaaggcctgagcaagcacatcaagctggaagaggaacggagaagcgaggacgcccagagcaaggccgccctgaccgactggctgcgggctaaggccagcttcgtgatcgagggcctgaaggaggccgacaaggacgagttctgcagatgcgagctgaagctgcagaagtggtacggggacctgcggggaaagcccttcgccatcgaagccgagaacagcatcctggacatcagcggcttcagcaagcagtacaactgtgccttcatctggcagaaggacggcgtgaagaagctgaacctgtacctgatcatcaactacttcaagggcggcaagctgcggttcaagaagatcaaacctgaagccttcgaagccaacagattctacaccgtgatcaacaaaaagagcggcgagatcgtgcccatggaggtgaacttcaacttcgacgaccccaacctgatcatcctgcctctggcctttggcaagagacagggcagagaattcatctggaacgacctgctgtccctggaaaccggcagcctgaagctggccaacggaagagtgatcgagaagacactgtacaacagaagaacccggcaggatgagcctgccctgttcgtggccctgaccttcgagcggcgggaggtcctggactcctccaatatcaaaccaatgaacctgatcggcgtggcaagaggcgaaaacatccccgccgtgatcgccctgaccgaccccgagggctgcccactgagccggtttaaggatagcctgggaaacccaacccacatcctgagaatcggcgagagctataaggagaagcagcggaccatccaggccaagaaggaggtggagcagcggagagccggcggctacagccggaagtacgccagcaaagccaagaatctggcagacgatatggtgagaaacaccgctagagatctgctgtactacgccgtgacccaggatgccatgctgatcttcgccaacctgagccggggcttcggccggcagggcaagcggaccttcatggccgagagacagtacacacggatggaggactggctgaccgccaagctggcctacgagggcctgagcaagacctacctgtccaagacactggcccagtacacctccaagacatgcagcaactgtgggtttaccatcaccagcgccgactacgacagggtgctggagaagctgaagaagacagcaacaggctggatgaccacaattaacggcaaggagctgaaggtggagggccagattacctactacaacagatacaagagacagaacgtagtcaaggacctgtccgtcgagctggatagactgagcgaagaatctgtgaacaacgacatctcctcctggacaaagggcagaagcggagaagctctgagcctcctgaagaaaagattctcccatagacccgtgcaggagaagttcgtgtgcctgaactgcggcttcgagacacacgcagccgagcaagccgccctgaacatcgccagatcctggctgttcctgcggagccaggagtacaagaaataccagacaaacaagacaaccggcaacaccgataagagagccttcgtcgagacctggcagtccttttaccggaagaagcttaaggaggtgtggaaacctgccgtgcggtctggcggatctggcggaggctccagccaggagctgctgaccttcaaggacatcagcgtggacttcacccaggaggagtggggccagctggcccccgcccacaggaacctgtacagggaggtgatgctggagaactacggcaacctggtgagcgtggccggctgccagctgagcaagcccagcgtgatcagccagctggagaagggcgaggagccctggatgaccgagaaggagggccccggcgaccccagcagcgacctgaagagcggcggcccaagcagcggcgcccctcctcccagcggcggcagcccagccggctccccaacctctaccgaggagggcacctctgagtccgccacccccgagagcggccctggcacctccaccgagcccagcgagggcagcgcacccggcagccctgccggcagccccacctccacagaggagggaaccagcaccgagcccagcgaaggcagcgccccaggcaccagcaccgagcctagtgagcaggagattaaacggatcaacaagatcagaagaagacttgtgaaagacagcaacaccaagaaggccggcaagacaggccccatgaaaaccctgctggttagagtgatgacacccgatctgagagagcggctggaaaacctgagaaagaagcctgaaaatatcccccagcccatcagcaatacatctagagccaacctgaataagctgctgaccgattacaccgaaatgaagaaggcgatcctgcatgtgtactgggaagagttccagaaggaccctgtgggcctgatgagccgggtggcccagcctgccagcaagaagatcgatcagaacaagctgaaacctgagatggacgagaagggcaacctgaccaccgccggctttgcctgctctcagtgtggccagcccctgttcgtgtacaagctggagcaggtgtctgagaagggcaaggcttacaccaactacttcggacggtgcaatgtggccgagcacgaaaagctgatcctgctggcccagctgaagcccgagaaggatagcgacgaagccgtgacatatagcctgggaaagtttgggcagagggccctggatttctacagcattcatgtgaccaaggagtccacccaccccgtgaagcccctggcccagatcgccggaaacagatacgcctccggacctgtgggaaaggccctgagcgacgcatgtatgggcacaatcgcctccttcctgtctaagtaccaggacatcatcatcgaacaccagaaggtggtgaagggcaaccagaagagactggagagcctgcgggagctggccggcaaggaaaacctggaataccctagcgtgaccctgccacctcagcctcacaccaaggagggcgttgatgcctacaacgaagtgatcgcccgggtgcgaatgtgggtgaacctgaacctgtggcagaagctgaagctaagcagagatgatgccaagcctctgctgagactgaagggattcccttcctttcctctggtcgagagacaggccaacgaagtggactggtgggacatggtgtgtaacgtgaagaagctgatcaacgagaaaaaggaggatggcaaggtgttttggcagaatctggctggctacaagagacaggaagccctgagaccatacctgagcagcgaggaagatcggaagaagggaaagaaattcgctcggtaccagctgggcgacctgctgctgcacctggaaaagaagcacggcgaggactggggaaaggtgtacgacgaggcctgggagcggattgacaagaaagtggaaggcctgagcaagcacatcaagctggaagaggaacggagaagcgaggacgcccagagcaaggccgccctgaccgactggctgcgggctaaggccagcttcgtgatcgagggcctgaaggaggccgacaaggacgagttctgcagatgcgagctgaagctgcagaagtggtacggggacctgcggggaaagcccttcgccatcgaagccgagaacagcatcctggacatcagcggcttcagcaagcagtacaactgtgccttcatctggcagaaggacggcgtgaagaagctgaacctgtacctgatcatcaactacttcaagggcggcaagctgcggttcaagaagatcaaacctgaagccttcgaagccaacagattctacaccgtgatcaacaaaaagagcggcgagatcgtgcccatggaggtgaacttcaacttcgacgaccccaacctgatcatcctgcctctggcctttggcaagagacagggcagagaattcatctggaacgacctgctgtccctggaaaccggcagcctgaagctggccaacggaagagtgatcgagaagacactgtacaacagaagaacccggcaggatgagcctgccctgttcgtggccctgaccttcgagcggcgggaggtcctggactcctccaatatcaaaccaatgaacctgatcggcgtggcaagaggcgaaaacatccccgccgtgatcgccctgaccgaccccgagggctgcccactgagccggtttaaggatagcctgggaaacccaacccacatcctgagaatcggcgagagctataaggagaagcagcggaccatccaggccaagaaggaggtggagcagcggagagccggcggctacagccggaagtacgccagcaaagccaagaatctggcagacgatatggtgagaaacaccgctagagatctgctgtactacgccgtgacccaggatgccatgctgatcttcgccaacctgagccggggcttcggccggcagggcaagcggaccttcatggccgagagacagtacacacggatggaggactggctgaccgccaagctggcctacgagggcctgagcaagacctacctgtccaagacactggcccagtacacctccaagacatgcagcaactgtgggtttaccatcaccagcgccgactacgacagggtgctggagaagctgaagaagacagcaacaggctggatgaccacaattaacggcaaggagctgaaggtggagggccagattacctactacaacagatacaagagacagaacgtagtcaaggacctgtccgtcgagctggatagactgagcgaagaatctgtgaacaacgacatctcctcctggacaaagggcagaagcggagaagctctgagcctcctgaagaaaagattctcccatagacccgtgcaggagaagttcgtgtgcctgaactgcggcttcgagacacacgcagccgagcaagccgccctgaacatcgccagatcctggctgttcctgcggagccaggagtacaagaaataccagacaaacaagacaaccggcaacaccgataagagagccttcgtcgagacctggcagtccttttaccggaagaagcttaaggaggtgtggaaacctgccgtgcggtctggcggatctggcggaggctcctagccaggagctgctgaccttcaaggacatcagcgtggacttcacccaggaggagtggggccagctggcccccgcccacaggaacctgtacagggaggtgatgctggagaactacggcaacctggtgagcgtggccggctgccagctgagcaagcccagcgtgatcagccagctggagaagggcgaggagccctggatgaccgagaaggagggccccggcgaccccagcagcgacctgaagagcggatctggctccggcagcggccccaagaaaaagagaaaagtctaagctgccttctgcggggcttgccttctggccatgcccttcttctctcccttgcacctgtacctcttggtctttgaataaagcctgagtaggaaggctagcaaaaaaaaaaaaaaaaaaaaaaaaaaaaaaaaaaaaaaaaaaaaaaaaaaaaaaaaaaaaaaaaaaaaaaaaaaaaaaaa

SEQ ID NO: 15436 - RNA, 9485 nt, synthetic construct
  source 1..9485: mol_type = other RNA
aggaaataagagagaaaagaagagtaagaagaaatataagagccaccatggcccctaagaagaagcgtaaagtgagccggatggaacgcctcgtctacgaggtgcggcagaagtgcagaaacatcgaggacatctgcatctcctgcggatctctgaacgtgaccctggagcacccactgttcatcggcggcatgtgccagaactgtaaaaactgttttctggagtgtgcctatcaatacgacgatgacggctaccagagctactgcaccatctgttgcggcggaagagaggtgctgatgtgtggaaataacaactgctgccggtgcttctgcgtggaatgcgtggacctgctggtgggccccggcgccgcccaggccgctattaaggaagatccttggaactgctacatgtgcggccacaagggcacatacggcctgctgagacggagagaggactggcctagcagactgcagatgttcttcgccaataaccacgaccaggagttcgacccccctaaggtgtaccctcccgtccccgccgagaagagaaagcccatccgggtcctgagcctgttcgatggcatcgccaccggtctgctggtgctgaaggacctgggcatccaggtggataggtacattgcctccgaggtgtgcgaggactccatcaccgtgggaatggtgcgtcatcagggcaagatcatgtacgtgggcgacgtgcggagcgtgacacagaagcatatccaggagtggggccctttcgacctggtgatcggcggcagcccttgcaatgacctgagcatcgtgaacccagcccggaagggcctgtacgagggaaccggcagactgttcttcgagttttacagactgctgcacgacgcccggcctaaggaaggcgacgaccggcccttcttttggctgttcgagaatgtggtggccatgggagtcagcgacaagcgggatattagccggttcctggagagcaaccccgtgatgatcgatgccaaggaagtgagcgccgcccaccgggccagatacttctggggcaatctgcctggcatgaacagacccctggccagcaccgtgaacgacaagctggagctgcaggagtgcctggagcacggccggatcgccaagttcagcaaggtgagaaccatcaccacccgaagcaacagcatcaaacaaggcaaggaccagcactttcctgtgttcatgaacgagaaggaggacatcctgtggtgtaccgagatggagagagtgttcgggttcccagtccactacacagatgtcagcaacatgtctagactggccagacagagactgctgggaagaagctggtccgtccctgtgatcagacacctgttcgcccctctgaaggagtacttcgcctgcgtgagcagcggcaacagcaacgccaacagccggggccccagcttctctagcggcctggtgccactgtccctgagagggagccacatgggccccatggagatctacaaaaccgtgagcgcctggaagcggcagcctgtgcgcgtgctgagcctgtttcggaatatcgataaagtcctgaaaagcctgggattcctggagagcggctctggctccggcggtggcaccctgaagtacgtggaggatgtgacaaacgtggtcagacgggatgtggagaagtggggccccttcgatctggtgtacggcagcacccaacccctgggcagctcttgtgaccggtgccctggctggtacatgtttcagttccaccggatcctgcagtacgccctgccgagacaggagtcccagcggccattcttttggattttcatggacaacttgctgctgaccgaggatgaccaggaaactaccactcggttcctgcagaccgaagccgtgaccctgcaggacgtgagaggccgggactaccagaacgccatgcgggtgtggtccaacatccctggactgaaaagcaagcacgcacctctgacccctaaagaagaggagtacctgcaggcccaggtgcggagcagaagcaagctggacgcccctaaggtggatctgctggtgaagaattgcctcctgcccctgagagagtacttcaagtatttcagccagaatagtctgcccctgggaggcagcggcggcggcgccctggtgacatttgaggacgtcgccgtgcggttcacccaggaggaatgggctctgctggatccttctcagaaaatcctgtaccgggacgtgatgagagagacataccggaatctgacctccgtgggcatcaactgggaatgttgggaccttgaagcctgcttcagaagcctgggaagaaacctgagagtgcaggtggtgaagagaaagtgcgagctgaccaacagcggcccctgcgccgagggcggcccaagcagcggcgcccctcctcccagcggcggcagcccagccggctccccaacctctaccgaggagggcacctctgagtccgccacccccgagagcggccctggcacctccaccgagcccagcgagggcagcgcacccggcagccctgccggcagccccacctccacagaggagggaaccagcaccgagcccagcgaaggcagcgccccaggcaccagcaccgagcctagtgagcaggagattaaacggatcaacaagatcagaagaagacttgtgaaagacagcaacaccaagaaggccggcaagacaggccccatgaaaaccctgctggttagagtgatgacacccgatctgagagagcggctggaaaacctgagaaagaagcctgaaaatatcccccagcccatcagcaatacatctagagccaacctgaataagctgctgaccgattacaccgaaatgaagaaggcgatcctgcatgtgtactgggaagagttccagaaggaccctgtgggcctgatgagccgggtggcccagcctgccagcaagaagatcgatcagaacaagctgaaacctgagatggacgagaagggcaacctgaccaccgccggctttgcctgctctcagtgtggccagcccctgttcgtgtacaagctggagcaggtgtctgagaagggcaaggcttacaccaactacttcggacggtgcaatgtggccgagcacgaaaagctgatcctgctggcccagctgaagcccgagaaggatagcgacgaagccgtgacatatagcctgggaaagtttgggcagagggccctggatttctacagcattcatgtgaccaaggagtccacccaccccgtgaagcccctggcccagatcgccggaaacagatacgcctccggacctgtgggaaaggccctgagcgacgcatgtatgggcacaatcgcctccttcctgtctaagtaccaggacatcatcatcgaacaccagaaggtggtgaagggcaaccagaagagactggagagcctgcgggagctggccggcaaggaaaacctggaataccctagcgtgaccctgccacctcagcctcacaccaaggagggcgttgatgcctacaacgaagtgatcgcccgggtgcgaatgtgggtgaacctgaacctgtggcagaagctgaagctaagcagagatgatgccaagcctctgctgagactgaagggattcccttcctttcctctggtcgagagacaggccaacgaagtggactggtgggacatggtgtgtaacgtgaagaagctgatcaacgagaaaaaggaggatggcaaggtgttttggcagaatctggctggctacaagagacaggaagccctgagaccatacctgagcagcgaggaagatcggaagaagggaaagaaattcgctcggtaccagctgggcgacctgctgctgcacctggaaaagaagcacggcgaggactggggaaaggtgtacgacgaggcctgggagcggattgacaagaaagtggaaggcctgagcaagcacatcaagctggaagaggaacggagaagcgaggacgcccagagcaaggccgccctgaccgactggctgcgggctaaggccagcttcgtgatcgagggcctgaaggaggccgacaaggacgagttctgcagatgcgagctgaagctgcagaagtggtacggggacctgcggggaaagcccttcgccatcgaagccgagaacagcatcctggacatcagcggcttcagcaagcagtacaactgtgccttcatctggcagaaggacggcgtgaagaagctgaacctgtacctgatcatcaactacttcaagggcggcaagctgcggttcaagaagatcaaacctgaagccttcgaagccaacagattctacaccgtgatcaacaaaaagagcggcgagatcgtgcccatggaggtgaacttcaacttcgacgaccccaacctgatcatcctgcctctggcctttggcaagagacagggcagagaattcatctggaacgacctgctgtccctggaaaccggcagcctgaagctggccaacggaagagtgatcgagaagacactgtacaacagaagaacccggcaggatgagcctgccctgttcgtggccctgaccttcgagcggcgggaggtcctggactcctccaatatcaaaccaatgaacctgatcggcgtggcaagaggcgaaaacatccccgccgtgatcgccctgaccgaccccgagggctgcccactgagccggtttaaggatagcctgggaaacccaacccacatcctgagaatcggcgagagctataaggagaagcagcggaccatccaggccaagaaggaggtggagcagcggagagccggcggctacagccggaagtacgccagcaaagccaagaatctggcagacgatatggtgagaaacaccgctagagatctgctgtactacgccgtgacccaggatgccatgctgatcttcgccaacctgagccggggcttcggccggcagggcaagcggaccttcatggccgagagacagtacacacggatggaggactggctgaccgccaagctggcctacgagggcctgagcaagacctacctgtccaagacactggcccagtacacctccaagacatgcagcaactgtgggtttaccatcaccagcgccgactacgacagggtgctggagaagctgaagaagacagcaacaggctggatgaccacaattaacggcaaggagctgaaggtggagggccagattacctactacaacagatacaagagacagaacgtagtcaaggacctgtccgtcgagctggatagactgagcgaagaatctgtgaacaacgacatctcctcctggacaaagggcagaagcggagaagctctgagcctcctgaagaaaagattctcccatagacccgtgcaggagaagttcgtgtgcctgaactgcggcttcgagacacacgcagccgagcaagccgccctgaacatcgccagatcctggctgttcctgcggagccaggagtacaagaaataccagacaaacaagacaaccggcaacaccgataagagagccttcgtcgagacctggcagtccttttaccggaagaagcttaaggaggtgtggaaacctgccgtgcggtctggcggatctggcggaggctccatgcccggcccccccggcagcctggagatggaccccctgaccttcagggacgtggccatcgagttcagcctggaggagtggcagtgcctggacaccgcccagcagaacctgtacaggaacgtgatgctggagaactacaagaacctggccttcctgggcatcgccgtgagcaagcccgacctgatcaccaggctggagaaggagaaggagccctggaagatgaagaggcacaggatggtggacggcggcccaagcagcggcgcccctcctcccagcggcggcagcccagccggctccccaacctctaccgaggagggcacctctgagtccgccacccccgagagcggccctggcacctccaccgagcccagcgagggcagcgcacccggcagccctgccggcagccccacctccacagaggagggaaccagcaccgagcccagcgaaggcagcgccccaggcaccagcaccgagcctagtgagcaggagattaaacggatcaacaagatcagaagaagacttgtgaaagacagcaacaccaagaaggccggcaagacaggccccatgaaaaccctgctggttagagtgatgacacccgatctgagagagcggctggaaaacctgagaaagaagcctgaaaatatcccccagcccatcagcaatacatctagagccaacctgaataagctgctgaccgattacaccgaaatgaagaaggcgatcctgcatgtgtactgggaagagttccagaaggaccctgtgggcctgatgagccgggtggcccagcctgccagcaagaagatcgatcagaacaagctgaaacctgagatggacgagaagggcaacctgaccaccgccggctttgcctgctctcagtgtggccagcccctgttcgtgtacaagctggagcaggtgtctgagaagggcaaggcttacaccaactacttcggacggtgcaatgtggccgagcacgaaaagctgatcctgctggcccagctgaagcccgagaaggatagcgacgaagccgtgacatatagcctgggaaagtttgggcagagggccctggatttctacagcattcatgtgaccaaggagtccacccaccccgtgaagcccctggcccagatcgccggaaacagatacgcctccggacctgtgggaaaggccctgagcgacgcatgtatgggcacaatcgcctccttcctgtctaagtaccaggacatcatcatcgaacaccagaaggtggtgaagggcaaccagaagagactggagagcctgcgggagctggccggcaaggaaaacctggaataccctagcgtgaccctgccacctcagcctcacaccaaggagggcgttgatgcctacaacgaagtgatcgcccgggtgcgaatgtgggtgaacctgaacctgtggcagaagctgaagctaagcagagatgatgccaagcctctgctgagactgaagggattcccttcctttcctctggtcgagagacaggccaacgaagtggactggtgggacatggtgtgtaacgtgaagaagctgatcaacgagaaaaaggaggatggcaaggtgttttggcagaatctggctggctacaagagacaggaagccctgagaccatacctgagcagcgaggaagatcggaagaagggaaagaaattcgctcggtaccagctgggcgacctgctgctgcacctggaaaagaagcacggcgaggactggggaaaggtgtacgacgaggcctgggagcggattgacaagaaagtggaaggcctgagcaagcacatcaagctggaagaggaacggagaagcgaggacgcccagagcaaggccgccctgaccgactggctgcgggctaaggccagcttcgtgatcgagggcctgaaggaggccgacaaggacgagttctgcagatgcgagctgaagctgcagaagtggtacggggacctgcggggaaagcccttcgccatcgaagccgagaacagcatcctggacatcagcggcttcagcaagcagtacaactgtgccttcatctggcagaaggacggcgtgaagaagctgaacctgtacctgatcatcaactacttcaagggcggcaagctgcggttcaagaagatcaaacctgaagccttcgaagccaacagattctacaccgtgatcaacaaaaagagcggcgagatcgtgcccatggaggtgaacttcaacttcgacgaccccaacctgatcatcctgcctctggcctttggcaagagacagggcagagaattcatctggaacgacctgctgtccctggaaaccggcagcctgaagctggccaacggaagagtgatcgagaagacactgtacaacagaagaacccggcaggatgagcctgccctgttcgtggccctgaccttcgagcggcgggaggtcctggactcctccaatatcaaaccaatgaacctgatcggcgtggcaagaggcgaaaacatccccgccgtgatcgccctgaccgaccccgagggctgcccactgagccggtttaaggatagcctgggaaacccaacccacatcctgagaatcggcgagagctataaggagaagcagcggaccatccaggccaagaaggaggtggagcagcggagagccggcggctacagccggaagtacgccagcaaagccaagaatctggcagacgatatggtgagaaacaccgctagagatctgctgtactacgccgtgacccaggatgccatgctgatcttcgccaacctgagccggggcttcggccggcagggcaagcggaccttcatggccgagagacagtacacacggatggaggactggctgaccgccaagctggcctacgagggcctgagcaagacctacctgtccaagacactggcccagtacacctccaagacatgcagcaactgtgggtttaccatcaccagcgccgactacgacagggtgctggagaagctgaagaagacagcaacaggctggatgaccacaattaacggcaaggagctgaaggtggagggccagattacctactacaacagatacaagagacagaacgtagtcaaggacctgtccgtcgagctggatagactgagcgaagaatctgtgaacaacgacatctcctcctggacaaagggcagaagcggagaagctctgagcctcctgaagaaaagattctcccatagacccgtgcaggagaagttcgtgtgcctgaactgcggcttcgagacacacgcagccgagcaagccgccctgaacatcgccagatcctggctgttcctgcggagccaggagtacaagaaataccagacaaacaagacaaccggcaacaccgataagagagccttcgtcgagacctggcagtccttttaccggaagaagcttaaggaggtgtggaaacctgccgtgcggtctggcggatctggcggaggctcctatgcccggcccccccggcagcctggagatggaccccctgaccttcagggacgtggccatcgagttcagcctggaggagtggcagtgcctggacaccgcccagcagaacctgtacaggaacgtgatgctggagaactacaagaacctggccttcctgggcatcgccgtgagcaagcccgacctgatcaccaggctggagaaggagaaggagccctggaagatgaagaggcacaggatggtggacggatctggctccggcagcggccccaagaaaaagagaaaagtctaagctgccttctgcggggcttgccttctggccatgcccttcttctctcccttgcacctgtacctcttggtctttgaataaagcctgagtaggaaggctagcaaaaaaaaaaaaaaaaaaaaaaaaaaaaaaaaaaaaaaaaaaaaaaaaaaaaaaaaaaaaaaaaaaaaaaaaaaaaaaaa

SEQ ID NO: 15437 - RNA, 9485 nt, synthetic construct
  source 1..9485: mol_type = other RNA
aggaaataagagagaaaagaagagtaagaagaaatataagagccaccatggcccctaagaagaagcgtaaagtgagccggatggaacgcctcgtctacgaggtgcggcagaagtgcagaaacatcgaggacatctgcatctcctgcggatctctgaacgtgaccctggagcacccactgttcatcggcggcatgtgccagaactgtaaaaactgttttctggagtgtgcctatcaatacgacgatgacggctaccagagctactgcaccatctgttgcggcggaagagaggtgctgatgtgtggaaataacaactgctgccggtgcttctgcgtggaatgcgtggacctgctggtgggccccggcgccgcccaggccgctattaaggaagatccttggaactgctacatgtgcggccacaagggcacatacggcctgctgagacggagagaggactggcctagcagactgcagatgttcttcgccaataaccacgaccaggagttcgacccccctaaggtgtaccctcccgtccccgccgagaagagaaagcccatccgggtcctgagcctgttcgatggcatcgccaccggtctgctggtgctgaaggacctgggcatccaggtggataggtacattgcctccgaggtgtgcgaggactccatcaccgtgggaatggtgcgtcatcagggcaagatcatgtacgtgggcgacgtgcggagcgtgacacagaagcatatccaggagtggggccctttcgacctggtgatcggcggcagcccttgcaatgacctgagcatcgtgaacccagcccggaagggcctgtacgagggaaccggcagactgttcttcgagttttacagactgctgcacgacgcccggcctaaggaaggcgacgaccggcccttcttttggctgttcgagaatgtggtggccatgggagtcagcgacaagcgggatattagccggttcctggagagcaaccccgtgatgatcgatgccaaggaagtgagcgccgcccaccgggccagatacttctggggcaatctgcctggcatgaacagacccctggccagcaccgtgaacgacaagctggagctgcaggagtgcctggagcacggccggatcgccaagttcagcaaggtgagaaccatcaccacccgaagcaacagcatcaaacaaggcaaggaccagcactttcctgtgttcatgaacgagaaggaggacatcctgtggtgtaccgagatggagagagtgttcgggttcccagtccactacacagatgtcagcaacatgtctagactggccagacagagactgctgggaagaagctggtccgtccctgtgatcagacacctgttcgcccctctgaaggagtacttcgcctgcgtgagcagcggcaacagcaacgccaacagccggggccccagcttctctagcggcctggtgccactgtccctgagagggagccacatgggccccatggagatctacaaaaccgtgagcgcctggaagcggcagcctgtgcgcgtgctgagcctgtttcggaatatcgataaagtcctgaaaagcctgggattcctggagagcggctctggctccggcggtggcaccctgaagtacgtggaggatgtgacaaacgtggtcagacgggatgtggagaagtggggccccttcgatctggtgtacggcagcacccaacccctgggcagctcttgtgaccggtgccctggctggtacatgtttcagttccaccggatcctgcagtacgccctgccgagacaggagtcccagcggccattcttttggattttcatggacaacttgctgctgaccgaggatgaccaggaaactaccactcggttcctgcagaccgaagccgtgaccctgcaggacgtgagaggccgggactaccagaacgccatgcgggtgtggtccaacatccctggactgaaaagcaagcacgcacctctgacccctaaagaagaggagtacctgcaggcccaggtgcggagcagaagcaagctggacgcccctaaggtggatctgctggtgaagaattgcctcctgcccctgagagagtacttcaagtatttcagccagaatagtctgcccctgggaggcagcggcggcggcgccctggtgacatttgaggacgtcgccgtgcggttcacccaggaggaatgggctctgctggatccttctcagaaaatcctgtaccgggacgtgatgagagagacataccggaatctgacctccgtgggcatcaactgggaatgttgggaccttgaagcctgcttcagaagcctgggaagaaacctgagagtgcaggtggtgaagagaaagtgcgagctgaccaacagcggcccctgcgccgagggcggcccaagcagcggcgcccctcctcccagcggcggcagcccagccggctccccaacctctaccgaggagggcacctctgagtccgccacccccgagagcggccctggcacctccaccgagcccagcgagggcagcgcacccggcagccctgccggcagccccacctccacagaggagggaaccagcaccgagcccagcgaaggcagcgccccaggcaccagcaccgagcctagtgagcaggagattaaacggatcaacaagatcagaagaagacttgtgaaagacagcaacaccaagaaggccggcaagacaggccccatgaaaaccctgctggttagagtgatgacacccgatctgagagagcggctggaaaacctgagaaagaagcctgaaaatatcccccagcccatcagcaatacatctagagccaacctgaataagctgctgaccgattacaccgaaatgaagaaggcgatcctgcatgtgtactgggaagagttccagaaggaccctgtgggcctgatgagccgggtggcccagcctgccagcaagaagatcgatcagaacaagctgaaacctgagatggacgagaagggcaacctgaccaccgccggctttgcctgctctcagtgtggccagcccctgttcgtgtacaagctggagcaggtgtctgagaagggcaaggcttacaccaactacttcggacggtgcaatgtggccgagcacgaaaagctgatcctgctggcccagctgaagcccgagaaggatagcgacgaagccgtgacatatagcctgggaaagtttgggcagagggccctggatttctacagcattcatgtgaccaaggagtccacccaccccgtgaagcccctggcccagatcgccggaaacagatacgcctccggacctgtgggaaaggccctgagcgacgcatgtatgggcacaatcgcctccttcctgtctaagtaccaggacatcatcatcgaacaccagaaggtggtgaagggcaaccagaagagactggagagcctgcgggagctggccggcaaggaaaacctggaataccctagcgtgaccctgccacctcagcctcacaccaaggagggcgttgatgcctacaacgaagtgatcgcccgggtgcgaatgtgggtgaacctgaacctgtggcagaagctgaagctaagcagagatgatgccaagcctctgctgagactgaagggattcccttcctttcctctggtcgagagacaggccaacgaagtggactggtgggacatggtgtgtaacgtgaagaagctgatcaacgagaaaaaggaggatggcaaggtgttttggcagaatctggctggctacaagagacaggaagccctgagaccatacctgagcagcgaggaagatcggaagaagggaaagaaattcgctcggtaccagctgggcgacctgctgctgcacctggaaaagaagcacggcgaggactggggaaaggtgtacgacgaggcctgggagcggattgacaagaaagtggaaggcctgagcaagcacatcaagctggaagaggaacggagaagcgaggacgcccagagcaaggccgccctgaccgactggctgcgggctaaggccagcttcgtgatcgagggcctgaaggaggccgacaaggacgagttctgcagatgcgagctgaagctgcagaagtggtacggggacctgcggggaaagcccttcgccatcgaagccgagaacagcatcctggacatcagcggcttcagcaagcagtacaactgtgccttcatctggcagaaggacggcgtgaagaagctgaacctgtacctgatcatcaactacttcaagggcggcaagctgcggttcaagaagatcaaacctgaagccttcgaagccaacagattctacaccgtgatcaacaaaaagagcggcgagatcgtgcccatggaggtgaacttcaacttcgacgaccccaacctgatcatcctgcctctggcctttggcaagagacagggcagagaattcatctggaacgacctgctgtccctggaaaccggcagcctgaagctggccaacggaagagtgatcgagaagacactgtacaacagaagaacccggcaggatgagcctgccctgttcgtggccctgaccttcgagcggcgggaggtcctggactcctccaatatcaaaccaatgaacctgatcggcgtggcaagaggcgaaaacatccccgccgtgatcgccctgaccgaccccgagggctgcccactgagccggtttaaggatagcctgggaaacccaacccacatcctgagaatcggcgagagctataaggagaagcagcggaccatccaggccaagaaggaggtggagcagcggagagccggcggctacagccggaagtacgccagcaaagccaagaatctggcagacgatatggtgagaaacaccgctagagatctgctgtactacgccgtgacccaggatgccatgctgatcttcgccaacctgagccggggcttcggccggcagggcaagcggaccttcatggccgagagacagtacacacggatggaggactggctgaccgccaagctggcctacgagggcctgagcaagacctacctgtccaagacactggcccagtacacctccaagacatgcagcaactgtgggtttaccatcaccagcgccgactacgacagggtgctggagaagctgaagaagacagcaacaggctggatgaccacaattaacggcaaggagctgaaggtggagggccagattacctactacaacagatacaagagacagaacgtagtcaaggacctgtccgtcgagctggatagactgagcgaagaatctgtgaacaacgacatctcctcctggacaaagggcagaagcggagaagctctgagcctcctgaagaaaagattctcccatagacccgtgcaggagaagttcgtgtgcctgaactgcggcttcgagacacacgcagccgagcaagccgccctgaacatcgccagatcctggctgttcctgcggagccaggagtacaagaaataccagacaaacaagacaaccggcaacaccgataagagagccttcgtcgagacctggcagtccttttaccggaagaagcttaaggaggtgtggaaacctgccgtgcggtctggcggatctggcggaggctccaacgccgtgacctacaacgacgtgcacgtggacttcacccaggaggagtgggccctgatggaccccagccagaggaacctgtacaaggacgtgatggtggagacctacatgaacctgaccgccatcggctacaactgggaggacctggaggtggaggagcactgccagaacagcctgaagcacggcaggcacaagaggccccacaccaccgagaagagctgcgagtacatgggctgcggcaagggcggcccaagcagcggcgcccctcctcccagcggcggcagcccagccggctccccaacctctaccgaggagggcacctctgagtccgccacccccgagagcggccctggcacctccaccgagcccagcgagggcagcgcacccggcagccctgccggcagccccacctccacagaggagggaaccagcaccgagcccagcgaaggcagcgccccaggcaccagcaccgagcctagtgagcaggagattaaacggatcaacaagatcagaagaagacttgtgaaagacagcaacaccaagaaggccggcaagacaggccccatgaaaaccctgctggttagagtgatgacacccgatctgagagagcggctggaaaacctgagaaagaagcctgaaaatatcccccagcccatcagcaatacatctagagccaacctgaataagctgctgaccgattacaccgaaatgaagaaggcgatcctgcatgtgtactgggaagagttccagaaggaccctgtgggcctgatgagccgggtggcccagcctgccagcaagaagatcgatcagaacaagctgaaacctgagatggacgagaagggcaacctgaccaccgccggctttgcctgctctcagtgtggccagcccctgttcgtgtacaagctggagcaggtgtctgagaagggcaaggcttacaccaactacttcggacggtgcaatgtggccgagcacgaaaagctgatcctgctggcccagctgaagcccgagaaggatagcgacgaagccgtgacatatagcctgggaaagtttgggcagagggccctggatttctacagcattcatgtgaccaaggagtccacccaccccgtgaagcccctggcccagatcgccggaaacagatacgcctccggacctgtgggaaaggccctgagcgacgcatgtatgggcacaatcgcctccttcctgtctaagtaccaggacatcatcatcgaacaccagaaggtggtgaagggcaaccagaagagactggagagcctgcgggagctggccggcaaggaaaacctggaataccctagcgtgaccctgccacctcagcctcacaccaaggagggcgttgatgcctacaacgaagtgatcgcccgggtgcgaatgtgggtgaacctgaacctgtggcagaagctgaagctaagcagagatgatgccaagcctctgctgagactgaagggattcccttcctttcctctggtcgagagacaggccaacgaagtggactggtgggacatggtgtgtaacgtgaagaagctgatcaacgagaaaaaggaggatggcaaggtgttttggcagaatctggctggctacaagagacaggaagccctgagaccatacctgagcagcgaggaagatcggaagaagggaaagaaattcgctcggtaccagctgggcgacctgctgctgcacctggaaaagaagcacggcgaggactggggaaaggtgtacgacgaggcctgggagcggattgacaagaaagtggaaggcctgagcaagcacatcaagctggaagaggaacggagaagcgaggacgcccagagcaaggccgccctgaccgactggctgcgggctaaggccagcttcgtgatcgagggcctgaaggaggccgacaaggacgagttctgcagatgcgagctgaagctgcagaagtggtacggggacctgcggggaaagcccttcgccatcgaagccgagaacagcatcctggacatcagcggcttcagcaagcagtacaactgtgccttcatctggcagaaggacggcgtgaagaagctgaacctgtacctgatcatcaactacttcaagggcggcaagctgcggttcaagaagatcaaacctgaagccttcgaagccaacagattctacaccgtgatcaacaaaaagagcggcgagatcgtgcccatggaggtgaacttcaacttcgacgaccccaacctgatcatcctgcctctggcctttggcaagagacagggcagagaattcatctggaacgacctgctgtccctggaaaccggcagcctgaagctggccaacggaagagtgatcgagaagacactgtacaacagaagaacccggcaggatgagcctgccctgttcgtggccctgaccttcgagcggcgggaggtcctggactcctccaatatcaaaccaatgaacctgatcggcgtggcaagaggcgaaaacatccccgccgtgatcgccctgaccgaccccgagggctgcccactgagccggtttaaggatagcctgggaaacccaacccacatcctgagaatcggcgagagctataaggagaagcagcggaccatccaggccaagaaggaggtggagcagcggagagccggcggctacagccggaagtacgccagcaaagccaagaatctggcagacgatatggtgagaaacaccgctagagatctgctgtactacgccgtgacccaggatgccatgctgatcttcgccaacctgagccggggcttcggccggcagggcaagcggaccttcatggccgagagacagtacacacggatggaggactggctgaccgccaagctggcctacgagggcctgagcaagacctacctgtccaagacactggcccagtacacctccaagacatgcagcaactgtgggtttaccatcaccagcgccgactacgacagggtgctggagaagctgaagaagacagcaacaggctggatgaccacaattaacggcaaggagctgaaggtggagggccagattacctactacaacagatacaagagacagaacgtagtcaaggacctgtccgtcgagctggatagactgagcgaagaatctgtgaacaacgacatctcctcctggacaaagggcagaagcggagaagctctgagcctcctgaagaaaagattctcccatagacccgtgcaggagaagttcgtgtgcctgaactgcggcttcgagacacacgcagccgagcaagccgccctgaacatcgccagatcctggctgttcctgcggagccaggagtacaagaaataccagacaaacaagacaaccggcaacaccgataagagagccttcgtcgagacctggcagtccttttaccggaagaagcttaaggaggtgtggaaacctgccgtgcggtctggcggatctggcggaggctcctaacgccgtgacctacaacgacgtgcacgtggacttcacccaggaggagtgggccctgatggaccccagccagaggaacctgtacaaggacgtgatggtggagacctacatgaacctgaccgccatcggctacaactgggaggacctggaggtggaggagcactgccagaacagcctgaagcacggcaggcacaagaggccccacaccaccgagaagagctgcgagtacatgggctgcggcaagggatctggctccggcagcggccccaagaaaaagagaaaagtctaagctgccttctgcggggcttgccttctggccatgcccttcttctctcccttgcacctgtacctcttggtctttgaataaagcctgagtaggaaggctagcaaaaaaaaaaaaaaaaaaaaaaaaaaaaaaaaaaaaaaaaaaaaaaaaaaaaaaaaaaaaaaaaaaaaaaaaaaaaaaaa

SEQ ID NO: 15438 - RNA, 9485 nt, synthetic construct
  source 1..9485: mol_type = other RNA
aggaaataagagagaaaagaagagtaagaagaaatataagagccaccatggcccctaagaagaagcgtaaagtgagccggatggaacgcctcgtctacgaggtgcggcagaagtgcagaaacatcgaggacatctgcatctcctgcggatctctgaacgtgaccctggagcacccactgttcatcggcggcatgtgccagaactgtaaaaactgttttctggagtgtgcctatcaatacgacgatgacggctaccagagctactgcaccatctgttgcggcggaagagaggtgctgatgtgtggaaataacaactgctgccggtgcttctgcgtggaatgcgtggacctgctggtgggccccggcgccgcccaggccgctattaaggaagatccttggaactgctacatgtgcggccacaagggcacatacggcctgctgagacggagagaggactggcctagcagactgcagatgttcttcgccaataaccacgaccaggagttcgacccccctaaggtgtaccctcccgtccccgccgagaagagaaagcccatccgggtcctgagcctgttcgatggcatcgccaccggtctgctggtgctgaaggacctgggcatccaggtggataggtacattgcctccgaggtgtgcgaggactccatcaccgtgggaatggtgcgtcatcagggcaagatcatgtacgtgggcgacgtgcggagcgtgacacagaagcatatccaggagtggggccctttcgacctggtgatcggcggcagcccttgcaatgacctgagcatcgtgaacccagcccggaagggcctgtacgagggaaccggcagactgttcttcgagttttacagactgctgcacgacgcccggcctaaggaaggcgacgaccggcccttcttttggctgttcgagaatgtggtggccatgggagtcagcgacaagcgggatattagccggttcctggagagcaaccccgtgatgatcgatgccaaggaagtgagcgccgcccaccgggccagatacttctggggcaatctgcctggcatgaacagacccctggccagcaccgtgaacgacaagctggagctgcaggagtgcctggagcacggccggatcgccaagttcagcaaggtgagaaccatcaccacccgaagcaacagcatcaaacaaggcaaggaccagcactttcctgtgttcatgaacgagaaggaggacatcctgtggtgtaccgagatggagagagtgttcgggttcccagtccactacacagatgtcagcaacatgtctagactggccagacagagactgctgggaagaagctggtccgtccctgtgatcagacacctgttcgcccctctgaaggagtacttcgcctgcgtgagcagcggcaacagcaacgccaacagccggggccccagcttctctagcggcctggtgccactgtccctgagagggagccacatgggccccatggagatctacaaaaccgtgagcgcctggaagcggcagcctgtgcgcgtgctgagcctgtttcggaatatcgataaagtcctgaaaagcctgggattcctggagagcggctctggctccggcggtggcaccctgaagtacgtggaggatgtgacaaacgtggtcagacgggatgtggagaagtggggccccttcgatctggtgtacggcagcacccaacccctgggcagctcttgtgaccggtgccctggctggtacatgtttcagttccaccggatcctgcagtacgccctgccgagacaggagtcccagcggccattcttttggattttcatggacaacttgctgctgaccgaggatgaccaggaaactaccactcggttcctgcagaccgaagccgtgaccctgcaggacgtgagaggccgggactaccagaacgccatgcgggtgtggtccaacatccctggactgaaaagcaagcacgcacctctgacccctaaagaagaggagtacctgcaggcccaggtgcggagcagaagcaagctggacgcccctaaggtggatctgctggtgaagaattgcctcctgcccctgagagagtacttcaagtatttcagccagaatagtctgcccctgggaggcagcggcggcggcgccctggtgacatttgaggacgtcgccgtgcggttcacccaggaggaatgggctctgctggatccttctcagaaaatcctgtaccgggacgtgatgagagagacataccggaatctgacctccgtgggcatcaactgggaatgttgggaccttgaagcctgcttcagaagcctgggaagaaacctgagagtgcaggtggtgaagagaaagtgcgagctgaccaacagcggcccctgcgccgagggcggcccaagcagcggcgcccctcctcccagcggcggcagcccagccggctccccaacctctaccgaggagggcacctctgagtccgccacccccgagagcggccctggcacctccaccgagcccagcgagggcagcgcacccggcagccctgccggcagccccacctccacagaggagggaaccagcaccgagcccagcgaaggcagcgccccaggcaccagcaccgagcctagtgagcaggagattaaacggatcaacaagatcagaagaagacttgtgaaagacagcaacaccaagaaggccggcaagacaggccccatgaaaaccctgctggttagagtgatgacacccgatctgagagagcggctggaaaacctgagaaagaagcctgaaaatatcccccagcccatcagcaatacatctagagccaacctgaataagctgctgaccgattacaccgaaatgaagaaggcgatcctgcatgtgtactgggaagagttccagaaggaccctgtgggcctgatgagccgggtggcccagcctgccagcaagaagatcgatcagaacaagctgaaacctgagatggacgagaagggcaacctgaccaccgccggctttgcctgctctcagtgtggccagcccctgttcgtgtacaagctggagcaggtgtctgagaagggcaaggcttacaccaactacttcggacggtgcaatgtggccgagcacgaaaagctgatcctgctggcccagctgaagcccgagaaggatagcgacgaagccgtgacatatagcctgggaaagtttgggcagagggccctggatttctacagcattcatgtgaccaaggagtccacccaccccgtgaagcccctggcccagatcgccggaaacagatacgcctccggacctgtgggaaaggccctgagcgacgcatgtatgggcacaatcgcctccttcctgtctaagtaccaggacatcatcatcgaacaccagaaggtggtgaagggcaaccagaagagactggagagcctgcgggagctggccggcaaggaaaacctggaataccctagcgtgaccctgccacctcagcctcacaccaaggagggcgttgatgcctacaacgaagtgatcgcccgggtgcgaatgtgggtgaacctgaacctgtggcagaagctgaagctaagcagagatgatgccaagcctctgctgagactgaagggattcccttcctttcctctggtcgagagacaggccaacgaagtggactggtgggacatggtgtgtaacgtgaagaagctgatcaacgagaaaaaggaggatggcaaggtgttttggcagaatctggctggctacaagagacaggaagccctgagaccatacctgagcagcgaggaagatcggaagaagggaaagaaattcgctcggtaccagctgggcgacctgctgctgcacctggaaaagaagcacggcgaggactggggaaaggtgtacgacgaggcctgggagcggattgacaagaaagtggaaggcctgagcaagcacatcaagctggaagaggaacggagaagcgaggacgcccagagcaaggccgccctgaccgactggctgcgggctaaggccagcttcgtgatcgagggcctgaaggaggccgacaaggacgagttctgcagatgcgagctgaagctgcagaagtggtacggggacctgcggggaaagcccttcgccatcgaagccgagaacagcatcctggacatcagcggcttcagcaagcagtacaactgtgccttcatctggcagaaggacggcgtgaagaagctgaacctgtacctgatcatcaactacttcaagggcggcaagctgcggttcaagaagatcaaacctgaagccttcgaagccaacagattctacaccgtgatcaacaaaaagagcggcgagatcgtgcccatggaggtgaacttcaacttcgacgaccccaacctgatcatcctgcctctggcctttggcaagagacagggcagagaattcatctggaacgacctgctgtccctggaaaccggcagcctgaagctggccaacggaagagtgatcgagaagacactgtacaacagaagaacccggcaggatgagcctgccctgttcgtggccctgaccttcgagcggcgggaggtcctggactcctccaatatcaaaccaatgaacctgatcggcgtggcaagaggcgaaaacatccccgccgtgatcgccctgaccgaccccgagggctgcccactgagccggtttaaggatagcctgggaaacccaacccacatcctgagaatcggcgagagctataaggagaagcagcggaccatccaggccaagaaggaggtggagcagcggagagccggcggctacagccggaagtacgccagcaaagccaagaatctggcagacgatatggtgagaaacaccgctagagatctgctgtactacgccgtgacccaggatgccatgctgatcttcgccaacctgagccggggcttcggccggcagggcaagcggaccttcatggccgagagacagtacacacggatggaggactggctgaccgccaagctggcctacgagggcctgagcaagacctacctgtccaagacactggcccagtacacctccaagacatgcagcaactgtgggtttaccatcaccagcgccgactacgacagggtgctggagaagctgaagaagacagcaacaggctggatgaccacaattaacggcaaggagctgaaggtggagggccagattacctactacaacagatacaagagacagaacgtagtcaaggacctgtccgtcgagctggatagactgagcgaagaatctgtgaacaacgacatctcctcctggacaaagggcagaagcggagaagctctgagcctcctgaagaaaagattctcccatagacccgtgcaggagaagttcgtgtgcctgaactgcggcttcgagacacacgcagccgagcaagccgccctgaacatcgccagatcctggctgttcctgcggagccaggagtacaagaaataccagacaaacaagacaaccggcaacaccgataagagagccttcgtcgagacctggcagtccttttaccggaagaagcttaaggaggtgtggaaacctgccgtgcggtctggcggatctggcggaggctccagccaggagcccgtgaccttcgaggacgtggccgtgtacttcacccagaaccagtgggccagcctggaccccacccagagggccctgtacagggaggtgatgctggagaactacgccaacatcaccagcctggccgccttccccttccccaagcccgacctgatcctgcagctggagaggggcgaggccaggtggggcctggacccctggatcgccatcgagggcgaggccctgggcggcgtgggcggcccaagcagcggcgcccctcctcccagcggcggcagcccagccggctccccaacctctaccgaggagggcacctctgagtccgccacccccgagagcggccctggcacctccaccgagcccagcgagggcagcgcacccggcagccctgccggcagccccacctccacagaggagggaaccagcaccgagcccagcgaaggcagcgccccaggcaccagcaccgagcctagtgagcaggagattaaacggatcaacaagatcagaagaagacttgtgaaagacagcaacaccaagaaggccggcaagacaggccccatgaaaaccctgctggttagagtgatgacacccgatctgagagagcggctggaaaacctgagaaagaagcctgaaaatatcccccagcccatcagcaatacatctagagccaacctgaataagctgctgaccgattacaccgaaatgaagaaggcgatcctgcatgtgtactgggaagagttccagaaggaccctgtgggcctgatgagccgggtggcccagcctgccagcaagaagatcgatcagaacaagctgaaacctgagatggacgagaagggcaacctgaccaccgccggctttgcctgctctcagtgtggccagcccctgttcgtgtacaagctggagcaggtgtctgagaagggcaaggcttacaccaactacttcggacggtgcaatgtggccgagcacgaaaagctgatcctgctggcccagctgaagcccgagaaggatagcgacgaagccgtgacatatagcctgggaaagtttgggcagagggccctggatttctacagcattcatgtgaccaaggagtccacccaccccgtgaagcccctggcccagatcgccggaaacagatacgcctccggacctgtgggaaaggccctgagcgacgcatgtatgggcacaatcgcctccttcctgtctaagtaccaggacatcatcatcgaacaccagaaggtggtgaagggcaaccagaagagactggagagcctgcgggagctggccggcaaggaaaacctggaataccctagcgtgaccctgccacctcagcctcacaccaaggagggcgttgatgcctacaacgaagtgatcgcccgggtgcgaatgtgggtgaacctgaacctgtggcagaagctgaagctaagcagagatgatgccaagcctctgctgagactgaagggattcccttcctttcctctggtcgagagacaggccaacgaagtggactggtgggacatggtgtgtaacgtgaagaagctgatcaacgagaaaaaggaggatggcaaggtgttttggcagaatctggctggctacaagagacaggaagccctgagaccatacctgagcagcgaggaagatcggaagaagggaaagaaattcgctcggtaccagctgggcgacctgctgctgcacctggaaaagaagcacggcgaggactggggaaaggtgtacgacgaggcctgggagcggattgacaagaaagtggaaggcctgagcaagcacatcaagctggaagaggaacggagaagcgaggacgcccagagcaaggccgccctgaccgactggctgcgggctaaggccagcttcgtgatcgagggcctgaaggaggccgacaaggacgagttctgcagatgcgagctgaagctgcagaagtggtacggggacctgcggggaaagcccttcgccatcgaagccgagaacagcatcctggacatcagcggcttcagcaagcagtacaactgtgccttcatctggcagaaggacggcgtgaagaagctgaacctgtacctgatcatcaactacttcaagggcggcaagctgcggttcaagaagatcaaacctgaagccttcgaagccaacagattctacaccgtgatcaacaaaaagagcggcgagatcgtgcccatggaggtgaacttcaacttcgacgaccccaacctgatcatcctgcctctggcctttggcaagagacagggcagagaattcatctggaacgacctgctgtccctggaaaccggcagcctgaagctggccaacggaagagtgatcgagaagacactgtacaacagaagaacccggcaggatgagcctgccctgttcgtggccctgaccttcgagcggcgggaggtcctggactcctccaatatcaaaccaatgaacctgatcggcgtggcaagaggcgaaaacatccccgccgtgatcgccctgaccgaccccgagggctgcccactgagccggtttaaggatagcctgggaaacccaacccacatcctgagaatcggcgagagctataaggagaagcagcggaccatccaggccaagaaggaggtggagcagcggagagccggcggctacagccggaagtacgccagcaaagccaagaatctggcagacgatatggtgagaaacaccgctagagatctgctgtactacgccgtgacccaggatgccatgctgatcttcgccaacctgagccggggcttcggccggcagggcaagcggaccttcatggccgagagacagtacacacggatggaggactggctgaccgccaagctggcctacgagggcctgagcaagacctacctgtccaagacactggcccagtacacctccaagacatgcagcaactgtgggtttaccatcaccagcgccgactacgacagggtgctggagaagctgaagaagacagcaacaggctggatgaccacaattaacggcaaggagctgaaggtggagggccagattacctactacaacagatacaagagacagaacgtagtcaaggacctgtccgtcgagctggatagactgagcgaagaatctgtgaacaacgacatctcctcctggacaaagggcagaagcggagaagctctgagcctcctgaagaaaagattctcccatagacccgtgcaggagaagttcgtgtgcctgaactgcggcttcgagacacacgcagccgagcaagccgccctgaacatcgccagatcctggctgttcctgcggagccaggagtacaagaaataccagacaaacaagacaaccggcaacaccgataagagagccttcgtcgagacctggcagtccttttaccggaagaagcttaaggaggtgtggaaacctgccgtgcggtctggcggatctggcggaggctcctagccaggagcccgtgaccttcgaggacgtggccgtgtacttcacccagaaccagtgggccagcctggaccccacccagagggccctgtacagggaggtgatgctggagaactacgccaacatcaccagcctggccgccttccccttccccaagcccgacctgatcctgcagctggagaggggcgaggccaggtggggcctggacccctggatcgccatcgagggcgaggccctgggcggcgtgggatctggctccggcagcggccccaagaaaaagagaaaagtctaagctgccttctgcggggcttgccttctggccatgcccttcttctctcccttgcacctgtacctcttggtctttgaataaagcctgagtaggaaggctagcaaaaaaaaaaaaaaaaaaaaaaaaaaaaaaaaaaaaaaaaaaaaaaaaaaaaaaaaaaaaaaaaaaaaaaaaaaaaaaaa

SEQ ID NO: 15439 - RNA, 9485 nt, synthetic construct
  source 1..9485: mol_type = other RNA
aggaaataagagagaaaagaagagtaagaagaaatataagagccaccatggcccctaagaagaagcgtaaagtgagccggatggaacgcctcgtctacgaggtgcggcagaagtgcagaaacatcgaggacatctgcatctcctgcggatctctgaacgtgaccctggagcacccactgttcatcggcggcatgtgccagaactgtaaaaactgttttctggagtgtgcctatcaatacgacgatgacggctaccagagctactgcaccatctgttgcggcggaagagaggtgctgatgtgtggaaataacaactgctgccggtgcttctgcgtggaatgcgtggacctgctggtgggccccggcgccgcccaggccgctattaaggaagatccttggaactgctacatgtgcggccacaagggcacatacggcctgctgagacggagagaggactggcctagcagactgcagatgttcttcgccaataaccacgaccaggagttcgacccccctaaggtgtaccctcccgtccccgccgagaagagaaagcccatccgggtcctgagcctgttcgatggcatcgccaccggtctgctggtgctgaaggacctgggcatccaggtggataggtacattgcctccgaggtgtgcgaggactccatcaccgtgggaatggtgcgtcatcagggcaagatcatgtacgtgggcgacgtgcggagcgtgacacagaagcatatccaggagtggggccctttcgacctggtgatcggcggcagcccttgcaatgacctgagcatcgtgaacccagcccggaagggcctgtacgagggaaccggcagactgttcttcgagttttacagactgctgcacgacgcccggcctaaggaaggcgacgaccggcccttcttttggctgttcgagaatgtggtggccatgggagtcagcgacaagcgggatattagccggttcctggagagcaaccccgtgatgatcgatgccaaggaagtgagcgccgcccaccgggccagatacttctggggcaatctgcctggcatgaacagacccctggccagcaccgtgaacgacaagctggagctgcaggagtgcctggagcacggccggatcgccaagttcagcaaggtgagaaccatcaccacccgaagcaacagcatcaaacaaggcaaggaccagcactttcctgtgttcatgaacgagaaggaggacatcctgtggtgtaccgagatggagagagtgttcgggttcccagtccactacacagatgtcagcaacatgtctagactggccagacagagactgctgggaagaagctggtccgtccctgtgatcagacacctgttcgcccctctgaaggagtacttcgcctgcgtgagcagcggcaacagcaacgccaacagccggggccccagcttctctagcggcctggtgccactgtccctgagagggagccacatgggccccatggagatctacaaaaccgtgagcgcctggaagcggcagcctgtgcgcgtgctgagcctgtttcggaatatcgataaagtcctgaaaagcctgggattcctggagagcggctctggctccggcggtggcaccctgaagtacgtggaggatgtgacaaacgtggtcagacgggatgtggagaagtggggccccttcgatctggtgtacggcagcacccaacccctgggcagctcttgtgaccggtgccctggctggtacatgtttcagttccaccggatcctgcagtacgccctgccgagacaggagtcccagcggccattcttttggattttcatggacaacttgctgctgaccgaggatgaccaggaaactaccactcggttcctgcagaccgaagccgtgaccctgcaggacgtgagaggccgggactaccagaacgccatgcgggtgtggtccaacatccctggactgaaaagcaagcacgcacctctgacccctaaagaagaggagtacctgcaggcccaggtgcggagcagaagcaagctggacgcccctaaggtggatctgctggtgaagaattgcctcctgcccctgagagagtacttcaagtatttcagccagaatagtctgcccctgggaggcagcggcggcggcgccctggtgacatttgaggacgtcgccgtgcggttcacccaggaggaatgggctctgctggatccttctcagaaaatcctgtaccgggacgtgatgagagagacataccggaatctgacctccgtgggcatcaactgggaatgttgggaccttgaagcctgcttcagaagcctgggaagaaacctgagagtgcaggtggtgaagagaaagtgcgagctgaccaacagcggcccctgcgccgagggcggcccaagcagcggcgcccctcctcccagcggcggcagcccagccggctccccaacctctaccgaggagggcacctctgagtccgccacccccgagagcggccctggcacctccaccgagcccagcgagggcagcgcacccggcagccctgccggcagccccacctccacagaggagggaaccagcaccgagcccagcgaaggcagcgccccaggcaccagcaccgagcctagtgagcaggagattaaacggatcaacaagatcagaagaagacttgtgaaagacagcaacaccaagaaggccggcaagacaggccccatgaaaaccctgctggttagagtgatgacacccgatctgagagagcggctggaaaacctgagaaagaagcctgaaaatatcccccagcccatcagcaatacatctagagccaacctgaataagctgctgaccgattacaccgaaatgaagaaggcgatcctgcatgtgtactgggaagagttccagaaggaccctgtgggcctgatgagccgggtggcccagcctgccagcaagaagatcgatcagaacaagctgaaacctgagatggacgagaagggcaacctgaccaccgccggctttgcctgctctcagtgtggccagcccctgttcgtgtacaagctggagcaggtgtctgagaagggcaaggcttacaccaactacttcggacggtgcaatgtggccgagcacgaaaagctgatcctgctggcccagctgaagcccgagaaggatagcgacgaagccgtgacatatagcctgggaaagtttgggcagagggccctggatttctacagcattcatgtgaccaaggagtccacccaccccgtgaagcccctggcccagatcgccggaaacagatacgcctccggacctgtgggaaaggccctgagcgacgcatgtatgggcacaatcgcctccttcctgtctaagtaccaggacatcatcatcgaacaccagaaggtggtgaagggcaaccagaagagactggagagcctgcgggagctggccggcaaggaaaacctggaataccctagcgtgaccctgccacctcagcctcacaccaaggagggcgttgatgcctacaacgaagtgatcgcccgggtgcgaatgtgggtgaacctgaacctgtggcagaagctgaagctaagcagagatgatgccaagcctctgctgagactgaagggattcccttcctttcctctggtcgagagacaggccaacgaagtggactggtgggacatggtgtgtaacgtgaagaagctgatcaacgagaaaaaggaggatggcaaggtgttttggcagaatctggctggctacaagagacaggaagccctgagaccatacctgagcagcgaggaagatcggaagaagggaaagaaattcgctcggtaccagctgggcgacctgctgctgcacctggaaaagaagcacggcgaggactggggaaaggtgtacgacgaggcctgggagcggattgacaagaaagtggaaggcctgagcaagcacatcaagctggaagaggaacggagaagcgaggacgcccagagcaaggccgccctgaccgactggctgcgggctaaggccagcttcgtgatcgagggcctgaaggaggccgacaaggacgagttctgcagatgcgagctgaagctgcagaagtggtacggggacctgcggggaaagcccttcgccatcgaagccgagaacagcatcctggacatcagcggcttcagcaagcagtacaactgtgccttcatctggcagaaggacggcgtgaagaagctgaacctgtacctgatcatcaactacttcaagggcggcaagctgcggttcaagaagatcaaacctgaagccttcgaagccaacagattctacaccgtgatcaacaaaaagagcggcgagatcgtgcccatggaggtgaacttcaacttcgacgaccccaacctgatcatcctgcctctggcctttggcaagagacagggcagagaattcatctggaacgacctgctgtccctggaaaccggcagcctgaagctggccaacggaagagtgatcgagaagacactgtacaacagaagaacccggcaggatgagcctgccctgttcgtggccctgaccttcgagcggcgggaggtcctggactcctccaatatcaaaccaatgaacctgatcggcgtggcaagaggcgaaaacatccccgccgtgatcgccctgaccgaccccgagggctgcccactgagccggtttaaggatagcctgggaaacccaacccacatcctgagaatcggcgagagctataaggagaagcagcggaccatccaggccaagaaggaggtggagcagcggagagccggcggctacagccggaagtacgccagcaaagccaagaatctggcagacgatatggtgagaaacaccgctagagatctgctgtactacgccgtgacccaggatgccatgctgatcttcgccaacctgagccggggcttcggccggcagggcaagcggaccttcatggccgagagacagtacacacggatggaggactggctgaccgccaagctggcctacgagggcctgagcaagacctacctgtccaagacactggcccagtacacctccaagacatgcagcaactgtgggtttaccatcaccagcgccgactacgacagggtgctggagaagctgaagaagacagcaacaggctggatgaccacaattaacggcaaggagctgaaggtggagggccagattacctactacaacagatacaagagacagaacgtagtcaaggacctgtccgtcgagctggatagactgagcgaagaatctgtgaacaacgacatctcctcctggacaaagggcagaagcggagaagctctgagcctcctgaagaaaagattctcccatagacccgtgcaggagaagttcgtgtgcctgaactgcggcttcgagacacacgcagccgagcaagccgccctgaacatcgccagatcctggctgttcctgcggagccaggagtacaagaaataccagacaaacaagacaaccggcaacaccgataagagagccttcgtcgagacctggcagtccttttaccggaagaagcttaaggaggtgtggaaacctgccgtgcggtctggcggatctggcggaggctccgccagggtgagcgtgatgttcagcgacgtgagcatcgccttcagcagggaggagtgggagtacctggacctgagccagagggacctgtacaaggacgtgatgatggagaactacaggaacgtggccagcctgggctacttcatcagcaagcccgacgtgatcagcctgctggagcagggcaaggagccctggaaggtggtgaggaggaggaggaggaaccccgacctggagaccaaggacgagggcggcccaagcagcggcgcccctcctcccagcggcggcagcccagccggctccccaacctctaccgaggagggcacctctgagtccgccacccccgagagcggccctggcacctccaccgagcccagcgagggcagcgcacccggcagccctgccggcagccccacctccacagaggagggaaccagcaccgagcccagcgaaggcagcgccccaggcaccagcaccgagcctagtgagcaggagattaaacggatcaacaagatcagaagaagacttgtgaaagacagcaacaccaagaaggccggcaagacaggccccatgaaaaccctgctggttagagtgatgacacccgatctgagagagcggctggaaaacctgagaaagaagcctgaaaatatcccccagcccatcagcaatacatctagagccaacctgaataagctgctgaccgattacaccgaaatgaagaaggcgatcctgcatgtgtactgggaagagttccagaaggaccctgtgggcctgatgagccgggtggcccagcctgccagcaagaagatcgatcagaacaagctgaaacctgagatggacgagaagggcaacctgaccaccgccggctttgcctgctctcagtgtggccagcccctgttcgtgtacaagctggagcaggtgtctgagaagggcaaggcttacaccaactacttcggacggtgcaatgtggccgagcacgaaaagctgatcctgctggcccagctgaagcccgagaaggatagcgacgaagccgtgacatatagcctgggaaagtttgggcagagggccctggatttctacagcattcatgtgaccaaggagtccacccaccccgtgaagcccctggcccagatcgccggaaacagatacgcctccggacctgtgggaaaggccctgagcgacgcatgtatgggcacaatcgcctccttcctgtctaagtaccaggacatcatcatcgaacaccagaaggtggtgaagggcaaccagaagagactggagagcctgcgggagctggccggcaaggaaaacctggaataccctagcgtgaccctgccacctcagcctcacaccaaggagggcgttgatgcctacaacgaagtgatcgcccgggtgcgaatgtgggtgaacctgaacctgtggcagaagctgaagctaagcagagatgatgccaagcctctgctgagactgaagggattcccttcctttcctctggtcgagagacaggccaacgaagtggactggtgggacatggtgtgtaacgtgaagaagctgatcaacgagaaaaaggaggatggcaaggtgttttggcagaatctggctggctacaagagacaggaagccctgagaccatacctgagcagcgaggaagatcggaagaagggaaagaaattcgctcggtaccagctgggcgacctgctgctgcacctggaaaagaagcacggcgaggactggggaaaggtgtacgacgaggcctgggagcggattgacaagaaagtggaaggcctgagcaagcacatcaagctggaagaggaacggagaagcgaggacgcccagagcaaggccgccctgaccgactggctgcgggctaaggccagcttcgtgatcgagggcctgaaggaggccgacaaggacgagttctgcagatgcgagctgaagctgcagaagtggtacggggacctgcggggaaagcccttcgccatcgaagccgagaacagcatcctggacatcagcggcttcagcaagcagtacaactgtgccttcatctggcagaaggacggcgtgaagaagctgaacctgtacctgatcatcaactacttcaagggcggcaagctgcggttcaagaagatcaaacctgaagccttcgaagccaacagattctacaccgtgatcaacaaaaagagcggcgagatcgtgcccatggaggtgaacttcaacttcgacgaccccaacctgatcatcctgcctctggcctttggcaagagacagggcagagaattcatctggaacgacctgctgtccctggaaaccggcagcctgaagctggccaacggaagagtgatcgagaagacactgtacaacagaagaacccggcaggatgagcctgccctgttcgtggccctgaccttcgagcggcgggaggtcctggactcctccaatatcaaaccaatgaacctgatcggcgtggcaagaggcgaaaacatccccgccgtgatcgccctgaccgaccccgagggctgcccactgagccggtttaaggatagcctgggaaacccaacccacatcctgagaatcggcgagagctataaggagaagcagcggaccatccaggccaagaaggaggtggagcagcggagagccggcggctacagccggaagtacgccagcaaagccaagaatctggcagacgatatggtgagaaacaccgctagagatctgctgtactacgccgtgacccaggatgccatgctgatcttcgccaacctgagccggggcttcggccggcagggcaagcggaccttcatggccgagagacagtacacacggatggaggactggctgaccgccaagctggcctacgagggcctgagcaagacctacctgtccaagacactggcccagtacacctccaagacatgcagcaactgtgggtttaccatcaccagcgccgactacgacagggtgctggagaagctgaagaagacagcaacaggctggatgaccacaattaacggcaaggagctgaaggtggagggccagattacctactacaacagatacaagagacagaacgtagtcaaggacctgtccgtcgagctggatagactgagcgaagaatctgtgaacaacgacatctcctcctggacaaagggcagaagcggagaagctctgagcctcctgaagaaaagattctcccatagacccgtgcaggagaagttcgtgtgcctgaactgcggcttcgagacacacgcagccgagcaagccgccctgaacatcgccagatcctggctgttcctgcggagccaggagtacaagaaataccagacaaacaagacaaccggcaacaccgataagagagccttcgtcgagacctggcagtccttttaccggaagaagcttaaggaggtgtggaaacctgccgtgcggtctggcggatctggcggaggctcctgccagggtgagcgtgatgttcagcgacgtgagcatcgccttcagcagggaggagtgggagtacctggacctgagccagagggacctgtacaaggacgtgatgatggagaactacaggaacgtggccagcctgggctacttcatcagcaagcccgacgtgatcagcctgctggagcagggcaaggagccctggaaggtggtgaggaggaggaggaggaaccccgacctggagaccaaggacgagggatctggctccggcagcggccccaagaaaaagagaaaagtctaagctgccttctgcggggcttgccttctggccatgcccttcttctctcccttgcacctgtacctcttggtctttgaataaagcctgagtaggaaggctagcaaaaaaaaaaaaaaaaaaaaaaaaaaaaaaaaaaaaaaaaaaaaaaaaaaaaaaaaaaaaaaaaaaaaaaaaaaaaaaaa

SEQ ID NO: 15440 - RNA, 9485 nt, synthetic construct
  source 1..9485: mol_type = other RNA
aggaaataagagagaaaagaagagtaagaagaaatataagagccaccatggcccctaagaagaagcgtaaagtgagccggatggaacgcctcgtctacgaggtgcggcagaagtgcagaaacatcgaggacatctgcatctcctgcggatctctgaacgtgaccctggagcacccactgttcatcggcggcatgtgccagaactgtaaaaactgttttctggagtgtgcctatcaatacgacgatgacggctaccagagctactgcaccatctgttgcggcggaagagaggtgctgatgtgtggaaataacaactgctgccggtgcttctgcgtggaatgcgtggacctgctggtgggccccggcgccgcccaggccgctattaaggaagatccttggaactgctacatgtgcggccacaagggcacatacggcctgctgagacggagagaggactggcctagcagactgcagatgttcttcgccaataaccacgaccaggagttcgacccccctaaggtgtaccctcccgtccccgccgagaagagaaagcccatccgggtcctgagcctgttcgatggcatcgccaccggtctgctggtgctgaaggacctgggcatccaggtggataggtacattgcctccgaggtgtgcgaggactccatcaccgtgggaatggtgcgtcatcagggcaagatcatgtacgtgggcgacgtgcggagcgtgacacagaagcatatccaggagtggggccctttcgacctggtgatcggcggcagcccttgcaatgacctgagcatcgtgaacccagcccggaagggcctgtacgagggaaccggcagactgttcttcgagttttacagactgctgcacgacgcccggcctaaggaaggcgacgaccggcccttcttttggctgttcgagaatgtggtggccatgggagtcagcgacaagcgggatattagccggttcctggagagcaaccccgtgatgatcgatgccaaggaagtgagcgccgcccaccgggccagatacttctggggcaatctgcctggcatgaacagacccctggccagcaccgtgaacgacaagctggagctgcaggagtgcctggagcacggccggatcgccaagttcagcaaggtgagaaccatcaccacccgaagcaacagcatcaaacaaggcaaggaccagcactttcctgtgttcatgaacgagaaggaggacatcctgtggtgtaccgagatggagagagtgttcgggttcccagtccactacacagatgtcagcaacatgtctagactggccagacagagactgctgggaagaagctggtccgtccctgtgatcagacacctgttcgcccctctgaaggagtacttcgcctgcgtgagcagcggcaacagcaacgccaacagccggggccccagcttctctagcggcctggtgccactgtccctgagagggagccacatgggccccatggagatctacaaaaccgtgagcgcctggaagcggcagcctgtgcgcgtgctgagcctgtttcggaatatcgataaagtcctgaaaagcctgggattcctggagagcggctctggctccggcggtggcaccctgaagtacgtggaggatgtgacaaacgtggtcagacgggatgtggagaagtggggccccttcgatctggtgtacggcagcacccaacccctgggcagctcttgtgaccggtgccctggctggtacatgtttcagttccaccggatcctgcagtacgccctgccgagacaggagtcccagcggccattcttttggattttcatggacaacttgctgctgaccgaggatgaccaggaaactaccactcggttcctgcagaccgaagccgtgaccctgcaggacgtgagaggccgggactaccagaacgccatgcgggtgtggtccaacatccctggactgaaaagcaagcacgcacctctgacccctaaagaagaggagtacctgcaggcccaggtgcggagcagaagcaagctggacgcccctaaggtggatctgctggtgaagaattgcctcctgcccctgagagagtacttcaagtatttcagccagaatagtctgcccctgggaggcagcggcggcggcgccctggtgacatttgaggacgtcgccgtgcggttcacccaggaggaatgggctctgctggatccttctcagaaaatcctgtaccgggacgtgatgagagagacataccggaatctgacctccgtgggcatcaactgggaatgttgggaccttgaagcctgcttcagaagcctgggaagaaacctgagagtgcaggtggtgaagagaaagtgcgagctgaccaacagcggcccctgcgccgagggcggcccaagcagcggcgcccctcctcccagcggcggcagcccagccggctccccaacctctaccgaggagggcacctctgagtccgccacccccgagagcggccctggcacctccaccgagcccagcgagggcagcgcacccggcagccctgccggcagccccacctccacagaggagggaaccagcaccgagcccagcgaaggcagcgccccaggcaccagcaccgagcctagtgagcaggagattaaacggatcaacaagatcagaagaagacttgtgaaagacagcaacaccaagaaggccggcaagacaggccccatgaaaaccctgctggttagagtgatgacacccgatctgagagagcggctggaaaacctgagaaagaagcctgaaaatatcccccagcccatcagcaatacatctagagccaacctgaataagctgctgaccgattacaccgaaatgaagaaggcgatcctgcatgtgtactgggaagagttccagaaggaccctgtgggcctgatgagccgggtggcccagcctgccagcaagaagatcgatcagaacaagctgaaacctgagatggacgagaagggcaacctgaccaccgccggctttgcctgctctcagtgtggccagcccctgttcgtgtacaagctggagcaggtgtctgagaagggcaaggcttacaccaactacttcggacggtgcaatgtggccgagcacgaaaagctgatcctgctggcccagctgaagcccgagaaggatagcgacgaagccgtgacatatagcctgggaaagtttgggcagagggccctggatttctacagcattcatgtgaccaaggagtccacccaccccgtgaagcccctggcccagatcgccggaaacagatacgcctccggacctgtgggaaaggccctgagcgacgcatgtatgggcacaatcgcctccttcctgtctaagtaccaggacatcatcatcgaacaccagaaggtggtgaagggcaaccagaagagactggagagcctgcgggagctggccggcaaggaaaacctggaataccctagcgtgaccctgccacctcagcctcacaccaaggagggcgttgatgcctacaacgaagtgatcgcccgggtgcgaatgtgggtgaacctgaacctgtggcagaagctgaagctaagcagagatgatgccaagcctctgctgagactgaagggattcccttcctttcctctggtcgagagacaggccaacgaagtggactggtgggacatggtgtgtaacgtgaagaagctgatcaacgagaaaaaggaggatggcaaggtgttttggcagaatctggctggctacaagagacaggaagccctgagaccatacctgagcagcgaggaagatcggaagaagggaaagaaattcgctcggtaccagctgggcgacctgctgctgcacctggaaaagaagcacggcgaggactggggaaaggtgtacgacgaggcctgggagcggattgacaagaaagtggaaggcctgagcaagcacatcaagctggaagaggaacggagaagcgaggacgcccagagcaaggccgccctgaccgactggctgcgggctaaggccagcttcgtgatcgagggcctgaaggaggccgacaaggacgagttctgcagatgcgagctgaagctgcagaagtggtacggggacctgcggggaaagcccttcgccatcgaagccgagaacagcatcctggacatcagcggcttcagcaagcagtacaactgtgccttcatctggcagaaggacggcgtgaagaagctgaacctgtacctgatcatcaactacttcaagggcggcaagctgcggttcaagaagatcaaacctgaagccttcgaagccaacagattctacaccgtgatcaacaaaaagagcggcgagatcgtgcccatggaggtgaacttcaacttcgacgaccccaacctgatcatcctgcctctggcctttggcaagagacagggcagagaattcatctggaacgacctgctgtccctggaaaccggcagcctgaagctggccaacggaagagtgatcgagaagacactgtacaacagaagaacccggcaggatgagcctgccctgttcgtggccctgaccttcgagcggcgggaggtcctggactcctccaatatcaaaccaatgaacctgatcggcgtggcaagaggcgaaaacatccccgccgtgatcgccctgaccgaccccgagggctgcccactgagccggtttaaggatagcctgggaaacccaacccacatcctgagaatcggcgagagctataaggagaagcagcggaccatccaggccaagaaggaggtggagcagcggagagccggcggctacagccggaagtacgccagcaaagccaagaatctggcagacgatatggtgagaaacaccgctagagatctgctgtactacgccgtgacccaggatgccatgctgatcttcgccaacctgagccggggcttcggccggcagggcaagcggaccttcatggccgagagacagtacacacggatggaggactggctgaccgccaagctggcctacgagggcctgagcaagacctacctgtccaagacactggcccagtacacctccaagacatgcagcaactgtgggtttaccatcaccagcgccgactacgacagggtgctggagaagctgaagaagacagcaacaggctggatgaccacaattaacggcaaggagctgaaggtggagggccagattacctactacaacagatacaagagacagaacgtagtcaaggacctgtccgtcgagctggatagactgagcgaagaatctgtgaacaacgacatctcctcctggacaaagggcagaagcggagaagctctgagcctcctgaagaaaagattctcccatagacccgtgcaggagaagttcgtgtgcctgaactgcggcttcgagacacacgcagccgagcaagccgccctgaacatcgccagatcctggctgttcctgcggagccaggagtacaagaaataccagacaaacaagacaaccggcaacaccgataagagagccttcgtcgagacctggcagtccttttaccggaagaagcttaaggaggtgtggaaacctgccgtgcggtctggcggatctggcggaggctccaagcccctggccgtgaggttcgccgacgtggccgtgtacttcagccccgaggagtggggctacctgaggcccgcccagagggccctgtacagggacgtgatgcaggagacctacggccacctgggcgccctgggcttccccggccccaagcccgccctgatcagctggatggagcaggagagcgaggcctggagccccgccgcccaggaccccgaggagggcgagaacctgggcggcgccctgggcggcccaagcagcggcgcccctcctcccagcggcggcagcccagccggctccccaacctctaccgaggagggcacctctgagtccgccacccccgagagcggccctggcacctccaccgagcccagcgagggcagcgcacccggcagccctgccggcagccccacctccacagaggagggaaccagcaccgagcccagcgaaggcagcgccccaggcaccagcaccgagcctagtgagcaggagattaaacggatcaacaagatcagaagaagacttgtgaaagacagcaacaccaagaaggccggcaagacaggccccatgaaaaccctgctggttagagtgatgacacccgatctgagagagcggctggaaaacctgagaaagaagcctgaaaatatcccccagcccatcagcaatacatctagagccaacctgaataagctgctgaccgattacaccgaaatgaagaaggcgatcctgcatgtgtactgggaagagttccagaaggaccctgtgggcctgatgagccgggtggcccagcctgccagcaagaagatcgatcagaacaagctgaaacctgagatggacgagaagggcaacctgaccaccgccggctttgcctgctctcagtgtggccagcccctgttcgtgtacaagctggagcaggtgtctgagaagggcaaggcttacaccaactacttcggacggtgcaatgtggccgagcacgaaaagctgatcctgctggcccagctgaagcccgagaaggatagcgacgaagccgtgacatatagcctgggaaagtttgggcagagggccctggatttctacagcattcatgtgaccaaggagtccacccaccccgtgaagcccctggcccagatcgccggaaacagatacgcctccggacctgtgggaaaggccctgagcgacgcatgtatgggcacaatcgcctccttcctgtctaagtaccaggacatcatcatcgaacaccagaaggtggtgaagggcaaccagaagagactggagagcctgcgggagctggccggcaaggaaaacctggaataccctagcgtgaccctgccacctcagcctcacaccaaggagggcgttgatgcctacaacgaagtgatcgcccgggtgcgaatgtgggtgaacctgaacctgtggcagaagctgaagctaagcagagatgatgccaagcctctgctgagactgaagggattcccttcctttcctctggtcgagagacaggccaacgaagtggactggtgggacatggtgtgtaacgtgaagaagctgatcaacgagaaaaaggaggatggcaaggtgttttggcagaatctggctggctacaagagacaggaagccctgagaccatacctgagcagcgaggaagatcggaagaagggaaagaaattcgctcggtaccagctgggcgacctgctgctgcacctggaaaagaagcacggcgaggactggggaaaggtgtacgacgaggcctgggagcggattgacaagaaagtggaaggcctgagcaagcacatcaagctggaagaggaacggagaagcgaggacgcccagagcaaggccgccctgaccgactggctgcgggctaaggccagcttcgtgatcgagggcctgaaggaggccgacaaggacgagttctgcagatgcgagctgaagctgcagaagtggtacggggacctgcggggaaagcccttcgccatcgaagccgagaacagcatcctggacatcagcggcttcagcaagcagtacaactgtgccttcatctggcagaaggacggcgtgaagaagctgaacctgtacctgatcatcaactacttcaagggcggcaagctgcggttcaagaagatcaaacctgaagccttcgaagccaacagattctacaccgtgatcaacaaaaagagcggcgagatcgtgcccatggaggtgaacttcaacttcgacgaccccaacctgatcatcctgcctctggcctttggcaagagacagggcagagaattcatctggaacgacctgctgtccctggaaaccggcagcctgaagctggccaacggaagagtgatcgagaagacactgtacaacagaagaacccggcaggatgagcctgccctgttcgtggccctgaccttcgagcggcgggaggtcctggactcctccaatatcaaaccaatgaacctgatcggcgtggcaagaggcgaaaacatccccgccgtgatcgccctgaccgaccccgagggctgcccactgagccggtttaaggatagcctgggaaacccaacccacatcctgagaatcggcgagagctataaggagaagcagcggaccatccaggccaagaaggaggtggagcagcggagagccggcggctacagccggaagtacgccagcaaagccaagaatctggcagacgatatggtgagaaacaccgctagagatctgctgtactacgccgtgacccaggatgccatgctgatcttcgccaacctgagccggggcttcggccggcagggcaagcggaccttcatggccgagagacagtacacacggatggaggactggctgaccgccaagctggcctacgagggcctgagcaagacctacctgtccaagacactggcccagtacacctccaagacatgcagcaactgtgggtttaccatcaccagcgccgactacgacagggtgctggagaagctgaagaagacagcaacaggctggatgaccacaattaacggcaaggagctgaaggtggagggccagattacctactacaacagatacaagagacagaacgtagtcaaggacctgtccgtcgagctggatagactgagcgaagaatctgtgaacaacgacatctcctcctggacaaagggcagaagcggagaagctctgagcctcctgaagaaaagattctcccatagacccgtgcaggagaagttcgtgtgcctgaactgcggcttcgagacacacgcagccgagcaagccgccctgaacatcgccagatcctggctgttcctgcggagccaggagtacaagaaataccagacaaacaagacaaccggcaacaccgataagagagccttcgtcgagacctggcagtccttttaccggaagaagcttaaggaggtgtggaaacctgccgtgcggtctggcggatctggcggaggctcctaagcccctggccgtgaggttcgccgacgtggccgtgtacttcagccccgaggagtggggctacctgaggcccgcccagagggccctgtacagggacgtgatgcaggagacctacggccacctgggcgccctgggcttccccggccccaagcccgccctgatcagctggatggagcaggagagcgaggcctggagccccgccgcccaggaccccgaggagggcgagaacctgggcggcgccctgggatctggctccggcagcggccccaagaaaaagagaaaagtctaagctgccttctgcggggcttgccttctggccatgcccttcttctctcccttgcacctgtacctcttggtctttgaataaagcctgagtaggaaggctagcaaaaaaaaaaaaaaaaaaaaaaaaaaaaaaaaaaaaaaaaaaaaaaaaaaaaaaaaaaaaaaaaaaaaaaaaaaaaaaaa

SEQ ID NO: 15441 - RNA, 9485 nt, synthetic construct
  source 1..9485: mol_type = other RNA
aggaaataagagagaaaagaagagtaagaagaaatataagagccaccatggcccctaagaagaagcgtaaagtgagccggatggaacgcctcgtctacgaggtgcggcagaagtgcagaaacatcgaggacatctgcatctcctgcggatctctgaacgtgaccctggagcacccactgttcatcggcggcatgtgccagaactgtaaaaactgttttctggagtgtgcctatcaatacgacgatgacggctaccagagctactgcaccatctgttgcggcggaagagaggtgctgatgtgtggaaataacaactgctgccggtgcttctgcgtggaatgcgtggacctgctggtgggccccggcgccgcccaggccgctattaaggaagatccttggaactgctacatgtgcggccacaagggcacatacggcctgctgagacggagagaggactggcctagcagactgcagatgttcttcgccaataaccacgaccaggagttcgacccccctaaggtgtaccctcccgtccccgccgagaagagaaagcccatccgggtcctgagcctgttcgatggcatcgccaccggtctgctggtgctgaaggacctgggcatccaggtggataggtacattgcctccgaggtgtgcgaggactccatcaccgtgggaatggtgcgtcatcagggcaagatcatgtacgtgggcgacgtgcggagcgtgacacagaagcatatccaggagtggggccctttcgacctggtgatcggcggcagcccttgcaatgacctgagcatcgtgaacccagcccggaagggcctgtacgagggaaccggcagactgttcttcgagttttacagactgctgcacgacgcccggcctaaggaaggcgacgaccggcccttcttttggctgttcgagaatgtggtggccatgggagtcagcgacaagcgggatattagccggttcctggagagcaaccccgtgatgatcgatgccaaggaagtgagcgccgcccaccgggccagatacttctggggcaatctgcctggcatgaacagacccctggccagcaccgtgaacgacaagctggagctgcaggagtgcctggagcacggccggatcgccaagttcagcaaggtgagaaccatcaccacccgaagcaacagcatcaaacaaggcaaggaccagcactttcctgtgttcatgaacgagaaggaggacatcctgtggtgtaccgagatggagagagtgttcgggttcccagtccactacacagatgtcagcaacatgtctagactggccagacagagactgctgggaagaagctggtccgtccctgtgatcagacacctgttcgcccctctgaaggagtacttcgcctgcgtgagcagcggcaacagcaacgccaacagccggggccccagcttctctagcggcctggtgccactgtccctgagagggagccacatgggccccatggagatctacaaaaccgtgagcgcctggaagcggcagcctgtgcgcgtgctgagcctgtttcggaatatcgataaagtcctgaaaagcctgggattcctggagagcggctctggctccggcggtggcaccctgaagtacgtggaggatgtgacaaacgtggtcagacgggatgtggagaagtggggccccttcgatctggtgtacggcagcacccaacccctgggcagctcttgtgaccggtgccctggctggtacatgtttcagttccaccggatcctgcagtacgccctgccgagacaggagtcccagcggccattcttttggattttcatggacaacttgctgctgaccgaggatgaccaggaaactaccactcggttcctgcagaccgaagccgtgaccctgcaggacgtgagaggccgggactaccagaacgccatgcgggtgtggtccaacatccctggactgaaaagcaagcacgcacctctgacccctaaagaagaggagtacctgcaggcccaggtgcggagcagaagcaagctggacgcccctaaggtggatctgctggtgaagaattgcctcctgcccctgagagagtacttcaagtatttcagccagaatagtctgcccctgggaggcagcggcggcggcgccctggtgacatttgaggacgtcgccgtgcggttcacccaggaggaatgggctctgctggatccttctcagaaaatcctgtaccgggacgtgatgagagagacataccggaatctgacctccgtgggcatcaactgggaatgttgggaccttgaagcctgcttcagaagcctgggaagaaacctgagagtgcaggtggtgaagagaaagtgcgagctgaccaacagcggcccctgcgccgagggcggcccaagcagcggcgcccctcctcccagcggcggcagcccagccggctccccaacctctaccgaggagggcacctctgagtccgccacccccgagagcggccctggcacctccaccgagcccagcgagggcagcgcacccggcagccctgccggcagccccacctccacagaggagggaaccagcaccgagcccagcgaaggcagcgccccaggcaccagcaccgagcctagtgagcaggagattaaacggatcaacaagatcagaagaagacttgtgaaagacagcaacaccaagaaggccggcaagacaggccccatgaaaaccctgctggttagagtgatgacacccgatctgagagagcggctggaaaacctgagaaagaagcctgaaaatatcccccagcccatcagcaatacatctagagccaacctgaataagctgctgaccgattacaccgaaatgaagaaggcgatcctgcatgtgtactgggaagagttccagaaggaccctgtgggcctgatgagccgggtggcccagcctgccagcaagaagatcgatcagaacaagctgaaacctgagatggacgagaagggcaacctgaccaccgccggctttgcctgctctcagtgtggccagcccctgttcgtgtacaagctggagcaggtgtctgagaagggcaaggcttacaccaactacttcggacggtgcaatgtggccgagcacgaaaagctgatcctgctggcccagctgaagcccgagaaggatagcgacgaagccgtgacatatagcctgggaaagtttgggcagagggccctggatttctacagcattcatgtgaccaaggagtccacccaccccgtgaagcccctggcccagatcgccggaaacagatacgcctccggacctgtgggaaaggccctgagcgacgcatgtatgggcacaatcgcctccttcctgtctaagtaccaggacatcatcatcgaacaccagaaggtggtgaagggcaaccagaagagactggagagcctgcgggagctggccggcaaggaaaacctggaataccctagcgtgaccctgccacctcagcctcacaccaaggagggcgttgatgcctacaacgaagtgatcgcccgggtgcgaatgtgggtgaacctgaacctgtggcagaagctgaagctaagcagagatgatgccaagcctctgctgagactgaagggattcccttcctttcctctggtcgagagacaggccaacgaagtggactggtgggacatggtgtgtaacgtgaagaagctgatcaacgagaaaaaggaggatggcaaggtgttttggcagaatctggctggctacaagagacaggaagccctgagaccatacctgagcagcgaggaagatcggaagaagggaaagaaattcgctcggtaccagctgggcgacctgctgctgcacctggaaaagaagcacggcgaggactggggaaaggtgtacgacgaggcctgggagcggattgacaagaaagtggaaggcctgagcaagcacatcaagctggaagaggaacggagaagcgaggacgcccagagcaaggccgccctgaccgactggctgcgggctaaggccagcttcgtgatcgagggcctgaaggaggccgacaaggacgagttctgcagatgcgagctgaagctgcagaagtggtacggggacctgcggggaaagcccttcgccatcgaagccgagaacagcatcctggacatcagcggcttcagcaagcagtacaactgtgccttcatctggcagaaggacggcgtgaagaagctgaacctgtacctgatcatcaactacttcaagggcggcaagctgcggttcaagaagatcaaacctgaagccttcgaagccaacagattctacaccgtgatcaacaaaaagagcggcgagatcgtgcccatggaggtgaacttcaacttcgacgaccccaacctgatcatcctgcctctggcctttggcaagagacagggcagagaattcatctggaacgacctgctgtccctggaaaccggcagcctgaagctggccaacggaagagtgatcgagaagacactgtacaacagaagaacccggcaggatgagcctgccctgttcgtggccctgaccttcgagcggcgggaggtcctggactcctccaatatcaaaccaatgaacctgatcggcgtggcaagaggcgaaaacatccccgccgtgatcgccctgaccgaccccgagggctgcccactgagccggtttaaggatagcctgggaaacccaacccacatcctgagaatcggcgagagctataaggagaagcagcggaccatccaggccaagaaggaggtggagcagcggagagccggcggctacagccggaagtacgccagcaaagccaagaatctggcagacgatatggtgagaaacaccgctagagatctgctgtactacgccgtgacccaggatgccatgctgatcttcgccaacctgagccggggcttcggccggcagggcaagcggaccttcatggccgagagacagtacacacggatggaggactggctgaccgccaagctggcctacgagggcctgagcaagacctacctgtccaagacactggcccagtacacctccaagacatgcagcaactgtgggtttaccatcaccagcgccgactacgacagggtgctggagaagctgaagaagacagcaacaggctggatgaccacaattaacggcaaggagctgaaggtggagggccagattacctactacaacagatacaagagacagaacgtagtcaaggacctgtccgtcgagctggatagactgagcgaagaatctgtgaacaacgacatctcctcctggacaaagggcagaagcggagaagctctgagcctcctgaagaaaagattctcccatagacccgtgcaggagaagttcgtgtgcctgaactgcggcttcgagacacacgcagccgagcaagccgccctgaacatcgccagatcctggctgttcctgcggagccaggagtacaagaaataccagacaaacaagacaaccggcaacaccgataagagagccttcgtcgagacctggcagtccttttaccggaagaagcttaaggaggtgtggaaacctgccgtgcggtctggcggatctggcggaggctccatggccttcgaggacgtggccgtgtacttcagccaggaggagtggggcctgctggacaccacccagagggccctgtacaggcacgtgatgctggagaacttcaccctggtgaccagcctgggcctgagcaccagcaggccccacgtggtgatccagctggagaggggcgaggagccctgggtgcccagcggcaccgacaccaccctgagcaggaccacctacaggaggaggaaccccggcagcggcggcccaagcagcggcgcccctcctcccagcggcggcagcccagccggctccccaacctctaccgaggagggcacctctgagtccgccacccccgagagcggccctggcacctccaccgagcccagcgagggcagcgcacccggcagccctgccggcagccccacctccacagaggagggaaccagcaccgagcccagcgaaggcagcgccccaggcaccagcaccgagcctagtgagcaggagattaaacggatcaacaagatcagaagaagacttgtgaaagacagcaacaccaagaaggccggcaagacaggccccatgaaaaccctgctggttagagtgatgacacccgatctgagagagcggctggaaaacctgagaaagaagcctgaaaatatcccccagcccatcagcaatacatctagagccaacctgaataagctgctgaccgattacaccgaaatgaagaaggcgatcctgcatgtgtactgggaagagttccagaaggaccctgtgggcctgatgagccgggtggcccagcctgccagcaagaagatcgatcagaacaagctgaaacctgagatggacgagaagggcaacctgaccaccgccggctttgcctgctctcagtgtggccagcccctgttcgtgtacaagctggagcaggtgtctgagaagggcaaggcttacaccaactacttcggacggtgcaatgtggccgagcacgaaaagctgatcctgctggcccagctgaagcccgagaaggatagcgacgaagccgtgacatatagcctgggaaagtttgggcagagggccctggatttctacagcattcatgtgaccaaggagtccacccaccccgtgaagcccctggcccagatcgccggaaacagatacgcctccggacctgtgggaaaggccctgagcgacgcatgtatgggcacaatcgcctccttcctgtctaagtaccaggacatcatcatcgaacaccagaaggtggtgaagggcaaccagaagagactggagagcctgcgggagctggccggcaaggaaaacctggaataccctagcgtgaccctgccacctcagcctcacaccaaggagggcgttgatgcctacaacgaagtgatcgcccgggtgcgaatgtgggtgaacctgaacctgtggcagaagctgaagctaagcagagatgatgccaagcctctgctgagactgaagggattcccttcctttcctctggtcgagagacaggccaacgaagtggactggtgggacatggtgtgtaacgtgaagaagctgatcaacgagaaaaaggaggatggcaaggtgttttggcagaatctggctggctacaagagacaggaagccctgagaccatacctgagcagcgaggaagatcggaagaagggaaagaaattcgctcggtaccagctgggcgacctgctgctgcacctggaaaagaagcacggcgaggactggggaaaggtgtacgacgaggcctgggagcggattgacaagaaagtggaaggcctgagcaagcacatcaagctggaagaggaacggagaagcgaggacgcccagagcaaggccgccctgaccgactggctgcgggctaaggccagcttcgtgatcgagggcctgaaggaggccgacaaggacgagttctgcagatgcgagctgaagctgcagaagtggtacggggacctgcggggaaagcccttcgccatcgaagccgagaacagcatcctggacatcagcggcttcagcaagcagtacaactgtgccttcatctggcagaaggacggcgtgaagaagctgaacctgtacctgatcatcaactacttcaagggcggcaagctgcggttcaagaagatcaaacctgaagccttcgaagccaacagattctacaccgtgatcaacaaaaagagcggcgagatcgtgcccatggaggtgaacttcaacttcgacgaccccaacctgatcatcctgcctctggcctttggcaagagacagggcagagaattcatctggaacgacctgctgtccctggaaaccggcagcctgaagctggccaacggaagagtgatcgagaagacactgtacaacagaagaacccggcaggatgagcctgccctgttcgtggccctgaccttcgagcggcgggaggtcctggactcctccaatatcaaaccaatgaacctgatcggcgtggcaagaggcgaaaacatccccgccgtgatcgccctgaccgaccccgagggctgcccactgagccggtttaaggatagcctgggaaacccaacccacatcctgagaatcggcgagagctataaggagaagcagcggaccatccaggccaagaaggaggtggagcagcggagagccggcggctacagccggaagtacgccagcaaagccaagaatctggcagacgatatggtgagaaacaccgctagagatctgctgtactacgccgtgacccaggatgccatgctgatcttcgccaacctgagccggggcttcggccggcagggcaagcggaccttcatggccgagagacagtacacacggatggaggactggctgaccgccaagctggcctacgagggcctgagcaagacctacctgtccaagacactggcccagtacacctccaagacatgcagcaactgtgggtttaccatcaccagcgccgactacgacagggtgctggagaagctgaagaagacagcaacaggctggatgaccacaattaacggcaaggagctgaaggtggagggccagattacctactacaacagatacaagagacagaacgtagtcaaggacctgtccgtcgagctggatagactgagcgaagaatctgtgaacaacgacatctcctcctggacaaagggcagaagcggagaagctctgagcctcctgaagaaaagattctcccatagacccgtgcaggagaagttcgtgtgcctgaactgcggcttcgagacacacgcagccgagcaagccgccctgaacatcgccagatcctggctgttcctgcggagccaggagtacaagaaataccagacaaacaagacaaccggcaacaccgataagagagccttcgtcgagacctggcagtccttttaccggaagaagcttaaggaggtgtggaaacctgccgtgcggtctggcggatctggcggaggctcctatggccttcgaggacgtggccgtgtacttcagccaggaggagtggggcctgctggacaccacccagagggccctgtacaggcacgtgatgctggagaacttcaccctggtgaccagcctgggcctgagcaccagcaggccccacgtggtgatccagctggagaggggcgaggagccctgggtgcccagcggcaccgacaccaccctgagcaggaccacctacaggaggaggaaccccggcagcggatctggctccggcagcggccccaagaaaaagagaaaagtctaagctgccttctgcggggcttgccttctggccatgcccttcttctctcccttgcacctgtacctcttggtctttgaataaagcctgagtaggaaggctagcaaaaaaaaaaaaaaaaaaaaaaaaaaaaaaaaaaaaaaaaaaaaaaaaaaaaaaaaaaaaaaaaaaaaaaaaaaaaaaaa

SEQ ID NO: 15442 - RNA, 9485 nt, synthetic construct
  source 1..9485: mol_type = other RNA
aggaaataagagagaaaagaagagtaagaagaaatataagagccaccatggcccctaagaagaagcgtaaagtgagccggatggaacgcctcgtctacgaggtgcggcagaagtgcagaaacatcgaggacatctgcatctcctgcggatctctgaacgtgaccctggagcacccactgttcatcggcggcatgtgccagaactgtaaaaactgttttctggagtgtgcctatcaatacgacgatgacggctaccagagctactgcaccatctgttgcggcggaagagaggtgctgatgtgtggaaataacaactgctgccggtgcttctgcgtggaatgcgtggacctgctggtgggccccggcgccgcccaggccgctattaaggaagatccttggaactgctacatgtgcggccacaagggcacatacggcctgctgagacggagagaggactggcctagcagactgcagatgttcttcgccaataaccacgaccaggagttcgacccccctaaggtgtaccctcccgtccccgccgagaagagaaagcccatccgggtcctgagcctgttcgatggcatcgccaccggtctgctggtgctgaaggacctgggcatccaggtggataggtacattgcctccgaggtgtgcgaggactccatcaccgtgggaatggtgcgtcatcagggcaagatcatgtacgtgggcgacgtgcggagcgtgacacagaagcatatccaggagtggggccctttcgacctggtgatcggcggcagcccttgcaatgacctgagcatcgtgaacccagcccggaagggcctgtacgagggaaccggcagactgttcttcgagttttacagactgctgcacgacgcccggcctaaggaaggcgacgaccggcccttcttttggctgttcgagaatgtggtggccatgggagtcagcgacaagcgggatattagccggttcctggagagcaaccccgtgatgatcgatgccaaggaagtgagcgccgcccaccgggccagatacttctggggcaatctgcctggcatgaacagacccctggccagcaccgtgaacgacaagctggagctgcaggagtgcctggagcacggccggatcgccaagttcagcaaggtgagaaccatcaccacccgaagcaacagcatcaaacaaggcaaggaccagcactttcctgtgttcatgaacgagaaggaggacatcctgtggtgtaccgagatggagagagtgttcgggttcccagtccactacacagatgtcagcaacatgtctagactggccagacagagactgctgggaagaagctggtccgtccctgtgatcagacacctgttcgcccctctgaaggagtacttcgcctgcgtgagcagcggcaacagcaacgccaacagccggggccccagcttctctagcggcctggtgccactgtccctgagagggagccacatgggccccatggagatctacaaaaccgtgagcgcctggaagcggcagcctgtgcgcgtgctgagcctgtttcggaatatcgataaagtcctgaaaagcctgggattcctggagagcggctctggctccggcggtggcaccctgaagtacgtggaggatgtgacaaacgtggtcagacgggatgtggagaagtggggccccttcgatctggtgtacggcagcacccaacccctgggcagctcttgtgaccggtgccctggctggtacatgtttcagttccaccggatcctgcagtacgccctgccgagacaggagtcccagcggccattcttttggattttcatggacaacttgctgctgaccgaggatgaccaggaaactaccactcggttcctgcagaccgaagccgtgaccctgcaggacgtgagaggccgggactaccagaacgccatgcgggtgtggtccaacatccctggactgaaaagcaagcacgcacctctgacccctaaagaagaggagtacctgcaggcccaggtgcggagcagaagcaagctggacgcccctaaggtggatctgctggtgaagaattgcctcctgcccctgagagagtacttcaagtatttcagccagaatagtctgcccctgggaggcagcggcggcggcgccctggtgacatttgaggacgtcgccgtgcggttcacccaggaggaatgggctctgctggatccttctcagaaaatcctgtaccgggacgtgatgagagagacataccggaatctgacctccgtgggcatcaactgggaatgttgggaccttgaagcctgcttcagaagcctgggaagaaacctgagagtgcaggtggtgaagagaaagtgcgagctgaccaacagcggcccctgcgccgagggcggcccaagcagcggcgcccctcctcccagcggcggcagcccagccggctccccaacctctaccgaggagggcacctctgagtccgccacccccgagagcggccctggcacctccaccgagcccagcgagggcagcgcacccggcagccctgccggcagccccacctccacagaggagggaaccagcaccgagcccagcgaaggcagcgccccaggcaccagcaccgagcctagtgagcaggagattaaacggatcaacaagatcagaagaagacttgtgaaagacagcaacaccaagaaggccggcaagacaggccccatgaaaaccctgctggttagagtgatgacacccgatctgagagagcggctggaaaacctgagaaagaagcctgaaaatatcccccagcccatcagcaatacatctagagccaacctgaataagctgctgaccgattacaccgaaatgaagaaggcgatcctgcatgtgtactgggaagagttccagaaggaccctgtgggcctgatgagccgggtggcccagcctgccagcaagaagatcgatcagaacaagctgaaacctgagatggacgagaagggcaacctgaccaccgccggctttgcctgctctcagtgtggccagcccctgttcgtgtacaagctggagcaggtgtctgagaagggcaaggcttacaccaactacttcggacggtgcaatgtggccgagcacgaaaagctgatcctgctggcccagctgaagcccgagaaggatagcgacgaagccgtgacatatagcctgggaaagtttgggcagagggccctggatttctacagcattcatgtgaccaaggagtccacccaccccgtgaagcccctggcccagatcgccggaaacagatacgcctccggacctgtgggaaaggccctgagcgacgcatgtatgggcacaatcgcctccttcctgtctaagtaccaggacatcatcatcgaacaccagaaggtggtgaagggcaaccagaagagactggagagcctgcgggagctggccggcaaggaaaacctggaataccctagcgtgaccctgccacctcagcctcacaccaaggagggcgttgatgcctacaacgaagtgatcgcccgggtgcgaatgtgggtgaacctgaacctgtggcagaagctgaagctaagcagagatgatgccaagcctctgctgagactgaagggattcccttcctttcctctggtcgagagacaggccaacgaagtggactggtgggacatggtgtgtaacgtgaagaagctgatcaacgagaaaaaggaggatggcaaggtgttttggcagaatctggctggctacaagagacaggaagccctgagaccatacctgagcagcgaggaagatcggaagaagggaaagaaattcgctcggtaccagctgggcgacctgctgctgcacctggaaaagaagcacggcgaggactggggaaaggtgtacgacgaggcctgggagcggattgacaagaaagtggaaggcctgagcaagcacatcaagctggaagaggaacggagaagcgaggacgcccagagcaaggccgccctgaccgactggctgcgggctaaggccagcttcgtgatcgagggcctgaaggaggccgacaaggacgagttctgcagatgcgagctgaagctgcagaagtggtacggggacctgcggggaaagcccttcgccatcgaagccgagaacagcatcctggacatcagcggcttcagcaagcagtacaactgtgccttcatctggcagaaggacggcgtgaagaagctgaacctgtacctgatcatcaactacttcaagggcggcaagctgcggttcaagaagatcaaacctgaagccttcgaagccaacagattctacaccgtgatcaacaaaaagagcggcgagatcgtgcccatggaggtgaacttcaacttcgacgaccccaacctgatcatcctgcctctggcctttggcaagagacagggcagagaattcatctggaacgacctgctgtccctggaaaccggcagcctgaagctggccaacggaagagtgatcgagaagacactgtacaacagaagaacccggcaggatgagcctgccctgttcgtggccctgaccttcgagcggcgggaggtcctggactcctccaatatcaaaccaatgaacctgatcggcgtggcaagaggcgaaaacatccccgccgtgatcgccctgaccgaccccgagggctgcccactgagccggtttaaggatagcctgggaaacccaacccacatcctgagaatcggcgagagctataaggagaagcagcggaccatccaggccaagaaggaggtggagcagcggagagccggcggctacagccggaagtacgccagcaaagccaagaatctggcagacgatatggtgagaaacaccgctagagatctgctgtactacgccgtgacccaggatgccatgctgatcttcgccaacctgagccggggcttcggccggcagggcaagcggaccttcatggccgagagacagtacacacggatggaggactggctgaccgccaagctggcctacgagggcctgagcaagacctacctgtccaagacactggcccagtacacctccaagacatgcagcaactgtgggtttaccatcaccagcgccgactacgacagggtgctggagaagctgaagaagacagcaacaggctggatgaccacaattaacggcaaggagctgaaggtggagggccagattacctactacaacagatacaagagacagaacgtagtcaaggacctgtccgtcgagctggatagactgagcgaagaatctgtgaacaacgacatctcctcctggacaaagggcagaagcggagaagctctgagcctcctgaagaaaagattctcccatagacccgtgcaggagaagttcgtgtgcctgaactgcggcttcgagacacacgcagccgagcaagccgccctgaacatcgccagatcctggctgttcctgcggagccaggagtacaagaaataccagacaaacaagacaaccggcaacaccgataagagagccttcgtcgagacctggcagtccttttaccggaagaagcttaaggaggtgtggaaacctgccgtgcggtctggcggatctggcggaggctccgccctggtgaccttcgaggacgtggccgtgaggttcacccaggaggagtgggccctgctggaccccagccagaagatcctgtacagggacgtgatgagggagacctacaggaacctgaccagcgtgggcatcaactgggagtgctgggacctggaggcctgcttcaggagcctgggcaggaacctgagggtgcaggtggtgaagaggaagtgcgagctgaccaacagcggcccctgcgccgagggcggcccaagcagcggcgcccctcctcccagcggcggcagcccagccggctccccaacctctaccgaggagggcacctctgagtccgccacccccgagagcggccctggcacctccaccgagcccagcgagggcagcgcacccggcagccctgccggcagccccacctccacagaggagggaaccagcaccgagcccagcgaaggcagcgccccaggcaccagcaccgagcctagtgagcaggagattaaacggatcaacaagatcagaagaagacttgtgaaagacagcaacaccaagaaggccggcaagacaggccccatgaaaaccctgctggttagagtgatgacacccgatctgagagagcggctggaaaacctgagaaagaagcctgaaaatatcccccagcccatcagcaatacatctagagccaacctgaataagctgctgaccgattacaccgaaatgaagaaggcgatcctgcatgtgtactgggaagagttccagaaggaccctgtgggcctgatgagccgggtggcccagcctgccagcaagaagatcgatcagaacaagctgaaacctgagatggacgagaagggcaacctgaccaccgccggctttgcctgctctcagtgtggccagcccctgttcgtgtacaagctggagcaggtgtctgagaagggcaaggcttacaccaactacttcggacggtgcaatgtggccgagcacgaaaagctgatcctgctggcccagctgaagcccgagaaggatagcgacgaagccgtgacatatagcctgggaaagtttgggcagagggccctggatttctacagcattcatgtgaccaaggagtccacccaccccgtgaagcccctggcccagatcgccggaaacagatacgcctccggacctgtgggaaaggccctgagcgacgcatgtatgggcacaatcgcctccttcctgtctaagtaccaggacatcatcatcgaacaccagaaggtggtgaagggcaaccagaagagactggagagcctgcgggagctggccggcaaggaaaacctggaataccctagcgtgaccctgccacctcagcctcacaccaaggagggcgttgatgcctacaacgaagtgatcgcccgggtgcgaatgtgggtgaacctgaacctgtggcagaagctgaagctaagcagagatgatgccaagcctctgctgagactgaagggattcccttcctttcctctggtcgagagacaggccaacgaagtggactggtgggacatggtgtgtaacgtgaagaagctgatcaacgagaaaaaggaggatggcaaggtgttttggcagaatctggctggctacaagagacaggaagccctgagaccatacctgagcagcgaggaagatcggaagaagggaaagaaattcgctcggtaccagctgggcgacctgctgctgcacctggaaaagaagcacggcgaggactggggaaaggtgtacgacgaggcctgggagcggattgacaagaaagtggaaggcctgagcaagcacatcaagctggaagaggaacggagaagcgaggacgcccagagcaaggccgccctgaccgactggctgcgggctaaggccagcttcgtgatcgagggcctgaaggaggccgacaaggacgagttctgcagatgcgagctgaagctgcagaagtggtacggggacctgcggggaaagcccttcgccatcgaagccgagaacagcatcctggacatcagcggcttcagcaagcagtacaactgtgccttcatctggcagaaggacggcgtgaagaagctgaacctgtacctgatcatcaactacttcaagggcggcaagctgcggttcaagaagatcaaacctgaagccttcgaagccaacagattctacaccgtgatcaacaaaaagagcggcgagatcgtgcccatggaggtgaacttcaacttcgacgaccccaacctgatcatcctgcctctggcctttggcaagagacagggcagagaattcatctggaacgacctgctgtccctggaaaccggcagcctgaagctggccaacggaagagtgatcgagaagacactgtacaacagaagaacccggcaggatgagcctgccctgttcgtggccctgaccttcgagcggcgggaggtcctggactcctccaatatcaaaccaatgaacctgatcggcgtggcaagaggcgaaaacatccccgccgtgatcgccctgaccgaccccgagggctgcccactgagccggtttaaggatagcctgggaaacccaacccacatcctgagaatcggcgagagctataaggagaagcagcggaccatccaggccaagaaggaggtggagcagcggagagccggcggctacagccggaagtacgccagcaaagccaagaatctggcagacgatatggtgagaaacaccgctagagatctgctgtactacgccgtgacccaggatgccatgctgatcttcgccaacctgagccggggcttcggccggcagggcaagcggaccttcatggccgagagacagtacacacggatggaggactggctgaccgccaagctggcctacgagggcctgagcaagacctacctgtccaagacactggcccagtacacctccaagacatgcagcaactgtgggtttaccatcaccagcgccgactacgacagggtgctggagaagctgaagaagacagcaacaggctggatgaccacaattaacggcaaggagctgaaggtggagggccagattacctactacaacagatacaagagacagaacgtagtcaaggacctgtccgtcgagctggatagactgagcgaagaatctgtgaacaacgacatctcctcctggacaaagggcagaagcggagaagctctgagcctcctgaagaaaagattctcccatagacccgtgcaggagaagttcgtgtgcctgaactgcggcttcgagacacacgcagccgagcaagccgccctgaacatcgccagatcctggctgttcctgcggagccaggagtacaagaaataccagacaaacaagacaaccggcaacaccgataagagagccttcgtcgagacctggcagtccttttaccggaagaagcttaaggaggtgtggaaacctgccgtgcggtctggcggatctggcggaggctcctgccctggtgaccttcgaggacgtggccgtgaggttcacccaggaggagtgggccctgctggaccccagccagaagatcctgtacagggacgtgatgagggagacctacaggaacctgaccagcgtgggcatcaactgggagtgctgggacctggaggcctgcttcaggagcctgggcaggaacctgagggtgcaggtggtgaagaggaagtgcgagctgaccaacagcggcccctgcgccgagggatctggctccggcagcggccccaagaaaaagagaaaagtctaagctgccttctgcggggcttgccttctggccatgcccttcttctctcccttgcacctgtacctcttggtctttgaataaagcctgagtaggaaggctagcaaaaaaaaaaaaaaaaaaaaaaaaaaaaaaaaaaaaaaaaaaaaaaaaaaaaaaaaaaaaaaaaaaaaaaaaaaaaaaaa

SEQ ID NO: 15443 - RNA, 9485 nt, synthetic construct
  source 1..9485: mol_type = other RNA
aggaaataagagagaaaagaagagtaagaagaaatataagagccaccatggcccctaagaagaagcgtaaagtgagccggatggaacgcctcgtctacgaggtgcggcagaagtgcagaaacatcgaggacatctgcatctcctgcggatctctgaacgtgaccctggagcacccactgttcatcggcggcatgtgccagaactgtaaaaactgttttctggagtgtgcctatcaatacgacgatgacggctaccagagctactgcaccatctgttgcggcggaagagaggtgctgatgtgtggaaataacaactgctgccggtgcttctgcgtggaatgcgtggacctgctggtgggccccggcgccgcccaggccgctattaaggaagatccttggaactgctacatgtgcggccacaagggcacatacggcctgctgagacggagagaggactggcctagcagactgcagatgttcttcgccaataaccacgaccaggagttcgacccccctaaggtgtaccctcccgtccccgccgagaagagaaagcccatccgggtcctgagcctgttcgatggcatcgccaccggtctgctggtgctgaaggacctgggcatccaggtggataggtacattgcctccgaggtgtgcgaggactccatcaccgtgggaatggtgcgtcatcagggcaagatcatgtacgtgggcgacgtgcggagcgtgacacagaagcatatccaggagtggggccctttcgacctggtgatcggcggcagcccttgcaatgacctgagcatcgtgaacccagcccggaagggcctgtacgagggaaccggcagactgttcttcgagttttacagactgctgcacgacgcccggcctaaggaaggcgacgaccggcccttcttttggctgttcgagaatgtggtggccatgggagtcagcgacaagcgggatattagccggttcctggagagcaaccccgtgatgatcgatgccaaggaagtgagcgccgcccaccgggccagatacttctggggcaatctgcctggcatgaacagacccctggccagcaccgtgaacgacaagctggagctgcaggagtgcctggagcacggccggatcgccaagttcagcaaggtgagaaccatcaccacccgaagcaacagcatcaaacaaggcaaggaccagcactttcctgtgttcatgaacgagaaggaggacatcctgtggtgtaccgagatggagagagtgttcgggttcccagtccactacacagatgtcagcaacatgtctagactggccagacagagactgctgggaagaagctggtccgtccctgtgatcagacacctgttcgcccctctgaaggagtacttcgcctgcgtgagcagcggcaacagcaacgccaacagccggggccccagcttctctagcggcctggtgccactgtccctgagagggagccacatgggccccatggagatctacaaaaccgtgagcgcctggaagcggcagcctgtgcgcgtgctgagcctgtttcggaatatcgataaagtcctgaaaagcctgggattcctggagagcggctctggctccggcggtggcaccctgaagtacgtggaggatgtgacaaacgtggtcagacgggatgtggagaagtggggccccttcgatctggtgtacggcagcacccaacccctgggcagctcttgtgaccggtgccctggctggtacatgtttcagttccaccggatcctgcagtacgccctgccgagacaggagtcccagcggccattcttttggattttcatggacaacttgctgctgaccgaggatgaccaggaaactaccactcggttcctgcagaccgaagccgtgaccctgcaggacgtgagaggccgggactaccagaacgccatgcgggtgtggtccaacatccctggactgaaaagcaagcacgcacctctgacccctaaagaagaggagtacctgcaggcccaggtgcggagcagaagcaagctggacgcccctaaggtggatctgctggtgaagaattgcctcctgcccctgagagagtacttcaagtatttcagccagaatagtctgcccctgggaggcagcggcggcggcgccctggtgacatttgaggacgtcgccgtgcggttcacccaggaggaatgggctctgctggatccttctcagaaaatcctgtaccgggacgtgatgagagagacataccggaatctgacctccgtgggcatcaactgggaatgttgggaccttgaagcctgcttcagaagcctgggaagaaacctgagagtgcaggtggtgaagagaaagtgcgagctgaccaacagcggcccctgcgccgagggcggcccaagcagcggcgcccctcctcccagcggcggcagcccagccggctccccaacctctaccgaggagggcacctctgagtccgccacccccgagagcggccctggcacctccaccgagcccagcgagggcagcgcacccggcagccctgccggcagccccacctccacagaggagggaaccagcaccgagcccagcgaaggcagcgccccaggcaccagcaccgagcctagtgagcaggagattaaacggatcaacaagatcagaagaagacttgtgaaagacagcaacaccaagaaggccggcaagacaggccccatgaaaaccctgctggttagagtgatgacacccgatctgagagagcggctggaaaacctgagaaagaagcctgaaaatatcccccagcccatcagcaatacatctagagccaacctgaataagctgctgaccgattacaccgaaatgaagaaggcgatcctgcatgtgtactgggaagagttccagaaggaccctgtgggcctgatgagccgggtggcccagcctgccagcaagaagatcgatcagaacaagctgaaacctgagatggacgagaagggcaacctgaccaccgccggctttgcctgctctcagtgtggccagcccctgttcgtgtacaagctggagcaggtgtctgagaagggcaaggcttacaccaactacttcggacggtgcaatgtggccgagcacgaaaagctgatcctgctggcccagctgaagcccgagaaggatagcgacgaagccgtgacatatagcctgggaaagtttgggcagagggccctggatttctacagcattcatgtgaccaaggagtccacccaccccgtgaagcccctggcccagatcgccggaaacagatacgcctccggacctgtgggaaaggccctgagcgacgcatgtatgggcacaatcgcctccttcctgtctaagtaccaggacatcatcatcgaacaccagaaggtggtgaagggcaaccagaagagactggagagcctgcgggagctggccggcaaggaaaacctggaataccctagcgtgaccctgccacctcagcctcacaccaaggagggcgttgatgcctacaacgaagtgatcgcccgggtgcgaatgtgggtgaacctgaacctgtggcagaagctgaagctaagcagagatgatgccaagcctctgctgagactgaagggattcccttcctttcctctggtcgagagacaggccaacgaagtggactggtgggacatggtgtgtaacgtgaagaagctgatcaacgagaaaaaggaggatggcaaggtgttttggcagaatctggctggctacaagagacaggaagccctgagaccatacctgagcagcgaggaagatcggaagaagggaaagaaattcgctcggtaccagctgggcgacctgctgctgcacctggaaaagaagcacggcgaggactggggaaaggtgtacgacgaggcctgggagcggattgacaagaaagtggaaggcctgagcaagcacatcaagctggaagaggaacggagaagcgaggacgcccagagcaaggccgccctgaccgactggctgcgggctaaggccagcttcgtgatcgagggcctgaaggaggccgacaaggacgagttctgcagatgcgagctgaagctgcagaagtggtacggggacctgcggggaaagcccttcgccatcgaagccgagaacagcatcctggacatcagcggcttcagcaagcagtacaactgtgccttcatctggcagaaggacggcgtgaagaagctgaacctgtacctgatcatcaactacttcaagggcggcaagctgcggttcaagaagatcaaacctgaagccttcgaagccaacagattctacaccgtgatcaacaaaaagagcggcgagatcgtgcccatggaggtgaacttcaacttcgacgaccccaacctgatcatcctgcctctggcctttggcaagagacagggcagagaattcatctggaacgacctgctgtccctggaaaccggcagcctgaagctggccaacggaagagtgatcgagaagacactgtacaacagaagaacccggcaggatgagcctgccctgttcgtggccctgaccttcgagcggcgggaggtcctggactcctccaatatcaaaccaatgaacctgatcggcgtggcaagaggcgaaaacatccccgccgtgatcgccctgaccgaccccgagggctgcccactgagccggtttaaggatagcctgggaaacccaacccacatcctgagaatcggcgagagctataaggagaagcagcggaccatccaggccaagaaggaggtggagcagcggagagccggcggctacagccggaagtacgccagcaaagccaagaatctggcagacgatatggtgagaaacaccgctagagatctgctgtactacgccgtgacccaggatgccatgctgatcttcgccaacctgagccggggcttcggccggcagggcaagcggaccttcatggccgagagacagtacacacggatggaggactggctgaccgccaagctggcctacgagggcctgagcaagacctacctgtccaagacactggcccagtacacctccaagacatgcagcaactgtgggtttaccatcaccagcgccgactacgacagggtgctggagaagctgaagaagacagcaacaggctggatgaccacaattaacggcaaggagctgaaggtggagggccagattacctactacaacagatacaagagacagaacgtagtcaaggacctgtccgtcgagctggatagactgagcgaagaatctgtgaacaacgacatctcctcctggacaaagggcagaagcggagaagctctgagcctcctgaagaaaagattctcccatagacccgtgcaggagaagttcgtgtgcctgaactgcggcttcgagacacacgcagccgagcaagccgccctgaacatcgccagatcctggctgttcctgcggagccaggagtacaagaaataccagacaaacaagacaaccggcaacaccgataagagagccttcgtcgagacctggcagtccttttaccggaagaagcttaaggaggtgtggaaacctgccgtgcggtctggcggatctggcggaggctccgtgctgggcctggtgaccttcggcgacgtggccatcgacttcagcagggaggagtgggagtggctgaacagcgcccagaggaccctgcacagggacgtgatgctggagaactacaggaacctggtgagcctgggcctgtgcgtgagcaagcccgacatgatcagcagcctggagcagaggaaggagccctggatggtgaagaggaagctgaccaggggcaggtgccccgacctgaagaccatgggcggcccaagcagcggcgcccctcctcccagcggcggcagcccagccggctccccaacctctaccgaggagggcacctctgagtccgccacccccgagagcggccctggcacctccaccgagcccagcgagggcagcgcacccggcagccctgccggcagccccacctccacagaggagggaaccagcaccgagcccagcgaaggcagcgccccaggcaccagcaccgagcctagtgagcaggagattaaacggatcaacaagatcagaagaagacttgtgaaagacagcaacaccaagaaggccggcaagacaggccccatgaaaaccctgctggttagagtgatgacacccgatctgagagagcggctggaaaacctgagaaagaagcctgaaaatatcccccagcccatcagcaatacatctagagccaacctgaataagctgctgaccgattacaccgaaatgaagaaggcgatcctgcatgtgtactgggaagagttccagaaggaccctgtgggcctgatgagccgggtggcccagcctgccagcaagaagatcgatcagaacaagctgaaacctgagatggacgagaagggcaacctgaccaccgccggctttgcctgctctcagtgtggccagcccctgttcgtgtacaagctggagcaggtgtctgagaagggcaaggcttacaccaactacttcggacggtgcaatgtggccgagcacgaaaagctgatcctgctggcccagctgaagcccgagaaggatagcgacgaagccgtgacatatagcctgggaaagtttgggcagagggccctggatttctacagcattcatgtgaccaaggagtccacccaccccgtgaagcccctggcccagatcgccggaaacagatacgcctccggacctgtgggaaaggccctgagcgacgcatgtatgggcacaatcgcctccttcctgtctaagtaccaggacatcatcatcgaacaccagaaggtggtgaagggcaaccagaagagactggagagcctgcgggagctggccggcaaggaaaacctggaataccctagcgtgaccctgccacctcagcctcacaccaaggagggcgttgatgcctacaacgaagtgatcgcccgggtgcgaatgtgggtgaacctgaacctgtggcagaagctgaagctaagcagagatgatgccaagcctctgctgagactgaagggattcccttcctttcctctggtcgagagacaggccaacgaagtggactggtgggacatggtgtgtaacgtgaagaagctgatcaacgagaaaaaggaggatggcaaggtgttttggcagaatctggctggctacaagagacaggaagccctgagaccatacctgagcagcgaggaagatcggaagaagggaaagaaattcgctcggtaccagctgggcgacctgctgctgcacctggaaaagaagcacggcgaggactggggaaaggtgtacgacgaggcctgggagcggattgacaagaaagtggaaggcctgagcaagcacatcaagctggaagaggaacggagaagcgaggacgcccagagcaaggccgccctgaccgactggctgcgggctaaggccagcttcgtgatcgagggcctgaaggaggccgacaaggacgagttctgcagatgcgagctgaagctgcagaagtggtacggggacctgcggggaaagcccttcgccatcgaagccgagaacagcatcctggacatcagcggcttcagcaagcagtacaactgtgccttcatctggcagaaggacggcgtgaagaagctgaacctgtacctgatcatcaactacttcaagggcggcaagctgcggttcaagaagatcaaacctgaagccttcgaagccaacagattctacaccgtgatcaacaaaaagagcggcgagatcgtgcccatggaggtgaacttcaacttcgacgaccccaacctgatcatcctgcctctggcctttggcaagagacagggcagagaattcatctggaacgacctgctgtccctggaaaccggcagcctgaagctggccaacggaagagtgatcgagaagacactgtacaacagaagaacccggcaggatgagcctgccctgttcgtggccctgaccttcgagcggcgggaggtcctggactcctccaatatcaaaccaatgaacctgatcggcgtggcaagaggcgaaaacatccccgccgtgatcgccctgaccgaccccgagggctgcccactgagccggtttaaggatagcctgggaaacccaacccacatcctgagaatcggcgagagctataaggagaagcagcggaccatccaggccaagaaggaggtggagcagcggagagccggcggctacagccggaagtacgccagcaaagccaagaatctggcagacgatatggtgagaaacaccgctagagatctgctgtactacgccgtgacccaggatgccatgctgatcttcgccaacctgagccggggcttcggccggcagggcaagcggaccttcatggccgagagacagtacacacggatggaggactggctgaccgccaagctggcctacgagggcctgagcaagacctacctgtccaagacactggcccagtacacctccaagacatgcagcaactgtgggtttaccatcaccagcgccgactacgacagggtgctggagaagctgaagaagacagcaacaggctggatgaccacaattaacggcaaggagctgaaggtggagggccagattacctactacaacagatacaagagacagaacgtagtcaaggacctgtccgtcgagctggatagactgagcgaagaatctgtgaacaacgacatctcctcctggacaaagggcagaagcggagaagctctgagcctcctgaagaaaagattctcccatagacccgtgcaggagaagttcgtgtgcctgaactgcggcttcgagacacacgcagccgagcaagccgccctgaacatcgccagatcctggctgttcctgcggagccaggagtacaagaaataccagacaaacaagacaaccggcaacaccgataagagagccttcgtcgagacctggcagtccttttaccggaagaagcttaaggaggtgtggaaacctgccgtgcggtctggcggatctggcggaggctcctgtgctgggcctggtgaccttcggcgacgtggccatcgacttcagcagggaggagtgggagtggctgaacagcgcccagaggaccctgcacagggacgtgatgctggagaactacaggaacctggtgagcctgggcctgtgcgtgagcaagcccgacatgatcagcagcctggagcagaggaaggagccctggatggtgaagaggaagctgaccaggggcaggtgccccgacctgaagaccatgggatctggctccggcagcggccccaagaaaaagagaaaagtctaagctgccttctgcggggcttgccttctggccatgcccttcttctctcccttgcacctgtacctcttggtctttgaataaagcctgagtaggaaggctagcaaaaaaaaaaaaaaaaaaaaaaaaaaaaaaaaaaaaaaaaaaaaaaaaaaaaaaaaaaaaaaaaaaaaaaaaaaaaaaaa

SEQ ID NO: 15444 - RNA, 9485 nt, synthetic construct
  source 1..9485: mol_type = other RNA
aggaaataagagagaaaagaagagtaagaagaaatataagagccaccatggcccctaagaagaagcgtaaagtgagccggatggaacgcctcgtctacgaggtgcggcagaagtgcagaaacatcgaggacatctgcatctcctgcggatctctgaacgtgaccctggagcacccactgttcatcggcggcatgtgccagaactgtaaaaactgttttctggagtgtgcctatcaatacgacgatgacggctaccagagctactgcaccatctgttgcggcggaagagaggtgctgatgtgtggaaataacaactgctgccggtgcttctgcgtggaatgcgtggacctgctggtgggccccggcgccgcccaggccgctattaaggaagatccttggaactgctacatgtgcggccacaagggcacatacggcctgctgagacggagagaggactggcctagcagactgcagatgttcttcgccaataaccacgaccaggagttcgacccccctaaggtgtaccctcccgtccccgccgagaagagaaagcccatccgggtcctgagcctgttcgatggcatcgccaccggtctgctggtgctgaaggacctgggcatccaggtggataggtacattgcctccgaggtgtgcgaggactccatcaccgtgggaatggtgcgtcatcagggcaagatcatgtacgtgggcgacgtgcggagcgtgacacagaagcatatccaggagtggggccctttcgacctggtgatcggcggcagcccttgcaatgacctgagcatcgtgaacccagcccggaagggcctgtacgagggaaccggcagactgttcttcgagttttacagactgctgcacgacgcccggcctaaggaaggcgacgaccggcccttcttttggctgttcgagaatgtggtggccatgggagtcagcgacaagcgggatattagccggttcctggagagcaaccccgtgatgatcgatgccaaggaagtgagcgccgcccaccgggccagatacttctggggcaatctgcctggcatgaacagacccctggccagcaccgtgaacgacaagctggagctgcaggagtgcctggagcacggccggatcgccaagttcagcaaggtgagaaccatcaccacccgaagcaacagcatcaaacaaggcaaggaccagcactttcctgtgttcatgaacgagaaggaggacatcctgtggtgtaccgagatggagagagtgttcgggttcccagtccactacacagatgtcagcaacatgtctagactggccagacagagactgctgggaagaagctggtccgtccctgtgatcagacacctgttcgcccctctgaaggagtacttcgcctgcgtgagcagcggcaacagcaacgccaacagccggggccccagcttctctagcggcctggtgccactgtccctgagagggagccacatgggccccatggagatctacaaaaccgtgagcgcctggaagcggcagcctgtgcgcgtgctgagcctgtttcggaatatcgataaagtcctgaaaagcctgggattcctggagagcggctctggctccggcggtggcaccctgaagtacgtggaggatgtgacaaacgtggtcagacgggatgtggagaagtggggccccttcgatctggtgtacggcagcacccaacccctgggcagctcttgtgaccggtgccctggctggtacatgtttcagttccaccggatcctgcagtacgccctgccgagacaggagtcccagcggccattcttttggattttcatggacaacttgctgctgaccgaggatgaccaggaaactaccactcggttcctgcagaccgaagccgtgaccctgcaggacgtgagaggccgggactaccagaacgccatgcgggtgtggtccaacatccctggactgaaaagcaagcacgcacctctgacccctaaagaagaggagtacctgcaggcccaggtgcggagcagaagcaagctggacgcccctaaggtggatctgctggtgaagaattgcctcctgcccctgagagagtacttcaagtatttcagccagaatagtctgcccctgggaggcagcggcggcggcgccctggtgacatttgaggacgtcgccgtgcggttcacccaggaggaatgggctctgctggatccttctcagaaaatcctgtaccgggacgtgatgagagagacataccggaatctgacctccgtgggcatcaactgggaatgttgggaccttgaagcctgcttcagaagcctgggaagaaacctgagagtgcaggtggtgaagagaaagtgcgagctgaccaacagcggcccctgcgccgagggcggcccaagcagcggcgcccctcctcccagcggcggcagcccagccggctccccaacctctaccgaggagggcacctctgagtccgccacccccgagagcggccctggcacctccaccgagcccagcgagggcagcgcacccggcagccctgccggcagccccacctccacagaggagggaaccagcaccgagcccagcgaaggcagcgccccaggcaccagcaccgagcctagtgagcaggagattaaacggatcaacaagatcagaagaagacttgtgaaagacagcaacaccaagaaggccggcaagacaggccccatgaaaaccctgctggttagagtgatgacacccgatctgagagagcggctggaaaacctgagaaagaagcctgaaaatatcccccagcccatcagcaatacatctagagccaacctgaataagctgctgaccgattacaccgaaatgaagaaggcgatcctgcatgtgtactgggaagagttccagaaggaccctgtgggcctgatgagccgggtggcccagcctgccagcaagaagatcgatcagaacaagctgaaacctgagatggacgagaagggcaacctgaccaccgccggctttgcctgctctcagtgtggccagcccctgttcgtgtacaagctggagcaggtgtctgagaagggcaaggcttacaccaactacttcggacggtgcaatgtggccgagcacgaaaagctgatcctgctggcccagctgaagcccgagaaggatagcgacgaagccgtgacatatagcctgggaaagtttgggcagagggccctggatttctacagcattcatgtgaccaaggagtccacccaccccgtgaagcccctggcccagatcgccggaaacagatacgcctccggacctgtgggaaaggccctgagcgacgcatgtatgggcacaatcgcctccttcctgtctaagtaccaggacatcatcatcgaacaccagaaggtggtgaagggcaaccagaagagactggagagcctgcgggagctggccggcaaggaaaacctggaataccctagcgtgaccctgccacctcagcctcacaccaaggagggcgttgatgcctacaacgaagtgatcgcccgggtgcgaatgtgggtgaacctgaacctgtggcagaagctgaagctaagcagagatgatgccaagcctctgctgagactgaagggattcccttcctttcctctggtcgagagacaggccaacgaagtggactggtgggacatggtgtgtaacgtgaagaagctgatcaacgagaaaaaggaggatggcaaggtgttttggcagaatctggctggctacaagagacaggaagccctgagaccatacctgagcagcgaggaagatcggaagaagggaaagaaattcgctcggtaccagctgggcgacctgctgctgcacctggaaaagaagcacggcgaggactggggaaaggtgtacgacgaggcctgggagcggattgacaagaaagtggaaggcctgagcaagcacatcaagctggaagaggaacggagaagcgaggacgcccagagcaaggccgccctgaccgactggctgcgggctaaggccagcttcgtgatcgagggcctgaaggaggccgacaaggacgagttctgcagatgcgagctgaagctgcagaagtggtacggggacctgcggggaaagcccttcgccatcgaagccgagaacagcatcctggacatcagcggcttcagcaagcagtacaactgtgccttcatctggcagaaggacggcgtgaagaagctgaacctgtacctgatcatcaactacttcaagggcggcaagctgcggttcaagaagatcaaacctgaagccttcgaagccaacagattctacaccgtgatcaacaaaaagagcggcgagatcgtgcccatggaggtgaacttcaacttcgacgaccccaacctgatcatcctgcctctggcctttggcaagagacagggcagagaattcatctggaacgacctgctgtccctggaaaccggcagcctgaagctggccaacggaagagtgatcgagaagacactgtacaacagaagaacccggcaggatgagcctgccctgttcgtggccctgaccttcgagcggcgggaggtcctggactcctccaatatcaaaccaatgaacctgatcggcgtggcaagaggcgaaaacatccccgccgtgatcgccctgaccgaccccgagggctgcccactgagccggtttaaggatagcctgggaaacccaacccacatcctgagaatcggcgagagctataaggagaagcagcggaccatccaggccaagaaggaggtggagcagcggagagccggcggctacagccggaagtacgccagcaaagccaagaatctggcagacgatatggtgagaaacaccgctagagatctgctgtactacgccgtgacccaggatgccatgctgatcttcgccaacctgagccggggcttcggccggcagggcaagcggaccttcatggccgagagacagtacacacggatggaggactggctgaccgccaagctggcctacgagggcctgagcaagacctacctgtccaagacactggcccagtacacctccaagacatgcagcaactgtgggtttaccatcaccagcgccgactacgacagggtgctggagaagctgaagaagacagcaacaggctggatgaccacaattaacggcaaggagctgaaggtggagggccagattacctactacaacagatacaagagacagaacgtagtcaaggacctgtccgtcgagctggatagactgagcgaagaatctgtgaacaacgacatctcctcctggacaaagggcagaagcggagaagctctgagcctcctgaagaaaagattctcccatagacccgtgcaggagaagttcgtgtgcctgaactgcggcttcgagacacacgcagccgagcaagccgccctgaacatcgccagatcctggctgttcctgcggagccaggagtacaagaaataccagacaaacaagacaaccggcaacaccgataagagagccttcgtcgagacctggcagtccttttaccggaagaagcttaaggaggtgtggaaacctgccgtgcggtctggcggatctggcggaggctccggcagcctggaggagggcaggagggccaccggcctgcccgccgcccaggtgcaggagcccgtgaccttcaaggacgtggccgtggacttcacccaggaggagtggggccagctggacctggtgcagaggaccctgtacagggacgtgatgctggagacctacggccacctgctgagcgtgggcaaccagatcgccaagcccgaggtgatcagcctgctggagcagggcgaggagccctggagcggcggcccaagcagcggcgcccctcctcccagcggcggcagcccagccggctccccaacctctaccgaggagggcacctctgagtccgccacccccgagagcggccctggcacctccaccgagcccagcgagggcagcgcacccggcagccctgccggcagccccacctccacagaggagggaaccagcaccgagcccagcgaaggcagcgccccaggcaccagcaccgagcctagtgagcaggagattaaacggatcaacaagatcagaagaagacttgtgaaagacagcaacaccaagaaggccggcaagacaggccccatgaaaaccctgctggttagagtgatgacacccgatctgagagagcggctggaaaacctgagaaagaagcctgaaaatatcccccagcccatcagcaatacatctagagccaacctgaataagctgctgaccgattacaccgaaatgaagaaggcgatcctgcatgtgtactgggaagagttccagaaggaccctgtgggcctgatgagccgggtggcccagcctgccagcaagaagatcgatcagaacaagctgaaacctgagatggacgagaagggcaacctgaccaccgccggctttgcctgctctcagtgtggccagcccctgttcgtgtacaagctggagcaggtgtctgagaagggcaaggcttacaccaactacttcggacggtgcaatgtggccgagcacgaaaagctgatcctgctggcccagctgaagcccgagaaggatagcgacgaagccgtgacatatagcctgggaaagtttgggcagagggccctggatttctacagcattcatgtgaccaaggagtccacccaccccgtgaagcccctggcccagatcgccggaaacagatacgcctccggacctgtgggaaaggccctgagcgacgcatgtatgggcacaatcgcctccttcctgtctaagtaccaggacatcatcatcgaacaccagaaggtggtgaagggcaaccagaagagactggagagcctgcgggagctggccggcaaggaaaacctggaataccctagcgtgaccctgccacctcagcctcacaccaaggagggcgttgatgcctacaacgaagtgatcgcccgggtgcgaatgtgggtgaacctgaacctgtggcagaagctgaagctaagcagagatgatgccaagcctctgctgagactgaagggattcccttcctttcctctggtcgagagacaggccaacgaagtggactggtgggacatggtgtgtaacgtgaagaagctgatcaacgagaaaaaggaggatggcaaggtgttttggcagaatctggctggctacaagagacaggaagccctgagaccatacctgagcagcgaggaagatcggaagaagggaaagaaattcgctcggtaccagctgggcgacctgctgctgcacctggaaaagaagcacggcgaggactggggaaaggtgtacgacgaggcctgggagcggattgacaagaaagtggaaggcctgagcaagcacatcaagctggaagaggaacggagaagcgaggacgcccagagcaaggccgccctgaccgactggctgcgggctaaggccagcttcgtgatcgagggcctgaaggaggccgacaaggacgagttctgcagatgcgagctgaagctgcagaagtggtacggggacctgcggggaaagcccttcgccatcgaagccgagaacagcatcctggacatcagcggcttcagcaagcagtacaactgtgccttcatctggcagaaggacggcgtgaagaagctgaacctgtacctgatcatcaactacttcaagggcggcaagctgcggttcaagaagatcaaacctgaagccttcgaagccaacagattctacaccgtgatcaacaaaaagagcggcgagatcgtgcccatggaggtgaacttcaacttcgacgaccccaacctgatcatcctgcctctggcctttggcaagagacagggcagagaattcatctggaacgacctgctgtccctggaaaccggcagcctgaagctggccaacggaagagtgatcgagaagacactgtacaacagaagaacccggcaggatgagcctgccctgttcgtggccctgaccttcgagcggcgggaggtcctggactcctccaatatcaaaccaatgaacctgatcggcgtggcaagaggcgaaaacatccccgccgtgatcgccctgaccgaccccgagggctgcccactgagccggtttaaggatagcctgggaaacccaacccacatcctgagaatcggcgagagctataaggagaagcagcggaccatccaggccaagaaggaggtggagcagcggagagccggcggctacagccggaagtacgccagcaaagccaagaatctggcagacgatatggtgagaaacaccgctagagatctgctgtactacgccgtgacccaggatgccatgctgatcttcgccaacctgagccggggcttcggccggcagggcaagcggaccttcatggccgagagacagtacacacggatggaggactggctgaccgccaagctggcctacgagggcctgagcaagacctacctgtccaagacactggcccagtacacctccaagacatgcagcaactgtgggtttaccatcaccagcgccgactacgacagggtgctggagaagctgaagaagacagcaacaggctggatgaccacaattaacggcaaggagctgaaggtggagggccagattacctactacaacagatacaagagacagaacgtagtcaaggacctgtccgtcgagctggatagactgagcgaagaatctgtgaacaacgacatctcctcctggacaaagggcagaagcggagaagctctgagcctcctgaagaaaagattctcccatagacccgtgcaggagaagttcgtgtgcctgaactgcggcttcgagacacacgcagccgagcaagccgccctgaacatcgccagatcctggctgttcctgcggagccaggagtacaagaaataccagacaaacaagacaaccggcaacaccgataagagagccttcgtcgagacctggcagtccttttaccggaagaagcttaaggaggtgtggaaacctgccgtgcggtctggcggatctggcggaggctcctggcagcctggaggagggcaggagggccaccggcctgcccgccgcccaggtgcaggagcccgtgaccttcaaggacgtggccgtggacttcacccaggaggagtggggccagctggacctggtgcagaggaccctgtacagggacgtgatgctggagacctacggccacctgctgagcgtgggcaaccagatcgccaagcccgaggtgatcagcctgctggagcagggcgaggagccctggagcggatctggctccggcagcggccccaagaaaaagagaaaagtctaagctgccttctgcggggcttgccttctggccatgcccttcttctctcccttgcacctgtacctcttggtctttgaataaagcctgagtaggaaggctagcaaaaaaaaaaaaaaaaaaaaaaaaaaaaaaaaaaaaaaaaaaaaaaaaaaaaaaaaaaaaaaaaaaaaaaaaaaaaaaaa

SEQ ID NO: 15445 - RNA, 9485 nt, synthetic construct
  source 1..9485: mol_type = other RNA
aggaaataagagagaaaagaagagtaagaagaaatataagagccaccatggcccctaagaagaagcgtaaagtgagccggatggaacgcctcgtctacgaggtgcggcagaagtgcagaaacatcgaggacatctgcatctcctgcggatctctgaacgtgaccctggagcacccactgttcatcggcggcatgtgccagaactgtaaaaactgttttctggagtgtgcctatcaatacgacgatgacggctaccagagctactgcaccatctgttgcggcggaagagaggtgctgatgtgtggaaataacaactgctgccggtgcttctgcgtggaatgcgtggacctgctggtgggccccggcgccgcccaggccgctattaaggaagatccttggaactgctacatgtgcggccacaagggcacatacggcctgctgagacggagagaggactggcctagcagactgcagatgttcttcgccaataaccacgaccaggagttcgacccccctaaggtgtaccctcccgtccccgccgagaagagaaagcccatccgggtcctgagcctgttcgatggcatcgccaccggtctgctggtgctgaaggacctgggcatccaggtggataggtacattgcctccgaggtgtgcgaggactccatcaccgtgggaatggtgcgtcatcagggcaagatcatgtacgtgggcgacgtgcggagcgtgacacagaagcatatccaggagtggggccctttcgacctggtgatcggcggcagcccttgcaatgacctgagcatcgtgaacccagcccggaagggcctgtacgagggaaccggcagactgttcttcgagttttacagactgctgcacgacgcccggcctaaggaaggcgacgaccggcccttcttttggctgttcgagaatgtggtggccatgggagtcagcgacaagcgggatattagccggttcctggagagcaaccccgtgatgatcgatgccaaggaagtgagcgccgcccaccgggccagatacttctggggcaatctgcctggcatgaacagacccctggccagcaccgtgaacgacaagctggagctgcaggagtgcctggagcacggccggatcgccaagttcagcaaggtgagaaccatcaccacccgaagcaacagcatcaaacaaggcaaggaccagcactttcctgtgttcatgaacgagaaggaggacatcctgtggtgtaccgagatggagagagtgttcgggttcccagtccactacacagatgtcagcaacatgtctagactggccagacagagactgctgggaagaagctggtccgtccctgtgatcagacacctgttcgcccctctgaaggagtacttcgcctgcgtgagcagcggcaacagcaacgccaacagccggggccccagcttctctagcggcctggtgccactgtccctgagagggagccacatgggccccatggagatctacaaaaccgtgagcgcctggaagcggcagcctgtgcgcgtgctgagcctgtttcggaatatcgataaagtcctgaaaagcctgggattcctggagagcggctctggctccggcggtggcaccctgaagtacgtggaggatgtgacaaacgtggtcagacgggatgtggagaagtggggccccttcgatctggtgtacggcagcacccaacccctgggcagctcttgtgaccggtgccctggctggtacatgtttcagttccaccggatcctgcagtacgccctgccgagacaggagtcccagcggccattcttttggattttcatggacaacttgctgctgaccgaggatgaccaggaaactaccactcggttcctgcagaccgaagccgtgaccctgcaggacgtgagaggccgggactaccagaacgccatgcgggtgtggtccaacatccctggactgaaaagcaagcacgcacctctgacccctaaagaagaggagtacctgcaggcccaggtgcggagcagaagcaagctggacgcccctaaggtggatctgctggtgaagaattgcctcctgcccctgagagagtacttcaagtatttcagccagaatagtctgcccctgggaggcagcggcggcggcgccctggtgacatttgaggacgtcgccgtgcggttcacccaggaggaatgggctctgctggatccttctcagaaaatcctgtaccgggacgtgatgagagagacataccggaatctgacctccgtgggcatcaactgggaatgttgggaccttgaagcctgcttcagaagcctgggaagaaacctgagagtgcaggtggtgaagagaaagtgcgagctgaccaacagcggcccctgcgccgagggcggcccaagcagcggcgcccctcctcccagcggcggcagcccagccggctccccaacctctaccgaggagggcacctctgagtccgccacccccgagagcggccctggcacctccaccgagcccagcgagggcagcgcacccggcagccctgccggcagccccacctccacagaggagggaaccagcaccgagcccagcgaaggcagcgccccaggcaccagcaccgagcctagtgagcaggagattaaacggatcaacaagatcagaagaagacttgtgaaagacagcaacaccaagaaggccggcaagacaggccccatgaaaaccctgctggttagagtgatgacacccgatctgagagagcggctggaaaacctgagaaagaagcctgaaaatatcccccagcccatcagcaatacatctagagccaacctgaataagctgctgaccgattacaccgaaatgaagaaggcgatcctgcatgtgtactgggaagagttccagaaggaccctgtgggcctgatgagccgggtggcccagcctgccagcaagaagatcgatcagaacaagctgaaacctgagatggacgagaagggcaacctgaccaccgccggctttgcctgctctcagtgtggccagcccctgttcgtgtacaagctggagcaggtgtctgagaagggcaaggcttacaccaactacttcggacggtgcaatgtggccgagcacgaaaagctgatcctgctggcccagctgaagcccgagaaggatagcgacgaagccgtgacatatagcctgggaaagtttgggcagagggccctggatttctacagcattcatgtgaccaaggagtccacccaccccgtgaagcccctggcccagatcgccggaaacagatacgcctccggacctgtgggaaaggccctgagcgacgcatgtatgggcacaatcgcctccttcctgtctaagtaccaggacatcatcatcgaacaccagaaggtggtgaagggcaaccagaagagactggagagcctgcgggagctggccggcaaggaaaacctggaataccctagcgtgaccctgccacctcagcctcacaccaaggagggcgttgatgcctacaacgaagtgatcgcccgggtgcgaatgtgggtgaacctgaacctgtggcagaagctgaagctaagcagagatgatgccaagcctctgctgagactgaagggattcccttcctttcctctggtcgagagacaggccaacgaagtggactggtgggacatggtgtgtaacgtgaagaagctgatcaacgagaaaaaggaggatggcaaggtgttttggcagaatctggctggctacaagagacaggaagccctgagaccatacctgagcagcgaggaagatcggaagaagggaaagaaattcgctcggtaccagctgggcgacctgctgctgcacctggaaaagaagcacggcgaggactggggaaaggtgtacgacgaggcctgggagcggattgacaagaaagtggaaggcctgagcaagcacatcaagctggaagaggaacggagaagcgaggacgcccagagcaaggccgccctgaccgactggctgcgggctaaggccagcttcgtgatcgagggcctgaaggaggccgacaaggacgagttctgcagatgcgagctgaagctgcagaagtggtacggggacctgcggggaaagcccttcgccatcgaagccgagaacagcatcctggacatcagcggcttcagcaagcagtacaactgtgccttcatctggcagaaggacggcgtgaagaagctgaacctgtacctgatcatcaactacttcaagggcggcaagctgcggttcaagaagatcaaacctgaagccttcgaagccaacagattctacaccgtgatcaacaaaaagagcggcgagatcgtgcccatggaggtgaacttcaacttcgacgaccccaacctgatcatcctgcctctggcctttggcaagagacagggcagagaattcatctggaacgacctgctgtccctggaaaccggcagcctgaagctggccaacggaagagtgatcgagaagacactgtacaacagaagaacccggcaggatgagcctgccctgttcgtggccctgaccttcgagcggcgggaggtcctggactcctccaatatcaaaccaatgaacctgatcggcgtggcaagaggcgaaaacatccccgccgtgatcgccctgaccgaccccgagggctgcccactgagccggtttaaggatagcctgggaaacccaacccacatcctgagaatcggcgagagctataaggagaagcagcggaccatccaggccaagaaggaggtggagcagcggagagccggcggctacagccggaagtacgccagcaaagccaagaatctggcagacgatatggtgagaaacaccgctagagatctgctgtactacgccgtgacccaggatgccatgctgatcttcgccaacctgagccggggcttcggccggcagggcaagcggaccttcatggccgagagacagtacacacggatggaggactggctgaccgccaagctggcctacgagggcctgagcaagacctacctgtccaagacactggcccagtacacctccaagacatgcagcaactgtgggtttaccatcaccagcgccgactacgacagggtgctggagaagctgaagaagacagcaacaggctggatgaccacaattaacggcaaggagctgaaggtggagggccagattacctactacaacagatacaagagacagaacgtagtcaaggacctgtccgtcgagctggatagactgagcgaagaatctgtgaacaacgacatctcctcctggacaaagggcagaagcggagaagctctgagcctcctgaagaaaagattctcccatagacccgtgcaggagaagttcgtgtgcctgaactgcggcttcgagacacacgcagccgagcaagccgccctgaacatcgccagatcctggctgttcctgcggagccaggagtacaagaaataccagacaaacaagacaaccggcaacaccgataagagagccttcgtcgagacctggcagtccttttaccggaagaagcttaaggaggtgtggaaacctgccgtgcggtctggcggatctggcggaggctccagcaaggcccccgtgaccttcggcgacctggccatctacttcagccaggaggagtgggagtggctgagccccatccagaaggacctgtacgaggacgtgatgctggagaactacaggaacctggtgagcctgggcctgagcttcaggaggcccaacgtgatcaccctgctggagaagggcaaggccccctggatggtggagcccgtgaggaggaggagggcccccgagctgaccgaggccagcggcggcccaagcagcggcgcccctcctcccagcggcggcagcccagccggctccccaacctctaccgaggagggcacctctgagtccgccacccccgagagcggccctggcacctccaccgagcccagcgagggcagcgcacccggcagccctgccggcagccccacctccacagaggagggaaccagcaccgagcccagcgaaggcagcgccccaggcaccagcaccgagcctagtgagcaggagattaaacggatcaacaagatcagaagaagacttgtgaaagacagcaacaccaagaaggccggcaagacaggccccatgaaaaccctgctggttagagtgatgacacccgatctgagagagcggctggaaaacctgagaaagaagcctgaaaatatcccccagcccatcagcaatacatctagagccaacctgaataagctgctgaccgattacaccgaaatgaagaaggcgatcctgcatgtgtactgggaagagttccagaaggaccctgtgggcctgatgagccgggtggcccagcctgccagcaagaagatcgatcagaacaagctgaaacctgagatggacgagaagggcaacctgaccaccgccggctttgcctgctctcagtgtggccagcccctgttcgtgtacaagctggagcaggtgtctgagaagggcaaggcttacaccaactacttcggacggtgcaatgtggccgagcacgaaaagctgatcctgctggcccagctgaagcccgagaaggatagcgacgaagccgtgacatatagcctgggaaagtttgggcagagggccctggatttctacagcattcatgtgaccaaggagtccacccaccccgtgaagcccctggcccagatcgccggaaacagatacgcctccggacctgtgggaaaggccctgagcgacgcatgtatgggcacaatcgcctccttcctgtctaagtaccaggacatcatcatcgaacaccagaaggtggtgaagggcaaccagaagagactggagagcctgcgggagctggccggcaaggaaaacctggaataccctagcgtgaccctgccacctcagcctcacaccaaggagggcgttgatgcctacaacgaagtgatcgcccgggtgcgaatgtgggtgaacctgaacctgtggcagaagctgaagctaagcagagatgatgccaagcctctgctgagactgaagggattcccttcctttcctctggtcgagagacaggccaacgaagtggactggtgggacatggtgtgtaacgtgaagaagctgatcaacgagaaaaaggaggatggcaaggtgttttggcagaatctggctggctacaagagacaggaagccctgagaccatacctgagcagcgaggaagatcggaagaagggaaagaaattcgctcggtaccagctgggcgacctgctgctgcacctggaaaagaagcacggcgaggactggggaaaggtgtacgacgaggcctgggagcggattgacaagaaagtggaaggcctgagcaagcacatcaagctggaagaggaacggagaagcgaggacgcccagagcaaggccgccctgaccgactggctgcgggctaaggccagcttcgtgatcgagggcctgaaggaggccgacaaggacgagttctgcagatgcgagctgaagctgcagaagtggtacggggacctgcggggaaagcccttcgccatcgaagccgagaacagcatcctggacatcagcggcttcagcaagcagtacaactgtgccttcatctggcagaaggacggcgtgaagaagctgaacctgtacctgatcatcaactacttcaagggcggcaagctgcggttcaagaagatcaaacctgaagccttcgaagccaacagattctacaccgtgatcaacaaaaagagcggcgagatcgtgcccatggaggtgaacttcaacttcgacgaccccaacctgatcatcctgcctctggcctttggcaagagacagggcagagaattcatctggaacgacctgctgtccctggaaaccggcagcctgaagctggccaacggaagagtgatcgagaagacactgtacaacagaagaacccggcaggatgagcctgccctgttcgtggccctgaccttcgagcggcgggaggtcctggactcctccaatatcaaaccaatgaacctgatcggcgtggcaagaggcgaaaacatccccgccgtgatcgccctgaccgaccccgagggctgcccactgagccggtttaaggatagcctgggaaacccaacccacatcctgagaatcggcgagagctataaggagaagcagcggaccatccaggccaagaaggaggtggagcagcggagagccggcggctacagccggaagtacgccagcaaagccaagaatctggcagacgatatggtgagaaacaccgctagagatctgctgtactacgccgtgacccaggatgccatgctgatcttcgccaacctgagccggggcttcggccggcagggcaagcggaccttcatggccgagagacagtacacacggatggaggactggctgaccgccaagctggcctacgagggcctgagcaagacctacctgtccaagacactggcccagtacacctccaagacatgcagcaactgtgggtttaccatcaccagcgccgactacgacagggtgctggagaagctgaagaagacagcaacaggctggatgaccacaattaacggcaaggagctgaaggtggagggccagattacctactacaacagatacaagagacagaacgtagtcaaggacctgtccgtcgagctggatagactgagcgaagaatctgtgaacaacgacatctcctcctggacaaagggcagaagcggagaagctctgagcctcctgaagaaaagattctcccatagacccgtgcaggagaagttcgtgtgcctgaactgcggcttcgagacacacgcagccgagcaagccgccctgaacatcgccagatcctggctgttcctgcggagccaggagtacaagaaataccagacaaacaagacaaccggcaacaccgataagagagccttcgtcgagacctggcagtccttttaccggaagaagcttaaggaggtgtggaaacctgccgtgcggtctggcggatctggcggaggctcctagcaaggcccccgtgaccttcggcgacctggccatctacttcagccaggaggagtgggagtggctgagccccatccagaaggacctgtacgaggacgtgatgctggagaactacaggaacctggtgagcctgggcctgagcttcaggaggcccaacgtgatcaccctgctggagaagggcaaggccccctggatggtggagcccgtgaggaggaggagggcccccgagctgaccgaggccagcggatctggctccggcagcggccccaagaaaaagagaaaagtctaagctgccttctgcggggcttgccttctggccatgcccttcttctctcccttgcacctgtacctcttggtctttgaataaagcctgagtaggaaggctagcaaaaaaaaaaaaaaaaaaaaaaaaaaaaaaaaaaaaaaaaaaaaaaaaaaaaaaaaaaaaaaaaaaaaaaaaaaaaaaaa

SEQ ID NO: 15446 - RNA, 9485 nt, synthetic construct
  source 1..9485: mol_type = other RNA
aggaaataagagagaaaagaagagtaagaagaaatataagagccaccatggcccctaagaagaagcgtaaagtgagccggatggaacgcctcgtctacgaggtgcggcagaagtgcagaaacatcgaggacatctgcatctcctgcggatctctgaacgtgaccctggagcacccactgttcatcggcggcatgtgccagaactgtaaaaactgttttctggagtgtgcctatcaatacgacgatgacggctaccagagctactgcaccatctgttgcggcggaagagaggtgctgatgtgtggaaataacaactgctgccggtgcttctgcgtggaatgcgtggacctgctggtgggccccggcgccgcccaggccgctattaaggaagatccttggaactgctacatgtgcggccacaagggcacatacggcctgctgagacggagagaggactggcctagcagactgcagatgttcttcgccaataaccacgaccaggagttcgacccccctaaggtgtaccctcccgtccccgccgagaagagaaagcccatccgggtcctgagcctgttcgatggcatcgccaccggtctgctggtgctgaaggacctgggcatccaggtggataggtacattgcctccgaggtgtgcgaggactccatcaccgtgggaatggtgcgtcatcagggcaagatcatgtacgtgggcgacgtgcggagcgtgacacagaagcatatccaggagtggggccctttcgacctggtgatcggcggcagcccttgcaatgacctgagcatcgtgaacccagcccggaagggcctgtacgagggaaccggcagactgttcttcgagttttacagactgctgcacgacgcccggcctaaggaaggcgacgaccggcccttcttttggctgttcgagaatgtggtggccatgggagtcagcgacaagcgggatattagccggttcctggagagcaaccccgtgatgatcgatgccaaggaagtgagcgccgcccaccgggccagatacttctggggcaatctgcctggcatgaacagacccctggccagcaccgtgaacgacaagctggagctgcaggagtgcctggagcacggccggatcgccaagttcagcaaggtgagaaccatcaccacccgaagcaacagcatcaaacaaggcaaggaccagcactttcctgtgttcatgaacgagaaggaggacatcctgtggtgtaccgagatggagagagtgttcgggttcccagtccactacacagatgtcagcaacatgtctagactggccagacagagactgctgggaagaagctggtccgtccctgtgatcagacacctgttcgcccctctgaaggagtacttcgcctgcgtgagcagcggcaacagcaacgccaacagccggggccccagcttctctagcggcctggtgccactgtccctgagagggagccacatgggccccatggagatctacaaaaccgtgagcgcctggaagcggcagcctgtgcgcgtgctgagcctgtttcggaatatcgataaagtcctgaaaagcctgggattcctggagagcggctctggctccggcggtggcaccctgaagtacgtggaggatgtgacaaacgtggtcagacgggatgtggagaagtggggccccttcgatctggtgtacggcagcacccaacccctgggcagctcttgtgaccggtgccctggctggtacatgtttcagttccaccggatcctgcagtacgccctgccgagacaggagtcccagcggccattcttttggattttcatggacaacttgctgctgaccgaggatgaccaggaaactaccactcggttcctgcagaccgaagccgtgaccctgcaggacgtgagaggccgggactaccagaacgccatgcgggtgtggtccaacatccctggactgaaaagcaagcacgcacctctgacccctaaagaagaggagtacctgcaggcccaggtgcggagcagaagcaagctggacgcccctaaggtggatctgctggtgaagaattgcctcctgcccctgagagagtacttcaagtatttcagccagaatagtctgcccctgggaggcagcggcggcggcgccctggtgacatttgaggacgtcgccgtgcggttcacccaggaggaatgggctctgctggatccttctcagaaaatcctgtaccgggacgtgatgagagagacataccggaatctgacctccgtgggcatcaactgggaatgttgggaccttgaagcctgcttcagaagcctgggaagaaacctgagagtgcaggtggtgaagagaaagtgcgagctgaccaacagcggcccctgcgccgagggcggcccaagcagcggcgcccctcctcccagcggcggcagcccagccggctccccaacctctaccgaggagggcacctctgagtccgccacccccgagagcggccctggcacctccaccgagcccagcgagggcagcgcacccggcagccctgccggcagccccacctccacagaggagggaaccagcaccgagcccagcgaaggcagcgccccaggcaccagcaccgagcctagtgagcaggagattaaacggatcaacaagatcagaagaagacttgtgaaagacagcaacaccaagaaggccggcaagacaggccccatgaaaaccctgctggttagagtgatgacacccgatctgagagagcggctggaaaacctgagaaagaagcctgaaaatatcccccagcccatcagcaatacatctagagccaacctgaataagctgctgaccgattacaccgaaatgaagaaggcgatcctgcatgtgtactgggaagagttccagaaggaccctgtgggcctgatgagccgggtggcccagcctgccagcaagaagatcgatcagaacaagctgaaacctgagatggacgagaagggcaacctgaccaccgccggctttgcctgctctcagtgtggccagcccctgttcgtgtacaagctggagcaggtgtctgagaagggcaaggcttacaccaactacttcggacggtgcaatgtggccgagcacgaaaagctgatcctgctggcccagctgaagcccgagaaggatagcgacgaagccgtgacatatagcctgggaaagtttgggcagagggccctggatttctacagcattcatgtgaccaaggagtccacccaccccgtgaagcccctggcccagatcgccggaaacagatacgcctccggacctgtgggaaaggccctgagcgacgcatgtatgggcacaatcgcctccttcctgtctaagtaccaggacatcatcatcgaacaccagaaggtggtgaagggcaaccagaagagactggagagcctgcgggagctggccggcaaggaaaacctggaataccctagcgtgaccctgccacctcagcctcacaccaaggagggcgttgatgcctacaacgaagtgatcgcccgggtgcgaatgtgggtgaacctgaacctgtggcagaagctgaagctaagcagagatgatgccaagcctctgctgagactgaagggattcccttcctttcctctggtcgagagacaggccaacgaagtggactggtgggacatggtgtgtaacgtgaagaagctgatcaacgagaaaaaggaggatggcaaggtgttttggcagaatctggctggctacaagagacaggaagccctgagaccatacctgagcagcgaggaagatcggaagaagggaaagaaattcgctcggtaccagctgggcgacctgctgctgcacctggaaaagaagcacggcgaggactggggaaaggtgtacgacgaggcctgggagcggattgacaagaaagtggaaggcctgagcaagcacatcaagctggaagaggaacggagaagcgaggacgcccagagcaaggccgccctgaccgactggctgcgggctaaggccagcttcgtgatcgagggcctgaaggaggccgacaaggacgagttctgcagatgcgagctgaagctgcagaagtggtacggggacctgcggggaaagcccttcgccatcgaagccgagaacagcatcctggacatcagcggcttcagcaagcagtacaactgtgccttcatctggcagaaggacggcgtgaagaagctgaacctgtacctgatcatcaactacttcaagggcggcaagctgcggttcaagaagatcaaacctgaagccttcgaagccaacagattctacaccgtgatcaacaaaaagagcggcgagatcgtgcccatggaggtgaacttcaacttcgacgaccccaacctgatcatcctgcctctggcctttggcaagagacagggcagagaattcatctggaacgacctgctgtccctggaaaccggcagcctgaagctggccaacggaagagtgatcgagaagacactgtacaacagaagaacccggcaggatgagcctgccctgttcgtggccctgaccttcgagcggcgggaggtcctggactcctccaatatcaaaccaatgaacctgatcggcgtggcaagaggcgaaaacatccccgccgtgatcgccctgaccgaccccgagggctgcccactgagccggtttaaggatagcctgggaaacccaacccacatcctgagaatcggcgagagctataaggagaagcagcggaccatccaggccaagaaggaggtggagcagcggagagccggcggctacagccggaagtacgccagcaaagccaagaatctggcagacgatatggtgagaaacaccgctagagatctgctgtactacgccgtgacccaggatgccatgctgatcttcgccaacctgagccggggcttcggccggcagggcaagcggaccttcatggccgagagacagtacacacggatggaggactggctgaccgccaagctggcctacgagggcctgagcaagacctacctgtccaagacactggcccagtacacctccaagacatgcagcaactgtgggtttaccatcaccagcgccgactacgacagggtgctggagaagctgaagaagacagcaacaggctggatgaccacaattaacggcaaggagctgaaggtggagggccagattacctactacaacagatacaagagacagaacgtagtcaaggacctgtccgtcgagctggatagactgagcgaagaatctgtgaacaacgacatctcctcctggacaaagggcagaagcggagaagctctgagcctcctgaagaaaagattctcccatagacccgtgcaggagaagttcgtgtgcctgaactgcggcttcgagacacacgcagccgagcaagccgccctgaacatcgccagatcctggctgttcctgcggagccaggagtacaagaaataccagacaaacaagacaaccggcaacaccgataagagagccttcgtcgagacctggcagtccttttaccggaagaagcttaaggaggtgtggaaacctgccgtgcggtctggcggatctggcggaggctccccccagggcctggtgaccttcggcgacgtggccgtggacttcagccaggaggagtgggagtggctgaaccccaaccagaggaccctgtacaggaaggtgatgctggagaactacaagaacctggccagcctgggcctgtgcgtgagcaagcccgacgtgatcagcagcctggagcagggcaaggagccctggaccgtgaagaggaagatgaccagggcctggtgccccgacctgaagatcgtgggcggcccaagcagcggcgcccctcctcccagcggcggcagcccagccggctccccaacctctaccgaggagggcacctctgagtccgccacccccgagagcggccctggcacctccaccgagcccagcgagggcagcgcacccggcagccctgccggcagccccacctccacagaggagggaaccagcaccgagcccagcgaaggcagcgccccaggcaccagcaccgagcctagtgagcaggagattaaacggatcaacaagatcagaagaagacttgtgaaagacagcaacaccaagaaggccggcaagacaggccccatgaaaaccctgctggttagagtgatgacacccgatctgagagagcggctggaaaacctgagaaagaagcctgaaaatatcccccagcccatcagcaatacatctagagccaacctgaataagctgctgaccgattacaccgaaatgaagaaggcgatcctgcatgtgtactgggaagagttccagaaggaccctgtgggcctgatgagccgggtggcccagcctgccagcaagaagatcgatcagaacaagctgaaacctgagatggacgagaagggcaacctgaccaccgccggctttgcctgctctcagtgtggccagcccctgttcgtgtacaagctggagcaggtgtctgagaagggcaaggcttacaccaactacttcggacggtgcaatgtggccgagcacgaaaagctgatcctgctggcccagctgaagcccgagaaggatagcgacgaagccgtgacatatagcctgggaaagtttgggcagagggccctggatttctacagcattcatgtgaccaaggagtccacccaccccgtgaagcccctggcccagatcgccggaaacagatacgcctccggacctgtgggaaaggccctgagcgacgcatgtatgggcacaatcgcctccttcctgtctaagtaccaggacatcatcatcgaacaccagaaggtggtgaagggcaaccagaagagactggagagcctgcgggagctggccggcaaggaaaacctggaataccctagcgtgaccctgccacctcagcctcacaccaaggagggcgttgatgcctacaacgaagtgatcgcccgggtgcgaatgtgggtgaacctgaacctgtggcagaagctgaagctaagcagagatgatgccaagcctctgctgagactgaagggattcccttcctttcctctggtcgagagacaggccaacgaagtggactggtgggacatggtgtgtaacgtgaagaagctgatcaacgagaaaaaggaggatggcaaggtgttttggcagaatctggctggctacaagagacaggaagccctgagaccatacctgagcagcgaggaagatcggaagaagggaaagaaattcgctcggtaccagctgggcgacctgctgctgcacctggaaaagaagcacggcgaggactggggaaaggtgtacgacgaggcctgggagcggattgacaagaaagtggaaggcctgagcaagcacatcaagctggaagaggaacggagaagcgaggacgcccagagcaaggccgccctgaccgactggctgcgggctaaggccagcttcgtgatcgagggcctgaaggaggccgacaaggacgagttctgcagatgcgagctgaagctgcagaagtggtacggggacctgcggggaaagcccttcgccatcgaagccgagaacagcatcctggacatcagcggcttcagcaagcagtacaactgtgccttcatctggcagaaggacggcgtgaagaagctgaacctgtacctgatcatcaactacttcaagggcggcaagctgcggttcaagaagatcaaacctgaagccttcgaagccaacagattctacaccgtgatcaacaaaaagagcggcgagatcgtgcccatggaggtgaacttcaacttcgacgaccccaacctgatcatcctgcctctggcctttggcaagagacagggcagagaattcatctggaacgacctgctgtccctggaaaccggcagcctgaagctggccaacggaagagtgatcgagaagacactgtacaacagaagaacccggcaggatgagcctgccctgttcgtggccctgaccttcgagcggcgggaggtcctggactcctccaatatcaaaccaatgaacctgatcggcgtggcaagaggcgaaaacatccccgccgtgatcgccctgaccgaccccgagggctgcccactgagccggtttaaggatagcctgggaaacccaacccacatcctgagaatcggcgagagctataaggagaagcagcggaccatccaggccaagaaggaggtggagcagcggagagccggcggctacagccggaagtacgccagcaaagccaagaatctggcagacgatatggtgagaaacaccgctagagatctgctgtactacgccgtgacccaggatgccatgctgatcttcgccaacctgagccggggcttcggccggcagggcaagcggaccttcatggccgagagacagtacacacggatggaggactggctgaccgccaagctggcctacgagggcctgagcaagacctacctgtccaagacactggcccagtacacctccaagacatgcagcaactgtgggtttaccatcaccagcgccgactacgacagggtgctggagaagctgaagaagacagcaacaggctggatgaccacaattaacggcaaggagctgaaggtggagggccagattacctactacaacagatacaagagacagaacgtagtcaaggacctgtccgtcgagctggatagactgagcgaagaatctgtgaacaacgacatctcctcctggacaaagggcagaagcggagaagctctgagcctcctgaagaaaagattctcccatagacccgtgcaggagaagttcgtgtgcctgaactgcggcttcgagacacacgcagccgagcaagccgccctgaacatcgccagatcctggctgttcctgcggagccaggagtacaagaaataccagacaaacaagacaaccggcaacaccgataagagagccttcgtcgagacctggcagtccttttaccggaagaagcttaaggaggtgtggaaacctgccgtgcggtctggcggatctggcggaggctcctccccagggcctggtgaccttcggcgacgtggccgtggacttcagccaggaggagtgggagtggctgaaccccaaccagaggaccctgtacaggaaggtgatgctggagaactacaagaacctggccagcctgggcctgtgcgtgagcaagcccgacgtgatcagcagcctggagcagggcaaggagccctggaccgtgaagaggaagatgaccagggcctggtgccccgacctgaagatcgtgggatctggctccggcagcggccccaagaaaaagagaaaagtctaagctgccttctgcggggcttgccttctggccatgcccttcttctctcccttgcacctgtacctcttggtctttgaataaagcctgagtaggaaggctagcaaaaaaaaaaaaaaaaaaaaaaaaaaaaaaaaaaaaaaaaaaaaaaaaaaaaaaaaaaaaaaaaaaaaaaaaaaaaaaaa

SEQ ID NO: 15447 - RNA, 9485 nt, synthetic construct
  source 1..9485: mol_type = other RNA
aggaaataagagagaaaagaagagtaagaagaaatataagagccaccatggcccctaagaagaagcgtaaagtgagccggatggaacgcctcgtctacgaggtgcggcagaagtgcagaaacatcgaggacatctgcatctcctgcggatctctgaacgtgaccctggagcacccactgttcatcggcggcatgtgccagaactgtaaaaactgttttctggagtgtgcctatcaatacgacgatgacggctaccagagctactgcaccatctgttgcggcggaagagaggtgctgatgtgtggaaataacaactgctgccggtgcttctgcgtggaatgcgtggacctgctggtgggccccggcgccgcccaggccgctattaaggaagatccttggaactgctacatgtgcggccacaagggcacatacggcctgctgagacggagagaggactggcctagcagactgcagatgttcttcgccaataaccacgaccaggagttcgacccccctaaggtgtaccctcccgtccccgccgagaagagaaagcccatccgggtcctgagcctgttcgatggcatcgccaccggtctgctggtgctgaaggacctgggcatccaggtggataggtacattgcctccgaggtgtgcgaggactccatcaccgtgggaatggtgcgtcatcagggcaagatcatgtacgtgggcgacgtgcggagcgtgacacagaagcatatccaggagtggggccctttcgacctggtgatcggcggcagcccttgcaatgacctgagcatcgtgaacccagcccggaagggcctgtacgagggaaccggcagactgttcttcgagttttacagactgctgcacgacgcccggcctaaggaaggcgacgaccggcccttcttttggctgttcgagaatgtggtggccatgggagtcagcgacaagcgggatattagccggttcctggagagcaaccccgtgatgatcgatgccaaggaagtgagcgccgcccaccgggccagatacttctggggcaatctgcctggcatgaacagacccctggccagcaccgtgaacgacaagctggagctgcaggagtgcctggagcacggccggatcgccaagttcagcaaggtgagaaccatcaccacccgaagcaacagcatcaaacaaggcaaggaccagcactttcctgtgttcatgaacgagaaggaggacatcctgtggtgtaccgagatggagagagtgttcgggttcccagtccactacacagatgtcagcaacatgtctagactggccagacagagactgctgggaagaagctggtccgtccctgtgatcagacacctgttcgcccctctgaaggagtacttcgcctgcgtgagcagcggcaacagcaacgccaacagccggggccccagcttctctagcggcctggtgccactgtccctgagagggagccacatgggccccatggagatctacaaaaccgtgagcgcctggaagcggcagcctgtgcgcgtgctgagcctgtttcggaatatcgataaagtcctgaaaagcctgggattcctggagagcggctctggctccggcggtggcaccctgaagtacgtggaggatgtgacaaacgtggtcagacgggatgtggagaagtggggccccttcgatctggtgtacggcagcacccaacccctgggcagctcttgtgaccggtgccctggctggtacatgtttcagttccaccggatcctgcagtacgccctgccgagacaggagtcccagcggccattcttttggattttcatggacaacttgctgctgaccgaggatgaccaggaaactaccactcggttcctgcagaccgaagccgtgaccctgcaggacgtgagaggccgggactaccagaacgccatgcgggtgtggtccaacatccctggactgaaaagcaagcacgcacctctgacccctaaagaagaggagtacctgcaggcccaggtgcggagcagaagcaagctggacgcccctaaggtggatctgctggtgaagaattgcctcctgcccctgagagagtacttcaagtatttcagccagaatagtctgcccctgggaggcagcggcggcggcgccctggtgacatttgaggacgtcgccgtgcggttcacccaggaggaatgggctctgctggatccttctcagaaaatcctgtaccgggacgtgatgagagagacataccggaatctgacctccgtgggcatcaactgggaatgttgggaccttgaagcctgcttcagaagcctgggaagaaacctgagagtgcaggtggtgaagagaaagtgcgagctgaccaacagcggcccctgcgccgagggcggcccaagcagcggcgcccctcctcccagcggcggcagcccagccggctccccaacctctaccgaggagggcacctctgagtccgccacccccgagagcggccctggcacctccaccgagcccagcgagggcagcgcacccggcagccctgccggcagccccacctccacagaggagggaaccagcaccgagcccagcgaaggcagcgccccaggcaccagcaccgagcctagtgagcaggagattaaacggatcaacaagatcagaagaagacttgtgaaagacagcaacaccaagaaggccggcaagacaggccccatgaaaaccctgctggttagagtgatgacacccgatctgagagagcggctggaaaacctgagaaagaagcctgaaaatatcccccagcccatcagcaatacatctagagccaacctgaataagctgctgaccgattacaccgaaatgaagaaggcgatcctgcatgtgtactgggaagagttccagaaggaccctgtgggcctgatgagccgggtggcccagcctgccagcaagaagatcgatcagaacaagctgaaacctgagatggacgagaagggcaacctgaccaccgccggctttgcctgctctcagtgtggccagcccctgttcgtgtacaagctggagcaggtgtctgagaagggcaaggcttacaccaactacttcggacggtgcaatgtggccgagcacgaaaagctgatcctgctggcccagctgaagcccgagaaggatagcgacgaagccgtgacatatagcctgggaaagtttgggcagagggccctggatttctacagcattcatgtgaccaaggagtccacccaccccgtgaagcccctggcccagatcgccggaaacagatacgcctccggacctgtgggaaaggccctgagcgacgcatgtatgggcacaatcgcctccttcctgtctaagtaccaggacatcatcatcgaacaccagaaggtggtgaagggcaaccagaagagactggagagcctgcgggagctggccggcaaggaaaacctggaataccctagcgtgaccctgccacctcagcctcacaccaaggagggcgttgatgcctacaacgaagtgatcgcccgggtgcgaatgtgggtgaacctgaacctgtggcagaagctgaagctaagcagagatgatgccaagcctctgctgagactgaagggattcccttcctttcctctggtcgagagacaggccaacgaagtggactggtgggacatggtgtgtaacgtgaagaagctgatcaacgagaaaaaggaggatggcaaggtgttttggcagaatctggctggctacaagagacaggaagccctgagaccatacctgagcagcgaggaagatcggaagaagggaaagaaattcgctcggtaccagctgggcgacctgctgctgcacctggaaaagaagcacggcgaggactggggaaaggtgtacgacgaggcctgggagcggattgacaagaaagtggaaggcctgagcaagcacatcaagctggaagaggaacggagaagcgaggacgcccagagcaaggccgccctgaccgactggctgcgggctaaggccagcttcgtgatcgagggcctgaaggaggccgacaaggacgagttctgcagatgcgagctgaagctgcagaagtggtacggggacctgcggggaaagcccttcgccatcgaagccgagaacagcatcctggacatcagcggcttcagcaagcagtacaactgtgccttcatctggcagaaggacggcgtgaagaagctgaacctgtacctgatcatcaactacttcaagggcggcaagctgcggttcaagaagatcaaacctgaagccttcgaagccaacagattctacaccgtgatcaacaaaaagagcggcgagatcgtgcccatggaggtgaacttcaacttcgacgaccccaacctgatcatcctgcctctggcctttggcaagagacagggcagagaattcatctggaacgacctgctgtccctggaaaccggcagcctgaagctggccaacggaagagtgatcgagaagacactgtacaacagaagaacccggcaggatgagcctgccctgttcgtggccctgaccttcgagcggcgggaggtcctggactcctccaatatcaaaccaatgaacctgatcggcgtggcaagaggcgaaaacatccccgccgtgatcgccctgaccgaccccgagggctgcccactgagccggtttaaggatagcctgggaaacccaacccacatcctgagaatcggcgagagctataaggagaagcagcggaccatccaggccaagaaggaggtggagcagcggagagccggcggctacagccggaagtacgccagcaaagccaagaatctggcagacgatatggtgagaaacaccgctagagatctgctgtactacgccgtgacccaggatgccatgctgatcttcgccaacctgagccggggcttcggccggcagggcaagcggaccttcatggccgagagacagtacacacggatggaggactggctgaccgccaagctggcctacgagggcctgagcaagacctacctgtccaagacactggcccagtacacctccaagacatgcagcaactgtgggtttaccatcaccagcgccgactacgacagggtgctggagaagctgaagaagacagcaacaggctggatgaccacaattaacggcaaggagctgaaggtggagggccagattacctactacaacagatacaagagacagaacgtagtcaaggacctgtccgtcgagctggatagactgagcgaagaatctgtgaacaacgacatctcctcctggacaaagggcagaagcggagaagctctgagcctcctgaagaaaagattctcccatagacccgtgcaggagaagttcgtgtgcctgaactgcggcttcgagacacacgcagccgagcaagccgccctgaacatcgccagatcctggctgttcctgcggagccaggagtacaagaaataccagacaaacaagacaaccggcaacaccgataagagagccttcgtcgagacctggcagtccttttaccggaagaagcttaaggaggtgtggaaacctgccgtgcggtctggcggatctggcggaggctccgccagggagagcgtggtgttcagcgacgtgagcatcgccttcagccaggaggagtgggcccacctggacctggagcagaaggacctgtacagggacgtgatgctggagaactacagcaacctggtgagcctggccggctgcttcgtgagcaagcccgacgtgatcagcctgctggagcagggcaaggagccctggaagatcgtgaggaagggcaggaggaggtaccccgacctggagaccaggggcggcccaagcagcggcgcccctcctcccagcggcggcagcccagccggctccccaacctctaccgaggagggcacctctgagtccgccacccccgagagcggccctggcacctccaccgagcccagcgagggcagcgcacccggcagccctgccggcagccccacctccacagaggagggaaccagcaccgagcccagcgaaggcagcgccccaggcaccagcaccgagcctagtgagcaggagattaaacggatcaacaagatcagaagaagacttgtgaaagacagcaacaccaagaaggccggcaagacaggccccatgaaaaccctgctggttagagtgatgacacccgatctgagagagcggctggaaaacctgagaaagaagcctgaaaatatcccccagcccatcagcaatacatctagagccaacctgaataagctgctgaccgattacaccgaaatgaagaaggcgatcctgcatgtgtactgggaagagttccagaaggaccctgtgggcctgatgagccgggtggcccagcctgccagcaagaagatcgatcagaacaagctgaaacctgagatggacgagaagggcaacctgaccaccgccggctttgcctgctctcagtgtggccagcccctgttcgtgtacaagctggagcaggtgtctgagaagggcaaggcttacaccaactacttcggacggtgcaatgtggccgagcacgaaaagctgatcctgctggcccagctgaagcccgagaaggatagcgacgaagccgtgacatatagcctgggaaagtttgggcagagggccctggatttctacagcattcatgtgaccaaggagtccacccaccccgtgaagcccctggcccagatcgccggaaacagatacgcctccggacctgtgggaaaggccctgagcgacgcatgtatgggcacaatcgcctccttcctgtctaagtaccaggacatcatcatcgaacaccagaaggtggtgaagggcaaccagaagagactggagagcctgcgggagctggccggcaaggaaaacctggaataccctagcgtgaccctgccacctcagcctcacaccaaggagggcgttgatgcctacaacgaagtgatcgcccgggtgcgaatgtgggtgaacctgaacctgtggcagaagctgaagctaagcagagatgatgccaagcctctgctgagactgaagggattcccttcctttcctctggtcgagagacaggccaacgaagtggactggtgggacatggtgtgtaacgtgaagaagctgatcaacgagaaaaaggaggatggcaaggtgttttggcagaatctggctggctacaagagacaggaagccctgagaccatacctgagcagcgaggaagatcggaagaagggaaagaaattcgctcggtaccagctgggcgacctgctgctgcacctggaaaagaagcacggcgaggactggggaaaggtgtacgacgaggcctgggagcggattgacaagaaagtggaaggcctgagcaagcacatcaagctggaagaggaacggagaagcgaggacgcccagagcaaggccgccctgaccgactggctgcgggctaaggccagcttcgtgatcgagggcctgaaggaggccgacaaggacgagttctgcagatgcgagctgaagctgcagaagtggtacggggacctgcggggaaagcccttcgccatcgaagccgagaacagcatcctggacatcagcggcttcagcaagcagtacaactgtgccttcatctggcagaaggacggcgtgaagaagctgaacctgtacctgatcatcaactacttcaagggcggcaagctgcggttcaagaagatcaaacctgaagccttcgaagccaacagattctacaccgtgatcaacaaaaagagcggcgagatcgtgcccatggaggtgaacttcaacttcgacgaccccaacctgatcatcctgcctctggcctttggcaagagacagggcagagaattcatctggaacgacctgctgtccctggaaaccggcagcctgaagctggccaacggaagagtgatcgagaagacactgtacaacagaagaacccggcaggatgagcctgccctgttcgtggccctgaccttcgagcggcgggaggtcctggactcctccaatatcaaaccaatgaacctgatcggcgtggcaagaggcgaaaacatccccgccgtgatcgccctgaccgaccccgagggctgcccactgagccggtttaaggatagcctgggaaacccaacccacatcctgagaatcggcgagagctataaggagaagcagcggaccatccaggccaagaaggaggtggagcagcggagagccggcggctacagccggaagtacgccagcaaagccaagaatctggcagacgatatggtgagaaacaccgctagagatctgctgtactacgccgtgacccaggatgccatgctgatcttcgccaacctgagccggggcttcggccggcagggcaagcggaccttcatggccgagagacagtacacacggatggaggactggctgaccgccaagctggcctacgagggcctgagcaagacctacctgtccaagacactggcccagtacacctccaagacatgcagcaactgtgggtttaccatcaccagcgccgactacgacagggtgctggagaagctgaagaagacagcaacaggctggatgaccacaattaacggcaaggagctgaaggtggagggccagattacctactacaacagatacaagagacagaacgtagtcaaggacctgtccgtcgagctggatagactgagcgaagaatctgtgaacaacgacatctcctcctggacaaagggcagaagcggagaagctctgagcctcctgaagaaaagattctcccatagacccgtgcaggagaagttcgtgtgcctgaactgcggcttcgagacacacgcagccgagcaagccgccctgaacatcgccagatcctggctgttcctgcggagccaggagtacaagaaataccagacaaacaagacaaccggcaacaccgataagagagccttcgtcgagacctggcagtccttttaccggaagaagcttaaggaggtgtggaaacctgccgtgcggtctggcggatctggcggaggctcctgccagggagagcgtggtgttcagcgacgtgagcatcgccttcagccaggaggagtgggcccacctggacctggagcagaaggacctgtacagggacgtgatgctggagaactacagcaacctggtgagcctggccggctgcttcgtgagcaagcccgacgtgatcagcctgctggagcagggcaaggagccctggaagatcgtgaggaagggcaggaggaggtaccccgacctggagaccaggggatctggctccggcagcggccccaagaaaaagagaaaagtctaagctgccttctgcggggcttgccttctggccatgcccttcttctctcccttgcacctgtacctcttggtctttgaataaagcctgagtaggaaggctagcaaaaaaaaaaaaaaaaaaaaaaaaaaaaaaaaaaaaaaaaaaaaaaaaaaaaaaaaaaaaaaaaaaaaaaaaaaaaaaaa

SEQ ID NO: 15448 - RNA, 9485 nt, synthetic construct
  source 1..9485: mol_type = other RNA
aggaaataagagagaaaagaagagtaagaagaaatataagagccaccatggcccctaagaagaagcgtaaagtgagccggatggaacgcctcgtctacgaggtgcggcagaagtgcagaaacatcgaggacatctgcatctcctgcggatctctgaacgtgaccctggagcacccactgttcatcggcggcatgtgccagaactgtaaaaactgttttctggagtgtgcctatcaatacgacgatgacggctaccagagctactgcaccatctgttgcggcggaagagaggtgctgatgtgtggaaataacaactgctgccggtgcttctgcgtggaatgcgtggacctgctggtgggccccggcgccgcccaggccgctattaaggaagatccttggaactgctacatgtgcggccacaagggcacatacggcctgctgagacggagagaggactggcctagcagactgcagatgttcttcgccaataaccacgaccaggagttcgacccccctaaggtgtaccctcccgtccccgccgagaagagaaagcccatccgggtcctgagcctgttcgatggcatcgccaccggtctgctggtgctgaaggacctgggcatccaggtggataggtacattgcctccgaggtgtgcgaggactccatcaccgtgggaatggtgcgtcatcagggcaagatcatgtacgtgggcgacgtgcggagcgtgacacagaagcatatccaggagtggggccctttcgacctggtgatcggcggcagcccttgcaatgacctgagcatcgtgaacccagcccggaagggcctgtacgagggaaccggcagactgttcttcgagttttacagactgctgcacgacgcccggcctaaggaaggcgacgaccggcccttcttttggctgttcgagaatgtggtggccatgggagtcagcgacaagcgggatattagccggttcctggagagcaaccccgtgatgatcgatgccaaggaagtgagcgccgcccaccgggccagatacttctggggcaatctgcctggcatgaacagacccctggccagcaccgtgaacgacaagctggagctgcaggagtgcctggagcacggccggatcgccaagttcagcaaggtgagaaccatcaccacccgaagcaacagcatcaaacaaggcaaggaccagcactttcctgtgttcatgaacgagaaggaggacatcctgtggtgtaccgagatggagagagtgttcgggttcccagtccactacacagatgtcagcaacatgtctagactggccagacagagactgctgggaagaagctggtccgtccctgtgatcagacacctgttcgcccctctgaaggagtacttcgcctgcgtgagcagcggcaacagcaacgccaacagccggggccccagcttctctagcggcctggtgccactgtccctgagagggagccacatgggccccatggagatctacaaaaccgtgagcgcctggaagcggcagcctgtgcgcgtgctgagcctgtttcggaatatcgataaagtcctgaaaagcctgggattcctggagagcggctctggctccggcggtggcaccctgaagtacgtggaggatgtgacaaacgtggtcagacgggatgtggagaagtggggccccttcgatctggtgtacggcagcacccaacccctgggcagctcttgtgaccggtgccctggctggtacatgtttcagttccaccggatcctgcagtacgccctgccgagacaggagtcccagcggccattcttttggattttcatggacaacttgctgctgaccgaggatgaccaggaaactaccactcggttcctgcagaccgaagccgtgaccctgcaggacgtgagaggccgggactaccagaacgccatgcgggtgtggtccaacatccctggactgaaaagcaagcacgcacctctgacccctaaagaagaggagtacctgcaggcccaggtgcggagcagaagcaagctggacgcccctaaggtggatctgctggtgaagaattgcctcctgcccctgagagagtacttcaagtatttcagccagaatagtctgcccctgggaggcagcggcggcggcgccctggtgacatttgaggacgtcgccgtgcggttcacccaggaggaatgggctctgctggatccttctcagaaaatcctgtaccgggacgtgatgagagagacataccggaatctgacctccgtgggcatcaactgggaatgttgggaccttgaagcctgcttcagaagcctgggaagaaacctgagagtgcaggtggtgaagagaaagtgcgagctgaccaacagcggcccctgcgccgagggcggcccaagcagcggcgcccctcctcccagcggcggcagcccagccggctccccaacctctaccgaggagggcacctctgagtccgccacccccgagagcggccctggcacctccaccgagcccagcgagggcagcgcacccggcagccctgccggcagccccacctccacagaggagggaaccagcaccgagcccagcgaaggcagcgccccaggcaccagcaccgagcctagtgagcaggagattaaacggatcaacaagatcagaagaagacttgtgaaagacagcaacaccaagaaggccggcaagacaggccccatgaaaaccctgctggttagagtgatgacacccgatctgagagagcggctggaaaacctgagaaagaagcctgaaaatatcccccagcccatcagcaatacatctagagccaacctgaataagctgctgaccgattacaccgaaatgaagaaggcgatcctgcatgtgtactgggaagagttccagaaggaccctgtgggcctgatgagccgggtggcccagcctgccagcaagaagatcgatcagaacaagctgaaacctgagatggacgagaagggcaacctgaccaccgccggctttgcctgctctcagtgtggccagcccctgttcgtgtacaagctggagcaggtgtctgagaagggcaaggcttacaccaactacttcggacggtgcaatgtggccgagcacgaaaagctgatcctgctggcccagctgaagcccgagaaggatagcgacgaagccgtgacatatagcctgggaaagtttgggcagagggccctggatttctacagcattcatgtgaccaaggagtccacccaccccgtgaagcccctggcccagatcgccggaaacagatacgcctccggacctgtgggaaaggccctgagcgacgcatgtatgggcacaatcgcctccttcctgtctaagtaccaggacatcatcatcgaacaccagaaggtggtgaagggcaaccagaagagactggagagcctgcgggagctggccggcaaggaaaacctggaataccctagcgtgaccctgccacctcagcctcacaccaaggagggcgttgatgcctacaacgaagtgatcgcccgggtgcgaatgtgggtgaacctgaacctgtggcagaagctgaagctaagcagagatgatgccaagcctctgctgagactgaagggattcccttcctttcctctggtcgagagacaggccaacgaagtggactggtgggacatggtgtgtaacgtgaagaagctgatcaacgagaaaaaggaggatggcaaggtgttttggcagaatctggctggctacaagagacaggaagccctgagaccatacctgagcagcgaggaagatcggaagaagggaaagaaattcgctcggtaccagctgggcgacctgctgctgcacctggaaaagaagcacggcgaggactggggaaaggtgtacgacgaggcctgggagcggattgacaagaaagtggaaggcctgagcaagcacatcaagctggaagaggaacggagaagcgaggacgcccagagcaaggccgccctgaccgactggctgcgggctaaggccagcttcgtgatcgagggcctgaaggaggccgacaaggacgagttctgcagatgcgagctgaagctgcagaagtggtacggggacctgcggggaaagcccttcgccatcgaagccgagaacagcatcctggacatcagcggcttcagcaagcagtacaactgtgccttcatctggcagaaggacggcgtgaagaagctgaacctgtacctgatcatcaactacttcaagggcggcaagctgcggttcaagaagatcaaacctgaagccttcgaagccaacagattctacaccgtgatcaacaaaaagagcggcgagatcgtgcccatggaggtgaacttcaacttcgacgaccccaacctgatcatcctgcctctggcctttggcaagagacagggcagagaattcatctggaacgacctgctgtccctggaaaccggcagcctgaagctggccaacggaagagtgatcgagaagacactgtacaacagaagaacccggcaggatgagcctgccctgttcgtggccctgaccttcgagcggcgggaggtcctggactcctccaatatcaaaccaatgaacctgatcggcgtggcaagaggcgaaaacatccccgccgtgatcgccctgaccgaccccgagggctgcccactgagccggtttaaggatagcctgggaaacccaacccacatcctgagaatcggcgagagctataaggagaagcagcggaccatccaggccaagaaggaggtggagcagcggagagccggcggctacagccggaagtacgccagcaaagccaagaatctggcagacgatatggtgagaaacaccgctagagatctgctgtactacgccgtgacccaggatgccatgctgatcttcgccaacctgagccggggcttcggccggcagggcaagcggaccttcatggccgagagacagtacacacggatggaggactggctgaccgccaagctggcctacgagggcctgagcaagacctacctgtccaagacactggcccagtacacctccaagacatgcagcaactgtgggtttaccatcaccagcgccgactacgacagggtgctggagaagctgaagaagacagcaacaggctggatgaccacaattaacggcaaggagctgaaggtggagggccagattacctactacaacagatacaagagacagaacgtagtcaaggacctgtccgtcgagctggatagactgagcgaagaatctgtgaacaacgacatctcctcctggacaaagggcagaagcggagaagctctgagcctcctgaagaaaagattctcccatagacccgtgcaggagaagttcgtgtgcctgaactgcggcttcgagacacacgcagccgagcaagccgccctgaacatcgccagatcctggctgttcctgcggagccaggagtacaagaaataccagacaaacaagacaaccggcaacaccgataagagagccttcgtcgagacctggcagtccttttaccggaagaagcttaaggaggtgtggaaacctgccgtgcggtctggcggatctggcggaggctccatgatcgagtaccagatccccgtgagcttcaaggacgtggtggtgggcttcacccaggaggagtggcaccagctgagccccgcccagagggccctgtacagggacgtgatgctggagacctacagcaacctggtgagcgtgggctacgagggcaccaagcccgacgtgatcctgaggctggagcaggaggaggccccctggatcggcgaggccgcctgccccggctgccactgctggggcaagggcggcccaagcagcggcgcccctcctcccagcggcggcagcccagccggctccccaacctctaccgaggagggcacctctgagtccgccacccccgagagcggccctggcacctccaccgagcccagcgagggcagcgcacccggcagccctgccggcagccccacctccacagaggagggaaccagcaccgagcccagcgaaggcagcgccccaggcaccagcaccgagcctagtgagcaggagattaaacggatcaacaagatcagaagaagacttgtgaaagacagcaacaccaagaaggccggcaagacaggccccatgaaaaccctgctggttagagtgatgacacccgatctgagagagcggctggaaaacctgagaaagaagcctgaaaatatcccccagcccatcagcaatacatctagagccaacctgaataagctgctgaccgattacaccgaaatgaagaaggcgatcctgcatgtgtactgggaagagttccagaaggaccctgtgggcctgatgagccgggtggcccagcctgccagcaagaagatcgatcagaacaagctgaaacctgagatggacgagaagggcaacctgaccaccgccggctttgcctgctctcagtgtggccagcccctgttcgtgtacaagctggagcaggtgtctgagaagggcaaggcttacaccaactacttcggacggtgcaatgtggccgagcacgaaaagctgatcctgctggcccagctgaagcccgagaaggatagcgacgaagccgtgacatatagcctgggaaagtttgggcagagggccctggatttctacagcattcatgtgaccaaggagtccacccaccccgtgaagcccctggcccagatcgccggaaacagatacgcctccggacctgtgggaaaggccctgagcgacgcatgtatgggcacaatcgcctccttcctgtctaagtaccaggacatcatcatcgaacaccagaaggtggtgaagggcaaccagaagagactggagagcctgcgggagctggccggcaaggaaaacctggaataccctagcgtgaccctgccacctcagcctcacaccaaggagggcgttgatgcctacaacgaagtgatcgcccgggtgcgaatgtgggtgaacctgaacctgtggcagaagctgaagctaagcagagatgatgccaagcctctgctgagactgaagggattcccttcctttcctctggtcgagagacaggccaacgaagtggactggtgggacatggtgtgtaacgtgaagaagctgatcaacgagaaaaaggaggatggcaaggtgttttggcagaatctggctggctacaagagacaggaagccctgagaccatacctgagcagcgaggaagatcggaagaagggaaagaaattcgctcggtaccagctgggcgacctgctgctgcacctggaaaagaagcacggcgaggactggggaaaggtgtacgacgaggcctgggagcggattgacaagaaagtggaaggcctgagcaagcacatcaagctggaagaggaacggagaagcgaggacgcccagagcaaggccgccctgaccgactggctgcgggctaaggccagcttcgtgatcgagggcctgaaggaggccgacaaggacgagttctgcagatgcgagctgaagctgcagaagtggtacggggacctgcggggaaagcccttcgccatcgaagccgagaacagcatcctggacatcagcggcttcagcaagcagtacaactgtgccttcatctggcagaaggacggcgtgaagaagctgaacctgtacctgatcatcaactacttcaagggcggcaagctgcggttcaagaagatcaaacctgaagccttcgaagccaacagattctacaccgtgatcaacaaaaagagcggcgagatcgtgcccatggaggtgaacttcaacttcgacgaccccaacctgatcatcctgcctctggcctttggcaagagacagggcagagaattcatctggaacgacctgctgtccctggaaaccggcagcctgaagctggccaacggaagagtgatcgagaagacactgtacaacagaagaacccggcaggatgagcctgccctgttcgtggccctgaccttcgagcggcgggaggtcctggactcctccaatatcaaaccaatgaacctgatcggcgtggcaagaggcgaaaacatccccgccgtgatcgccctgaccgaccccgagggctgcccactgagccggtttaaggatagcctgggaaacccaacccacatcctgagaatcggcgagagctataaggagaagcagcggaccatccaggccaagaaggaggtggagcagcggagagccggcggctacagccggaagtacgccagcaaagccaagaatctggcagacgatatggtgagaaacaccgctagagatctgctgtactacgccgtgacccaggatgccatgctgatcttcgccaacctgagccggggcttcggccggcagggcaagcggaccttcatggccgagagacagtacacacggatggaggactggctgaccgccaagctggcctacgagggcctgagcaagacctacctgtccaagacactggcccagtacacctccaagacatgcagcaactgtgggtttaccatcaccagcgccgactacgacagggtgctggagaagctgaagaagacagcaacaggctggatgaccacaattaacggcaaggagctgaaggtggagggccagattacctactacaacagatacaagagacagaacgtagtcaaggacctgtccgtcgagctggatagactgagcgaagaatctgtgaacaacgacatctcctcctggacaaagggcagaagcggagaagctctgagcctcctgaagaaaagattctcccatagacccgtgcaggagaagttcgtgtgcctgaactgcggcttcgagacacacgcagccgagcaagccgccctgaacatcgccagatcctggctgttcctgcggagccaggagtacaagaaataccagacaaacaagacaaccggcaacaccgataagagagccttcgtcgagacctggcagtccttttaccggaagaagcttaaggaggtgtggaaacctgccgtgcggtctggcggatctggcggaggctcctatgatcgagtaccagatccccgtgagcttcaaggacgtggtggtgggcttcacccaggaggagtggcaccagctgagccccgcccagagggccctgtacagggacgtgatgctggagacctacagcaacctggtgagcgtgggctacgagggcaccaagcccgacgtgatcctgaggctggagcaggaggaggccccctggatcggcgaggccgcctgccccggctgccactgctggggcaagggatctggctccggcagcggccccaagaaaaagagaaaagtctaagctgccttctgcggggcttgccttctggccatgcccttcttctctcccttgcacctgtacctcttggtctttgaataaagcctgagtaggaaggctagcaaaaaaaaaaaaaaaaaaaaaaaaaaaaaaaaaaaaaaaaaaaaaaaaaaaaaaaaaaaaaaaaaaaaaaaaaaaaaaaa

SEQ ID NO: 15449 - RNA, 9485 nt, synthetic construct
  source 1..9485: mol_type = other RNA
aggaaataagagagaaaagaagagtaagaagaaatataagagccaccatggcccctaagaagaagcgtaaagtgagccggatggaacgcctcgtctacgaggtgcggcagaagtgcagaaacatcgaggacatctgcatctcctgcggatctctgaacgtgaccctggagcacccactgttcatcggcggcatgtgccagaactgtaaaaactgttttctggagtgtgcctatcaatacgacgatgacggctaccagagctactgcaccatctgttgcggcggaagagaggtgctgatgtgtggaaataacaactgctgccggtgcttctgcgtggaatgcgtggacctgctggtgggccccggcgccgcccaggccgctattaaggaagatccttggaactgctacatgtgcggccacaagggcacatacggcctgctgagacggagagaggactggcctagcagactgcagatgttcttcgccaataaccacgaccaggagttcgacccccctaaggtgtaccctcccgtccccgccgagaagagaaagcccatccgggtcctgagcctgttcgatggcatcgccaccggtctgctggtgctgaaggacctgggcatccaggtggataggtacattgcctccgaggtgtgcgaggactccatcaccgtgggaatggtgcgtcatcagggcaagatcatgtacgtgggcgacgtgcggagcgtgacacagaagcatatccaggagtggggccctttcgacctggtgatcggcggcagcccttgcaatgacctgagcatcgtgaacccagcccggaagggcctgtacgagggaaccggcagactgttcttcgagttttacagactgctgcacgacgcccggcctaaggaaggcgacgaccggcccttcttttggctgttcgagaatgtggtggccatgggagtcagcgacaagcgggatattagccggttcctggagagcaaccccgtgatgatcgatgccaaggaagtgagcgccgcccaccgggccagatacttctggggcaatctgcctggcatgaacagacccctggccagcaccgtgaacgacaagctggagctgcaggagtgcctggagcacggccggatcgccaagttcagcaaggtgagaaccatcaccacccgaagcaacagcatcaaacaaggcaaggaccagcactttcctgtgttcatgaacgagaaggaggacatcctgtggtgtaccgagatggagagagtgttcgggttcccagtccactacacagatgtcagcaacatgtctagactggccagacagagactgctgggaagaagctggtccgtccctgtgatcagacacctgttcgcccctctgaaggagtacttcgcctgcgtgagcagcggcaacagcaacgccaacagccggggccccagcttctctagcggcctggtgccactgtccctgagagggagccacatgggccccatggagatctacaaaaccgtgagcgcctggaagcggcagcctgtgcgcgtgctgagcctgtttcggaatatcgataaagtcctgaaaagcctgggattcctggagagcggctctggctccggcggtggcaccctgaagtacgtggaggatgtgacaaacgtggtcagacgggatgtggagaagtggggccccttcgatctggtgtacggcagcacccaacccctgggcagctcttgtgaccggtgccctggctggtacatgtttcagttccaccggatcctgcagtacgccctgccgagacaggagtcccagcggccattcttttggattttcatggacaacttgctgctgaccgaggatgaccaggaaactaccactcggttcctgcagaccgaagccgtgaccctgcaggacgtgagaggccgggactaccagaacgccatgcgggtgtggtccaacatccctggactgaaaagcaagcacgcacctctgacccctaaagaagaggagtacctgcaggcccaggtgcggagcagaagcaagctggacgcccctaaggtggatctgctggtgaagaattgcctcctgcccctgagagagtacttcaagtatttcagccagaatagtctgcccctgggaggcagcggcggcggcgccctggtgacatttgaggacgtcgccgtgcggttcacccaggaggaatgggctctgctggatccttctcagaaaatcctgtaccgggacgtgatgagagagacataccggaatctgacctccgtgggcatcaactgggaatgttgggaccttgaagcctgcttcagaagcctgggaagaaacctgagagtgcaggtggtgaagagaaagtgcgagctgaccaacagcggcccctgcgccgagggcggcccaagcagcggcgcccctcctcccagcggcggcagcccagccggctccccaacctctaccgaggagggcacctctgagtccgccacccccgagagcggccctggcacctccaccgagcccagcgagggcagcgcacccggcagccctgccggcagccccacctccacagaggagggaaccagcaccgagcccagcgaaggcagcgccccaggcaccagcaccgagcctagtgagcaggagattaaacggatcaacaagatcagaagaagacttgtgaaagacagcaacaccaagaaggccggcaagacaggccccatgaaaaccctgctggttagagtgatgacacccgatctgagagagcggctggaaaacctgagaaagaagcctgaaaatatcccccagcccatcagcaatacatctagagccaacctgaataagctgctgaccgattacaccgaaatgaagaaggcgatcctgcatgtgtactgggaagagttccagaaggaccctgtgggcctgatgagccgggtggcccagcctgccagcaagaagatcgatcagaacaagctgaaacctgagatggacgagaagggcaacctgaccaccgccggctttgcctgctctcagtgtggccagcccctgttcgtgtacaagctggagcaggtgtctgagaagggcaaggcttacaccaactacttcggacggtgcaatgtggccgagcacgaaaagctgatcctgctggcccagctgaagcccgagaaggatagcgacgaagccgtgacatatagcctgggaaagtttgggcagagggccctggatttctacagcattcatgtgaccaaggagtccacccaccccgtgaagcccctggcccagatcgccggaaacagatacgcctccggacctgtgggaaaggccctgagcgacgcatgtatgggcacaatcgcctccttcctgtctaagtaccaggacatcatcatcgaacaccagaaggtggtgaagggcaaccagaagagactggagagcctgcgggagctggccggcaaggaaaacctggaataccctagcgtgaccctgccacctcagcctcacaccaaggagggcgttgatgcctacaacgaagtgatcgcccgggtgcgaatgtgggtgaacctgaacctgtggcagaagctgaagctaagcagagatgatgccaagcctctgctgagactgaagggattcccttcctttcctctggtcgagagacaggccaacgaagtggactggtgggacatggtgtgtaacgtgaagaagctgatcaacgagaaaaaggaggatggcaaggtgttttggcagaatctggctggctacaagagacaggaagccctgagaccatacctgagcagcgaggaagatcggaagaagggaaagaaattcgctcggtaccagctgggcgacctgctgctgcacctggaaaagaagcacggcgaggactggggaaaggtgtacgacgaggcctgggagcggattgacaagaaagtggaaggcctgagcaagcacatcaagctggaagaggaacggagaagcgaggacgcccagagcaaggccgccctgaccgactggctgcgggctaaggccagcttcgtgatcgagggcctgaaggaggccgacaaggacgagttctgcagatgcgagctgaagctgcagaagtggtacggggacctgcggggaaagcccttcgccatcgaagccgagaacagcatcctggacatcagcggcttcagcaagcagtacaactgtgccttcatctggcagaaggacggcgtgaagaagctgaacctgtacctgatcatcaactacttcaagggcggcaagctgcggttcaagaagatcaaacctgaagccttcgaagccaacagattctacaccgtgatcaacaaaaagagcggcgagatcgtgcccatggaggtgaacttcaacttcgacgaccccaacctgatcatcctgcctctggcctttggcaagagacagggcagagaattcatctggaacgacctgctgtccctggaaaccggcagcctgaagctggccaacggaagagtgatcgagaagacactgtacaacagaagaacccggcaggatgagcctgccctgttcgtggccctgaccttcgagcggcgggaggtcctggactcctccaatatcaaaccaatgaacctgatcggcgtggcaagaggcgaaaacatccccgccgtgatcgccctgaccgaccccgagggctgcccactgagccggtttaaggatagcctgggaaacccaacccacatcctgagaatcggcgagagctataaggagaagcagcggaccatccaggccaagaaggaggtggagcagcggagagccggcggctacagccggaagtacgccagcaaagccaagaatctggcagacgatatggtgagaaacaccgctagagatctgctgtactacgccgtgacccaggatgccatgctgatcttcgccaacctgagccggggcttcggccggcagggcaagcggaccttcatggccgagagacagtacacacggatggaggactggctgaccgccaagctggcctacgagggcctgagcaagacctacctgtccaagacactggcccagtacacctccaagacatgcagcaactgtgggtttaccatcaccagcgccgactacgacagggtgctggagaagctgaagaagacagcaacaggctggatgaccacaattaacggcaaggagctgaaggtggagggccagattacctactacaacagatacaagagacagaacgtagtcaaggacctgtccgtcgagctggatagactgagcgaagaatctgtgaacaacgacatctcctcctggacaaagggcagaagcggagaagctctgagcctcctgaagaaaagattctcccatagacccgtgcaggagaagttcgtgtgcctgaactgcggcttcgagacacacgcagccgagcaagccgccctgaacatcgccagatcctggctgttcctgcggagccaggagtacaagaaataccagacaaacaagacaaccggcaacaccgataagagagccttcgtcgagacctggcagtccttttaccggaagaagcttaaggaggtgtggaaacctgccgtgcggtctggcggatctggcggaggctccccccaggagagcgtgaccttcaaggacatcgccgtggacttcacccaggaggagtgggccctgctggacgccagccagaggaagctgtacagggacgtgatgctggagaacatcggccacctggtgagcgtgggctacagggtgtgcaagagcgacgtgatcagccagctgcagcagggcgtggagctgtggagggagggcaggggcttcccccagggcgtgatccccgacaggaagagcagcggcggcccaagcagcggcgcccctcctcccagcggcggcagcccagccggctccccaacctctaccgaggagggcacctctgagtccgccacccccgagagcggccctggcacctccaccgagcccagcgagggcagcgcacccggcagccctgccggcagccccacctccacagaggagggaaccagcaccgagcccagcgaaggcagcgccccaggcaccagcaccgagcctagtgagcaggagattaaacggatcaacaagatcagaagaagacttgtgaaagacagcaacaccaagaaggccggcaagacaggccccatgaaaaccctgctggttagagtgatgacacccgatctgagagagcggctggaaaacctgagaaagaagcctgaaaatatcccccagcccatcagcaatacatctagagccaacctgaataagctgctgaccgattacaccgaaatgaagaaggcgatcctgcatgtgtactgggaagagttccagaaggaccctgtgggcctgatgagccgggtggcccagcctgccagcaagaagatcgatcagaacaagctgaaacctgagatggacgagaagggcaacctgaccaccgccggctttgcctgctctcagtgtggccagcccctgttcgtgtacaagctggagcaggtgtctgagaagggcaaggcttacaccaactacttcggacggtgcaatgtggccgagcacgaaaagctgatcctgctggcccagctgaagcccgagaaggatagcgacgaagccgtgacatatagcctgggaaagtttgggcagagggccctggatttctacagcattcatgtgaccaaggagtccacccaccccgtgaagcccctggcccagatcgccggaaacagatacgcctccggacctgtgggaaaggccctgagcgacgcatgtatgggcacaatcgcctccttcctgtctaagtaccaggacatcatcatcgaacaccagaaggtggtgaagggcaaccagaagagactggagagcctgcgggagctggccggcaaggaaaacctggaataccctagcgtgaccctgccacctcagcctcacaccaaggagggcgttgatgcctacaacgaagtgatcgcccgggtgcgaatgtgggtgaacctgaacctgtggcagaagctgaagctaagcagagatgatgccaagcctctgctgagactgaagggattcccttcctttcctctggtcgagagacaggccaacgaagtggactggtgggacatggtgtgtaacgtgaagaagctgatcaacgagaaaaaggaggatggcaaggtgttttggcagaatctggctggctacaagagacaggaagccctgagaccatacctgagcagcgaggaagatcggaagaagggaaagaaattcgctcggtaccagctgggcgacctgctgctgcacctggaaaagaagcacggcgaggactggggaaaggtgtacgacgaggcctgggagcggattgacaagaaagtggaaggcctgagcaagcacatcaagctggaagaggaacggagaagcgaggacgcccagagcaaggccgccctgaccgactggctgcgggctaaggccagcttcgtgatcgagggcctgaaggaggccgacaaggacgagttctgcagatgcgagctgaagctgcagaagtggtacggggacctgcggggaaagcccttcgccatcgaagccgagaacagcatcctggacatcagcggcttcagcaagcagtacaactgtgccttcatctggcagaaggacggcgtgaagaagctgaacctgtacctgatcatcaactacttcaagggcggcaagctgcggttcaagaagatcaaacctgaagccttcgaagccaacagattctacaccgtgatcaacaaaaagagcggcgagatcgtgcccatggaggtgaacttcaacttcgacgaccccaacctgatcatcctgcctctggcctttggcaagagacagggcagagaattcatctggaacgacctgctgtccctggaaaccggcagcctgaagctggccaacggaagagtgatcgagaagacactgtacaacagaagaacccggcaggatgagcctgccctgttcgtggccctgaccttcgagcggcgggaggtcctggactcctccaatatcaaaccaatgaacctgatcggcgtggcaagaggcgaaaacatccccgccgtgatcgccctgaccgaccccgagggctgcccactgagccggtttaaggatagcctgggaaacccaacccacatcctgagaatcggcgagagctataaggagaagcagcggaccatccaggccaagaaggaggtggagcagcggagagccggcggctacagccggaagtacgccagcaaagccaagaatctggcagacgatatggtgagaaacaccgctagagatctgctgtactacgccgtgacccaggatgccatgctgatcttcgccaacctgagccggggcttcggccggcagggcaagcggaccttcatggccgagagacagtacacacggatggaggactggctgaccgccaagctggcctacgagggcctgagcaagacctacctgtccaagacactggcccagtacacctccaagacatgcagcaactgtgggtttaccatcaccagcgccgactacgacagggtgctggagaagctgaagaagacagcaacaggctggatgaccacaattaacggcaaggagctgaaggtggagggccagattacctactacaacagatacaagagacagaacgtagtcaaggacctgtccgtcgagctggatagactgagcgaagaatctgtgaacaacgacatctcctcctggacaaagggcagaagcggagaagctctgagcctcctgaagaaaagattctcccatagacccgtgcaggagaagttcgtgtgcctgaactgcggcttcgagacacacgcagccgagcaagccgccctgaacatcgccagatcctggctgttcctgcggagccaggagtacaagaaataccagacaaacaagacaaccggcaacaccgataagagagccttcgtcgagacctggcagtccttttaccggaagaagcttaaggaggtgtggaaacctgccgtgcggtctggcggatctggcggaggctcctccccaggagagcgtgaccttcaaggacatcgccgtggacttcacccaggaggagtgggccctgctggacgccagccagaggaagctgtacagggacgtgatgctggagaacatcggccacctggtgagcgtgggctacagggtgtgcaagagcgacgtgatcagccagctgcagcagggcgtggagctgtggagggagggcaggggcttcccccagggcgtgatccccgacaggaagagcagcggatctggctccggcagcggccccaagaaaaagagaaaagtctaagctgccttctgcggggcttgccttctggccatgcccttcttctctcccttgcacctgtacctcttggtctttgaataaagcctgagtaggaaggctagcaaaaaaaaaaaaaaaaaaaaaaaaaaaaaaaaaaaaaaaaaaaaaaaaaaaaaaaaaaaaaaaaaaaaaaaaaaaaaaaa

SEQ ID NO: 15450 - RNA, 9485 nt, synthetic construct
  source 1..9485: mol_type = other RNA
aggaaataagagagaaaagaagagtaagaagaaatataagagccaccatggcccctaagaagaagcgtaaagtgagccggatggaacgcctcgtctacgaggtgcggcagaagtgcagaaacatcgaggacatctgcatctcctgcggatctctgaacgtgaccctggagcacccactgttcatcggcggcatgtgccagaactgtaaaaactgttttctggagtgtgcctatcaatacgacgatgacggctaccagagctactgcaccatctgttgcggcggaagagaggtgctgatgtgtggaaataacaactgctgccggtgcttctgcgtggaatgcgtggacctgctggtgggccccggcgccgcccaggccgctattaaggaagatccttggaactgctacatgtgcggccacaagggcacatacggcctgctgagacggagagaggactggcctagcagactgcagatgttcttcgccaataaccacgaccaggagttcgacccccctaaggtgtaccctcccgtccccgccgagaagagaaagcccatccgggtcctgagcctgttcgatggcatcgccaccggtctgctggtgctgaaggacctgggcatccaggtggataggtacattgcctccgaggtgtgcgaggactccatcaccgtgggaatggtgcgtcatcagggcaagatcatgtacgtgggcgacgtgcggagcgtgacacagaagcatatccaggagtggggccctttcgacctggtgatcggcggcagcccttgcaatgacctgagcatcgtgaacccagcccggaagggcctgtacgagggaaccggcagactgttcttcgagttttacagactgctgcacgacgcccggcctaaggaaggcgacgaccggcccttcttttggctgttcgagaatgtggtggccatgggagtcagcgacaagcgggatattagccggttcctggagagcaaccccgtgatgatcgatgccaaggaagtgagcgccgcccaccgggccagatacttctggggcaatctgcctggcatgaacagacccctggccagcaccgtgaacgacaagctggagctgcaggagtgcctggagcacggccggatcgccaagttcagcaaggtgagaaccatcaccacccgaagcaacagcatcaaacaaggcaaggaccagcactttcctgtgttcatgaacgagaaggaggacatcctgtggtgtaccgagatggagagagtgttcgggttcccagtccactacacagatgtcagcaacatgtctagactggccagacagagactgctgggaagaagctggtccgtccctgtgatcagacacctgttcgcccctctgaaggagtacttcgcctgcgtgagcagcggcaacagcaacgccaacagccggggccccagcttctctagcggcctggtgccactgtccctgagagggagccacatgggccccatggagatctacaaaaccgtgagcgcctggaagcggcagcctgtgcgcgtgctgagcctgtttcggaatatcgataaagtcctgaaaagcctgggattcctggagagcggctctggctccggcggtggcaccctgaagtacgtggaggatgtgacaaacgtggtcagacgggatgtggagaagtggggccccttcgatctggtgtacggcagcacccaacccctgggcagctcttgtgaccggtgccctggctggtacatgtttcagttccaccggatcctgcagtacgccctgccgagacaggagtcccagcggccattcttttggattttcatggacaacttgctgctgaccgaggatgaccaggaaactaccactcggttcctgcagaccgaagccgtgaccctgcaggacgtgagaggccgggactaccagaacgccatgcgggtgtggtccaacatccctggactgaaaagcaagcacgcacctctgacccctaaagaagaggagtacctgcaggcccaggtgcggagcagaagcaagctggacgcccctaaggtggatctgctggtgaagaattgcctcctgcccctgagagagtacttcaagtatttcagccagaatagtctgcccctgggaggcagcggcggcggcgccctggtgacatttgaggacgtcgccgtgcggttcacccaggaggaatgggctctgctggatccttctcagaaaatcctgtaccgggacgtgatgagagagacataccggaatctgacctccgtgggcatcaactgggaatgttgggaccttgaagcctgcttcagaagcctgggaagaaacctgagagtgcaggtggtgaagagaaagtgcgagctgaccaacagcggcccctgcgccgagggcggcccaagcagcggcgcccctcctcccagcggcggcagcccagccggctccccaacctctaccgaggagggcacctctgagtccgccacccccgagagcggccctggcacctccaccgagcccagcgagggcagcgcacccggcagccctgccggcagccccacctccacagaggagggaaccagcaccgagcccagcgaaggcagcgccccaggcaccagcaccgagcctagtgagcaggagattaaacggatcaacaagatcagaagaagacttgtgaaagacagcaacaccaagaaggccggcaagacaggccccatgaaaaccctgctggttagagtgatgacacccgatctgagagagcggctggaaaacctgagaaagaagcctgaaaatatcccccagcccatcagcaatacatctagagccaacctgaataagctgctgaccgattacaccgaaatgaagaaggcgatcctgcatgtgtactgggaagagttccagaaggaccctgtgggcctgatgagccgggtggcccagcctgccagcaagaagatcgatcagaacaagctgaaacctgagatggacgagaagggcaacctgaccaccgccggctttgcctgctctcagtgtggccagcccctgttcgtgtacaagctggagcaggtgtctgagaagggcaaggcttacaccaactacttcggacggtgcaatgtggccgagcacgaaaagctgatcctgctggcccagctgaagcccgagaaggatagcgacgaagccgtgacatatagcctgggaaagtttgggcagagggccctggatttctacagcattcatgtgaccaaggagtccacccaccccgtgaagcccctggcccagatcgccggaaacagatacgcctccggacctgtgggaaaggccctgagcgacgcatgtatgggcacaatcgcctccttcctgtctaagtaccaggacatcatcatcgaacaccagaaggtggtgaagggcaaccagaagagactggagagcctgcgggagctggccggcaaggaaaacctggaataccctagcgtgaccctgccacctcagcctcacaccaaggagggcgttgatgcctacaacgaagtgatcgcccgggtgcgaatgtgggtgaacctgaacctgtggcagaagctgaagctaagcagagatgatgccaagcctctgctgagactgaagggattcccttcctttcctctggtcgagagacaggccaacgaagtggactggtgggacatggtgtgtaacgtgaagaagctgatcaacgagaaaaaggaggatggcaaggtgttttggcagaatctggctggctacaagagacaggaagccctgagaccatacctgagcagcgaggaagatcggaagaagggaaagaaattcgctcggtaccagctgggcgacctgctgctgcacctggaaaagaagcacggcgaggactggggaaaggtgtacgacgaggcctgggagcggattgacaagaaagtggaaggcctgagcaagcacatcaagctggaagaggaacggagaagcgaggacgcccagagcaaggccgccctgaccgactggctgcgggctaaggccagcttcgtgatcgagggcctgaaggaggccgacaaggacgagttctgcagatgcgagctgaagctgcagaagtggtacggggacctgcggggaaagcccttcgccatcgaagccgagaacagcatcctggacatcagcggcttcagcaagcagtacaactgtgccttcatctggcagaaggacggcgtgaagaagctgaacctgtacctgatcatcaactacttcaagggcggcaagctgcggttcaagaagatcaaacctgaagccttcgaagccaacagattctacaccgtgatcaacaaaaagagcggcgagatcgtgcccatggaggtgaacttcaacttcgacgaccccaacctgatcatcctgcctctggcctttggcaagagacagggcagagaattcatctggaacgacctgctgtccctggaaaccggcagcctgaagctggccaacggaagagtgatcgagaagacactgtacaacagaagaacccggcaggatgagcctgccctgttcgtggccctgaccttcgagcggcgggaggtcctggactcctccaatatcaaaccaatgaacctgatcggcgtggcaagaggcgaaaacatccccgccgtgatcgccctgaccgaccccgagggctgcccactgagccggtttaaggatagcctgggaaacccaacccacatcctgagaatcggcgagagctataaggagaagcagcggaccatccaggccaagaaggaggtggagcagcggagagccggcggctacagccggaagtacgccagcaaagccaagaatctggcagacgatatggtgagaaacaccgctagagatctgctgtactacgccgtgacccaggatgccatgctgatcttcgccaacctgagccggggcttcggccggcagggcaagcggaccttcatggccgagagacagtacacacggatggaggactggctgaccgccaagctggcctacgagggcctgagcaagacctacctgtccaagacactggcccagtacacctccaagacatgcagcaactgtgggtttaccatcaccagcgccgactacgacagggtgctggagaagctgaagaagacagcaacaggctggatgaccacaattaacggcaaggagctgaaggtggagggccagattacctactacaacagatacaagagacagaacgtagtcaaggacctgtccgtcgagctggatagactgagcgaagaatctgtgaacaacgacatctcctcctggacaaagggcagaagcggagaagctctgagcctcctgaagaaaagattctcccatagacccgtgcaggagaagttcgtgtgcctgaactgcggcttcgagacacacgcagccgagcaagccgccctgaacatcgccagatcctggctgttcctgcggagccaggagtacaagaaataccagacaaacaagacaaccggcaacaccgataagagagccttcgtcgagacctggcagtccttttaccggaagaagcttaaggaggtgtggaaacctgccgtgcggtctggcggatctggcggaggctccatgaacgtggaggtggtgaaggtgatgccccaggacctggtgaccttcaaggacgtggccatcgacttcagccaggaggagtggcagtggatgaaccccgcccagaagaggctgtacaggagcatgatgctggagaactaccagagcctggtgagcctgggcctgtgcatcagcaagccctacgtgatcagcctgctggagcagggcagggagccctgggagatgaccagcgagatgaccaggggcggcccaagcagcggcgcccctcctcccagcggcggcagcccagccggctccccaacctctaccgaggagggcacctctgagtccgccacccccgagagcggccctggcacctccaccgagcccagcgagggcagcgcacccggcagccctgccggcagccccacctccacagaggagggaaccagcaccgagcccagcgaaggcagcgccccaggcaccagcaccgagcctagtgagcaggagattaaacggatcaacaagatcagaagaagacttgtgaaagacagcaacaccaagaaggccggcaagacaggccccatgaaaaccctgctggttagagtgatgacacccgatctgagagagcggctggaaaacctgagaaagaagcctgaaaatatcccccagcccatcagcaatacatctagagccaacctgaataagctgctgaccgattacaccgaaatgaagaaggcgatcctgcatgtgtactgggaagagttccagaaggaccctgtgggcctgatgagccgggtggcccagcctgccagcaagaagatcgatcagaacaagctgaaacctgagatggacgagaagggcaacctgaccaccgccggctttgcctgctctcagtgtggccagcccctgttcgtgtacaagctggagcaggtgtctgagaagggcaaggcttacaccaactacttcggacggtgcaatgtggccgagcacgaaaagctgatcctgctggcccagctgaagcccgagaaggatagcgacgaagccgtgacatatagcctgggaaagtttgggcagagggccctggatttctacagcattcatgtgaccaaggagtccacccaccccgtgaagcccctggcccagatcgccggaaacagatacgcctccggacctgtgggaaaggccctgagcgacgcatgtatgggcacaatcgcctccttcctgtctaagtaccaggacatcatcatcgaacaccagaaggtggtgaagggcaaccagaagagactggagagcctgcgggagctggccggcaaggaaaacctggaataccctagcgtgaccctgccacctcagcctcacaccaaggagggcgttgatgcctacaacgaagtgatcgcccgggtgcgaatgtgggtgaacctgaacctgtggcagaagctgaagctaagcagagatgatgccaagcctctgctgagactgaagggattcccttcctttcctctggtcgagagacaggccaacgaagtggactggtgggacatggtgtgtaacgtgaagaagctgatcaacgagaaaaaggaggatggcaaggtgttttggcagaatctggctggctacaagagacaggaagccctgagaccatacctgagcagcgaggaagatcggaagaagggaaagaaattcgctcggtaccagctgggcgacctgctgctgcacctggaaaagaagcacggcgaggactggggaaaggtgtacgacgaggcctgggagcggattgacaagaaagtggaaggcctgagcaagcacatcaagctggaagaggaacggagaagcgaggacgcccagagcaaggccgccctgaccgactggctgcgggctaaggccagcttcgtgatcgagggcctgaaggaggccgacaaggacgagttctgcagatgcgagctgaagctgcagaagtggtacggggacctgcggggaaagcccttcgccatcgaagccgagaacagcatcctggacatcagcggcttcagcaagcagtacaactgtgccttcatctggcagaaggacggcgtgaagaagctgaacctgtacctgatcatcaactacttcaagggcggcaagctgcggttcaagaagatcaaacctgaagccttcgaagccaacagattctacaccgtgatcaacaaaaagagcggcgagatcgtgcccatggaggtgaacttcaacttcgacgaccccaacctgatcatcctgcctctggcctttggcaagagacagggcagagaattcatctggaacgacctgctgtccctggaaaccggcagcctgaagctggccaacggaagagtgatcgagaagacactgtacaacagaagaacccggcaggatgagcctgccctgttcgtggccctgaccttcgagcggcgggaggtcctggactcctccaatatcaaaccaatgaacctgatcggcgtggcaagaggcgaaaacatccccgccgtgatcgccctgaccgaccccgagggctgcccactgagccggtttaaggatagcctgggaaacccaacccacatcctgagaatcggcgagagctataaggagaagcagcggaccatccaggccaagaaggaggtggagcagcggagagccggcggctacagccggaagtacgccagcaaagccaagaatctggcagacgatatggtgagaaacaccgctagagatctgctgtactacgccgtgacccaggatgccatgctgatcttcgccaacctgagccggggcttcggccggcagggcaagcggaccttcatggccgagagacagtacacacggatggaggactggctgaccgccaagctggcctacgagggcctgagcaagacctacctgtccaagacactggcccagtacacctccaagacatgcagcaactgtgggtttaccatcaccagcgccgactacgacagggtgctggagaagctgaagaagacagcaacaggctggatgaccacaattaacggcaaggagctgaaggtggagggccagattacctactacaacagatacaagagacagaacgtagtcaaggacctgtccgtcgagctggatagactgagcgaagaatctgtgaacaacgacatctcctcctggacaaagggcagaagcggagaagctctgagcctcctgaagaaaagattctcccatagacccgtgcaggagaagttcgtgtgcctgaactgcggcttcgagacacacgcagccgagcaagccgccctgaacatcgccagatcctggctgttcctgcggagccaggagtacaagaaataccagacaaacaagacaaccggcaacaccgataagagagccttcgtcgagacctggcagtccttttaccggaagaagcttaaggaggtgtggaaacctgccgtgcggtctggcggatctggcggaggctcctatgaacgtggaggtggtgaaggtgatgccccaggacctggtgaccttcaaggacgtggccatcgacttcagccaggaggagtggcagtggatgaaccccgcccagaagaggctgtacaggagcatgatgctggagaactaccagagcctggtgagcctgggcctgtgcatcagcaagccctacgtgatcagcctgctggagcagggcagggagccctgggagatgaccagcgagatgaccaggggatctggctccggcagcggccccaagaaaaagagaaaagtctaagctgccttctgcggggcttgccttctggccatgcccttcttctctcccttgcacctgtacctcttggtctttgaataaagcctgagtaggaaggctagcaaaaaaaaaaaaaaaaaaaaaaaaaaaaaaaaaaaaaaaaaaaaaaaaaaaaaaaaaaaaaaaaaaaaaaaaaaaaaaaa

SEQ ID NO: 15451 - RNA, 9485 nt, synthetic construct
  source 1..9485: mol_type = other RNA
aggaaataagagagaaaagaagagtaagaagaaatataagagccaccatggcccctaagaagaagcgtaaagtgagccggatggaacgcctcgtctacgaggtgcggcagaagtgcagaaacatcgaggacatctgcatctcctgcggatctctgaacgtgaccctggagcacccactgttcatcggcggcatgtgccagaactgtaaaaactgttttctggagtgtgcctatcaatacgacgatgacggctaccagagctactgcaccatctgttgcggcggaagagaggtgctgatgtgtggaaataacaactgctgccggtgcttctgcgtggaatgcgtggacctgctggtgggccccggcgccgcccaggccgctattaaggaagatccttggaactgctacatgtgcggccacaagggcacatacggcctgctgagacggagagaggactggcctagcagactgcagatgttcttcgccaataaccacgaccaggagttcgacccccctaaggtgtaccctcccgtccccgccgagaagagaaagcccatccgggtcctgagcctgttcgatggcatcgccaccggtctgctggtgctgaaggacctgggcatccaggtggataggtacattgcctccgaggtgtgcgaggactccatcaccgtgggaatggtgcgtcatcagggcaagatcatgtacgtgggcgacgtgcggagcgtgacacagaagcatatccaggagtggggccctttcgacctggtgatcggcggcagcccttgcaatgacctgagcatcgtgaacccagcccggaagggcctgtacgagggaaccggcagactgttcttcgagttttacagactgctgcacgacgcccggcctaaggaaggcgacgaccggcccttcttttggctgttcgagaatgtggtggccatgggagtcagcgacaagcgggatattagccggttcctggagagcaaccccgtgatgatcgatgccaaggaagtgagcgccgcccaccgggccagatacttctggggcaatctgcctggcatgaacagacccctggccagcaccgtgaacgacaagctggagctgcaggagtgcctggagcacggccggatcgccaagttcagcaaggtgagaaccatcaccacccgaagcaacagcatcaaacaaggcaaggaccagcactttcctgtgttcatgaacgagaaggaggacatcctgtggtgtaccgagatggagagagtgttcgggttcccagtccactacacagatgtcagcaacatgtctagactggccagacagagactgctgggaagaagctggtccgtccctgtgatcagacacctgttcgcccctctgaaggagtacttcgcctgcgtgagcagcggcaacagcaacgccaacagccggggccccagcttctctagcggcctggtgccactgtccctgagagggagccacatgggccccatggagatctacaaaaccgtgagcgcctggaagcggcagcctgtgcgcgtgctgagcctgtttcggaatatcgataaagtcctgaaaagcctgggattcctggagagcggctctggctccggcggtggcaccctgaagtacgtggaggatgtgacaaacgtggtcagacgggatgtggagaagtggggccccttcgatctggtgtacggcagcacccaacccctgggcagctcttgtgaccggtgccctggctggtacatgtttcagttccaccggatcctgcagtacgccctgccgagacaggagtcccagcggccattcttttggattttcatggacaacttgctgctgaccgaggatgaccaggaaactaccactcggttcctgcagaccgaagccgtgaccctgcaggacgtgagaggccgggactaccagaacgccatgcgggtgtggtccaacatccctggactgaaaagcaagcacgcacctctgacccctaaagaagaggagtacctgcaggcccaggtgcggagcagaagcaagctggacgcccctaaggtggatctgctggtgaagaattgcctcctgcccctgagagagtacttcaagtatttcagccagaatagtctgcccctgggaggcagcggcggcggcgccctggtgacatttgaggacgtcgccgtgcggttcacccaggaggaatgggctctgctggatccttctcagaaaatcctgtaccgggacgtgatgagagagacataccggaatctgacctccgtgggcatcaactgggaatgttgggaccttgaagcctgcttcagaagcctgggaagaaacctgagagtgcaggtggtgaagagaaagtgcgagctgaccaacagcggcccctgcgccgagggcggcccaagcagcggcgcccctcctcccagcggcggcagcccagccggctccccaacctctaccgaggagggcacctctgagtccgccacccccgagagcggccctggcacctccaccgagcccagcgagggcagcgcacccggcagccctgccggcagccccacctccacagaggagggaaccagcaccgagcccagcgaaggcagcgccccaggcaccagcaccgagcctagtgagcaggagattaaacggatcaacaagatcagaagaagacttgtgaaagacagcaacaccaagaaggccggcaagacaggccccatgaaaaccctgctggttagagtgatgacacccgatctgagagagcggctggaaaacctgagaaagaagcctgaaaatatcccccagcccatcagcaatacatctagagccaacctgaataagctgctgaccgattacaccgaaatgaagaaggcgatcctgcatgtgtactgggaagagttccagaaggaccctgtgggcctgatgagccgggtggcccagcctgccagcaagaagatcgatcagaacaagctgaaacctgagatggacgagaagggcaacctgaccaccgccggctttgcctgctctcagtgtggccagcccctgttcgtgtacaagctggagcaggtgtctgagaagggcaaggcttacaccaactacttcggacggtgcaatgtggccgagcacgaaaagctgatcctgctggcccagctgaagcccgagaaggatagcgacgaagccgtgacatatagcctgggaaagtttgggcagagggccctggatttctacagcattcatgtgaccaaggagtccacccaccccgtgaagcccctggcccagatcgccggaaacagatacgcctccggacctgtgggaaaggccctgagcgacgcatgtatgggcacaatcgcctccttcctgtctaagtaccaggacatcatcatcgaacaccagaaggtggtgaagggcaaccagaagagactggagagcctgcgggagctggccggcaaggaaaacctggaataccctagcgtgaccctgccacctcagcctcacaccaaggagggcgttgatgcctacaacgaagtgatcgcccgggtgcgaatgtgggtgaacctgaacctgtggcagaagctgaagctaagcagagatgatgccaagcctctgctgagactgaagggattcccttcctttcctctggtcgagagacaggccaacgaagtggactggtgggacatggtgtgtaacgtgaagaagctgatcaacgagaaaaaggaggatggcaaggtgttttggcagaatctggctggctacaagagacaggaagccctgagaccatacctgagcagcgaggaagatcggaagaagggaaagaaattcgctcggtaccagctgggcgacctgctgctgcacctggaaaagaagcacggcgaggactggggaaaggtgtacgacgaggcctgggagcggattgacaagaaagtggaaggcctgagcaagcacatcaagctggaagaggaacggagaagcgaggacgcccagagcaaggccgccctgaccgactggctgcgggctaaggccagcttcgtgatcgagggcctgaaggaggccgacaaggacgagttctgcagatgcgagctgaagctgcagaagtggtacggggacctgcggggaaagcccttcgccatcgaagccgagaacagcatcctggacatcagcggcttcagcaagcagtacaactgtgccttcatctggcagaaggacggcgtgaagaagctgaacctgtacctgatcatcaactacttcaagggcggcaagctgcggttcaagaagatcaaacctgaagccttcgaagccaacagattctacaccgtgatcaacaaaaagagcggcgagatcgtgcccatggaggtgaacttcaacttcgacgaccccaacctgatcatcctgcctctggcctttggcaagagacagggcagagaattcatctggaacgacctgctgtccctggaaaccggcagcctgaagctggccaacggaagagtgatcgagaagacactgtacaacagaagaacccggcaggatgagcctgccctgttcgtggccctgaccttcgagcggcgggaggtcctggactcctccaatatcaaaccaatgaacctgatcggcgtggcaagaggcgaaaacatccccgccgtgatcgccctgaccgaccccgagggctgcccactgagccggtttaaggatagcctgggaaacccaacccacatcctgagaatcggcgagagctataaggagaagcagcggaccatccaggccaagaaggaggtggagcagcggagagccggcggctacagccggaagtacgccagcaaagccaagaatctggcagacgatatggtgagaaacaccgctagagatctgctgtactacgccgtgacccaggatgccatgctgatcttcgccaacctgagccggggcttcggccggcagggcaagcggaccttcatggccgagagacagtacacacggatggaggactggctgaccgccaagctggcctacgagggcctgagcaagacctacctgtccaagacactggcccagtacacctccaagacatgcagcaactgtgggtttaccatcaccagcgccgactacgacagggtgctggagaagctgaagaagacagcaacaggctggatgaccacaattaacggcaaggagctgaaggtggagggccagattacctactacaacagatacaagagacagaacgtagtcaaggacctgtccgtcgagctggatagactgagcgaagaatctgtgaacaacgacatctcctcctggacaaagggcagaagcggagaagctctgagcctcctgaagaaaagattctcccatagacccgtgcaggagaagttcgtgtgcctgaactgcggcttcgagacacacgcagccgagcaagccgccctgaacatcgccagatcctggctgttcctgcggagccaggagtacaagaaataccagacaaacaagacaaccggcaacaccgataagagagccttcgtcgagacctggcagtccttttaccggaagaagcttaaggaggtgtggaaacctgccgtgcggtctggcggatctggcggaggctccgcccacatggccttcagggacgtggccgtggacttcacccaggaggagtggatgctgctgagccccgcccagaggagcctgtacagggaggtgatgctggagaactacagcaacatggtgagcctgggcatccccttcagcaagcccaagctgatcacccagctggagcagggcaaggagacctggagggaggagaggaagtgcccccccgccacctgcagcgccgagccccagcccgagctgggcggcccaagcagcggcgcccctcctcccagcggcggcagcccagccggctccccaacctctaccgaggagggcacctctgagtccgccacccccgagagcggccctggcacctccaccgagcccagcgagggcagcgcacccggcagccctgccggcagccccacctccacagaggagggaaccagcaccgagcccagcgaaggcagcgccccaggcaccagcaccgagcctagtgagcaggagattaaacggatcaacaagatcagaagaagacttgtgaaagacagcaacaccaagaaggccggcaagacaggccccatgaaaaccctgctggttagagtgatgacacccgatctgagagagcggctggaaaacctgagaaagaagcctgaaaatatcccccagcccatcagcaatacatctagagccaacctgaataagctgctgaccgattacaccgaaatgaagaaggcgatcctgcatgtgtactgggaagagttccagaaggaccctgtgggcctgatgagccgggtggcccagcctgccagcaagaagatcgatcagaacaagctgaaacctgagatggacgagaagggcaacctgaccaccgccggctttgcctgctctcagtgtggccagcccctgttcgtgtacaagctggagcaggtgtctgagaagggcaaggcttacaccaactacttcggacggtgcaatgtggccgagcacgaaaagctgatcctgctggcccagctgaagcccgagaaggatagcgacgaagccgtgacatatagcctgggaaagtttgggcagagggccctggatttctacagcattcatgtgaccaaggagtccacccaccccgtgaagcccctggcccagatcgccggaaacagatacgcctccggacctgtgggaaaggccctgagcgacgcatgtatgggcacaatcgcctccttcctgtctaagtaccaggacatcatcatcgaacaccagaaggtggtgaagggcaaccagaagagactggagagcctgcgggagctggccggcaaggaaaacctggaataccctagcgtgaccctgccacctcagcctcacaccaaggagggcgttgatgcctacaacgaagtgatcgcccgggtgcgaatgtgggtgaacctgaacctgtggcagaagctgaagctaagcagagatgatgccaagcctctgctgagactgaagggattcccttcctttcctctggtcgagagacaggccaacgaagtggactggtgggacatggtgtgtaacgtgaagaagctgatcaacgagaaaaaggaggatggcaaggtgttttggcagaatctggctggctacaagagacaggaagccctgagaccatacctgagcagcgaggaagatcggaagaagggaaagaaattcgctcggtaccagctgggcgacctgctgctgcacctggaaaagaagcacggcgaggactggggaaaggtgtacgacgaggcctgggagcggattgacaagaaagtggaaggcctgagcaagcacatcaagctggaagaggaacggagaagcgaggacgcccagagcaaggccgccctgaccgactggctgcgggctaaggccagcttcgtgatcgagggcctgaaggaggccgacaaggacgagttctgcagatgcgagctgaagctgcagaagtggtacggggacctgcggggaaagcccttcgccatcgaagccgagaacagcatcctggacatcagcggcttcagcaagcagtacaactgtgccttcatctggcagaaggacggcgtgaagaagctgaacctgtacctgatcatcaactacttcaagggcggcaagctgcggttcaagaagatcaaacctgaagccttcgaagccaacagattctacaccgtgatcaacaaaaagagcggcgagatcgtgcccatggaggtgaacttcaacttcgacgaccccaacctgatcatcctgcctctggcctttggcaagagacagggcagagaattcatctggaacgacctgctgtccctggaaaccggcagcctgaagctggccaacggaagagtgatcgagaagacactgtacaacagaagaacccggcaggatgagcctgccctgttcgtggccctgaccttcgagcggcgggaggtcctggactcctccaatatcaaaccaatgaacctgatcggcgtggcaagaggcgaaaacatccccgccgtgatcgccctgaccgaccccgagggctgcccactgagccggtttaaggatagcctgggaaacccaacccacatcctgagaatcggcgagagctataaggagaagcagcggaccatccaggccaagaaggaggtggagcagcggagagccggcggctacagccggaagtacgccagcaaagccaagaatctggcagacgatatggtgagaaacaccgctagagatctgctgtactacgccgtgacccaggatgccatgctgatcttcgccaacctgagccggggcttcggccggcagggcaagcggaccttcatggccgagagacagtacacacggatggaggactggctgaccgccaagctggcctacgagggcctgagcaagacctacctgtccaagacactggcccagtacacctccaagacatgcagcaactgtgggtttaccatcaccagcgccgactacgacagggtgctggagaagctgaagaagacagcaacaggctggatgaccacaattaacggcaaggagctgaaggtggagggccagattacctactacaacagatacaagagacagaacgtagtcaaggacctgtccgtcgagctggatagactgagcgaagaatctgtgaacaacgacatctcctcctggacaaagggcagaagcggagaagctctgagcctcctgaagaaaagattctcccatagacccgtgcaggagaagttcgtgtgcctgaactgcggcttcgagacacacgcagccgagcaagccgccctgaacatcgccagatcctggctgttcctgcggagccaggagtacaagaaataccagacaaacaagacaaccggcaacaccgataagagagccttcgtcgagacctggcagtccttttaccggaagaagcttaaggaggtgtggaaacctgccgtgcggtctggcggatctggcggaggctcctgcccacatggccttcagggacgtggccgtggacttcacccaggaggagtggatgctgctgagccccgcccagaggagcctgtacagggaggtgatgctggagaactacagcaacatggtgagcctgggcatccccttcagcaagcccaagctgatcacccagctggagcagggcaaggagacctggagggaggagaggaagtgcccccccgccacctgcagcgccgagccccagcccgagctgggatctggctccggcagcggccccaagaaaaagagaaaagtctaagctgccttctgcggggcttgccttctggccatgcccttcttctctcccttgcacctgtacctcttggtctttgaataaagcctgagtaggaaggctagcaaaaaaaaaaaaaaaaaaaaaaaaaaaaaaaaaaaaaaaaaaaaaaaaaaaaaaaaaaaaaaaaaaaaaaaaaaaaaaaa

SEQ ID NO: 15452 - RNA, 9485 nt, synthetic construct
  source 1..9485: mol_type = other RNA
aggaaataagagagaaaagaagagtaagaagaaatataagagccaccatggcccctaagaagaagcgtaaagtgagccggatggaacgcctcgtctacgaggtgcggcagaagtgcagaaacatcgaggacatctgcatctcctgcggatctctgaacgtgaccctggagcacccactgttcatcggcggcatgtgccagaactgtaaaaactgttttctggagtgtgcctatcaatacgacgatgacggctaccagagctactgcaccatctgttgcggcggaagagaggtgctgatgtgtggaaataacaactgctgccggtgcttctgcgtggaatgcgtggacctgctggtgggccccggcgccgcccaggccgctattaaggaagatccttggaactgctacatgtgcggccacaagggcacatacggcctgctgagacggagagaggactggcctagcagactgcagatgttcttcgccaataaccacgaccaggagttcgacccccctaaggtgtaccctcccgtccccgccgagaagagaaagcccatccgggtcctgagcctgttcgatggcatcgccaccggtctgctggtgctgaaggacctgggcatccaggtggataggtacattgcctccgaggtgtgcgaggactccatcaccgtgggaatggtgcgtcatcagggcaagatcatgtacgtgggcgacgtgcggagcgtgacacagaagcatatccaggagtggggccctttcgacctggtgatcggcggcagcccttgcaatgacctgagcatcgtgaacccagcccggaagggcctgtacgagggaaccggcagactgttcttcgagttttacagactgctgcacgacgcccggcctaaggaaggcgacgaccggcccttcttttggctgttcgagaatgtggtggccatgggagtcagcgacaagcgggatattagccggttcctggagagcaaccccgtgatgatcgatgccaaggaagtgagcgccgcccaccgggccagatacttctggggcaatctgcctggcatgaacagacccctggccagcaccgtgaacgacaagctggagctgcaggagtgcctggagcacggccggatcgccaagttcagcaaggtgagaaccatcaccacccgaagcaacagcatcaaacaaggcaaggaccagcactttcctgtgttcatgaacgagaaggaggacatcctgtggtgtaccgagatggagagagtgttcgggttcccagtccactacacagatgtcagcaacatgtctagactggccagacagagactgctgggaagaagctggtccgtccctgtgatcagacacctgttcgcccctctgaaggagtacttcgcctgcgtgagcagcggcaacagcaacgccaacagccggggccccagcttctctagcggcctggtgccactgtccctgagagggagccacatgggccccatggagatctacaaaaccgtgagcgcctggaagcggcagcctgtgcgcgtgctgagcctgtttcggaatatcgataaagtcctgaaaagcctgggattcctggagagcggctctggctccggcggtggcaccctgaagtacgtggaggatgtgacaaacgtggtcagacgggatgtggagaagtggggccccttcgatctggtgtacggcagcacccaacccctgggcagctcttgtgaccggtgccctggctggtacatgtttcagttccaccggatcctgcagtacgccctgccgagacaggagtcccagcggccattcttttggattttcatggacaacttgctgctgaccgaggatgaccaggaaactaccactcggttcctgcagaccgaagccgtgaccctgcaggacgtgagaggccgggactaccagaacgccatgcgggtgtggtccaacatccctggactgaaaagcaagcacgcacctctgacccctaaagaagaggagtacctgcaggcccaggtgcggagcagaagcaagctggacgcccctaaggtggatctgctggtgaagaattgcctcctgcccctgagagagtacttcaagtatttcagccagaatagtctgcccctgggaggcagcggcggcggcgccctggtgacatttgaggacgtcgccgtgcggttcacccaggaggaatgggctctgctggatccttctcagaaaatcctgtaccgggacgtgatgagagagacataccggaatctgacctccgtgggcatcaactgggaatgttgggaccttgaagcctgcttcagaagcctgggaagaaacctgagagtgcaggtggtgaagagaaagtgcgagctgaccaacagcggcccctgcgccgagggcggcccaagcagcggcgcccctcctcccagcggcggcagcccagccggctccccaacctctaccgaggagggcacctctgagtccgccacccccgagagcggccctggcacctccaccgagcccagcgagggcagcgcacccggcagccctgccggcagccccacctccacagaggagggaaccagcaccgagcccagcgaaggcagcgccccaggcaccagcaccgagcctagtgagcaggagattaaacggatcaacaagatcagaagaagacttgtgaaagacagcaacaccaagaaggccggcaagacaggccccatgaaaaccctgctggttagagtgatgacacccgatctgagagagcggctggaaaacctgagaaagaagcctgaaaatatcccccagcccatcagcaatacatctagagccaacctgaataagctgctgaccgattacaccgaaatgaagaaggcgatcctgcatgtgtactgggaagagttccagaaggaccctgtgggcctgatgagccgggtggcccagcctgccagcaagaagatcgatcagaacaagctgaaacctgagatggacgagaagggcaacctgaccaccgccggctttgcctgctctcagtgtggccagcccctgttcgtgtacaagctggagcaggtgtctgagaagggcaaggcttacaccaactacttcggacggtgcaatgtggccgagcacgaaaagctgatcctgctggcccagctgaagcccgagaaggatagcgacgaagccgtgacatatagcctgggaaagtttgggcagagggccctggatttctacagcattcatgtgaccaaggagtccacccaccccgtgaagcccctggcccagatcgccggaaacagatacgcctccggacctgtgggaaaggccctgagcgacgcatgtatgggcacaatcgcctccttcctgtctaagtaccaggacatcatcatcgaacaccagaaggtggtgaagggcaaccagaagagactggagagcctgcgggagctggccggcaaggaaaacctggaataccctagcgtgaccctgccacctcagcctcacaccaaggagggcgttgatgcctacaacgaagtgatcgcccgggtgcgaatgtgggtgaacctgaacctgtggcagaagctgaagctaagcagagatgatgccaagcctctgctgagactgaagggattcccttcctttcctctggtcgagagacaggccaacgaagtggactggtgggacatggtgtgtaacgtgaagaagctgatcaacgagaaaaaggaggatggcaaggtgttttggcagaatctggctggctacaagagacaggaagccctgagaccatacctgagcagcgaggaagatcggaagaagggaaagaaattcgctcggtaccagctgggcgacctgctgctgcacctggaaaagaagcacggcgaggactggggaaaggtgtacgacgaggcctgggagcggattgacaagaaagtggaaggcctgagcaagcacatcaagctggaagaggaacggagaagcgaggacgcccagagcaaggccgccctgaccgactggctgcgggctaaggccagcttcgtgatcgagggcctgaaggaggccgacaaggacgagttctgcagatgcgagctgaagctgcagaagtggtacggggacctgcggggaaagcccttcgccatcgaagccgagaacagcatcctggacatcagcggcttcagcaagcagtacaactgtgccttcatctggcagaaggacggcgtgaagaagctgaacctgtacctgatcatcaactacttcaagggcggcaagctgcggttcaagaagatcaaacctgaagccttcgaagccaacagattctacaccgtgatcaacaaaaagagcggcgagatcgtgcccatggaggtgaacttcaacttcgacgaccccaacctgatcatcctgcctctggcctttggcaagagacagggcagagaattcatctggaacgacctgctgtccctggaaaccggcagcctgaagctggccaacggaagagtgatcgagaagacactgtacaacagaagaacccggcaggatgagcctgccctgttcgtggccctgaccttcgagcggcgggaggtcctggactcctccaatatcaaaccaatgaacctgatcggcgtggcaagaggcgaaaacatccccgccgtgatcgccctgaccgaccccgagggctgcccactgagccggtttaaggatagcctgggaaacccaacccacatcctgagaatcggcgagagctataaggagaagcagcggaccatccaggccaagaaggaggtggagcagcggagagccggcggctacagccggaagtacgccagcaaagccaagaatctggcagacgatatggtgagaaacaccgctagagatctgctgtactacgccgtgacccaggatgccatgctgatcttcgccaacctgagccggggcttcggccggcagggcaagcggaccttcatggccgagagacagtacacacggatggaggactggctgaccgccaagctggcctacgagggcctgagcaagacctacctgtccaagacactggcccagtacacctccaagacatgcagcaactgtgggtttaccatcaccagcgccgactacgacagggtgctggagaagctgaagaagacagcaacaggctggatgaccacaattaacggcaaggagctgaaggtggagggccagattacctactacaacagatacaagagacagaacgtagtcaaggacctgtccgtcgagctggatagactgagcgaagaatctgtgaacaacgacatctcctcctggacaaagggcagaagcggagaagctctgagcctcctgaagaaaagattctcccatagacccgtgcaggagaagttcgtgtgcctgaactgcggcttcgagacacacgcagccgagcaagccgccctgaacatcgccagatcctggctgttcctgcggagccaggagtacaagaaataccagacaaacaagacaaccggcaacaccgataagagagccttcgtcgagacctggcagtccttttaccggaagaagcttaaggaggtgtggaaacctgccgtgcggtctggcggatctggcggaggctccttccagggcagcgtgaccttcagggacgtggccatcgacttcagccaggaggagtgggcctggctgcagcccgcccagagggacctgtacaggcacgtgatgctggagaactacggccacctggtgagcctgggcctgaacatcagcaagcccgacgtggtgagcctgctggagcagggcaaggagccctggctgggcaagggcgacgtgaggaccgacttcttccccgtgagcgagagcaacggcggcccaagcagcggcgcccctcctcccagcggcggcagcccagccggctccccaacctctaccgaggagggcacctctgagtccgccacccccgagagcggccctggcacctccaccgagcccagcgagggcagcgcacccggcagccctgccggcagccccacctccacagaggagggaaccagcaccgagcccagcgaaggcagcgccccaggcaccagcaccgagcctagtgagcaggagattaaacggatcaacaagatcagaagaagacttgtgaaagacagcaacaccaagaaggccggcaagacaggccccatgaaaaccctgctggttagagtgatgacacccgatctgagagagcggctggaaaacctgagaaagaagcctgaaaatatcccccagcccatcagcaatacatctagagccaacctgaataagctgctgaccgattacaccgaaatgaagaaggcgatcctgcatgtgtactgggaagagttccagaaggaccctgtgggcctgatgagccgggtggcccagcctgccagcaagaagatcgatcagaacaagctgaaacctgagatggacgagaagggcaacctgaccaccgccggctttgcctgctctcagtgtggccagcccctgttcgtgtacaagctggagcaggtgtctgagaagggcaaggcttacaccaactacttcggacggtgcaatgtggccgagcacgaaaagctgatcctgctggcccagctgaagcccgagaaggatagcgacgaagccgtgacatatagcctgggaaagtttgggcagagggccctggatttctacagcattcatgtgaccaaggagtccacccaccccgtgaagcccctggcccagatcgccggaaacagatacgcctccggacctgtgggaaaggccctgagcgacgcatgtatgggcacaatcgcctccttcctgtctaagtaccaggacatcatcatcgaacaccagaaggtggtgaagggcaaccagaagagactggagagcctgcgggagctggccggcaaggaaaacctggaataccctagcgtgaccctgccacctcagcctcacaccaaggagggcgttgatgcctacaacgaagtgatcgcccgggtgcgaatgtgggtgaacctgaacctgtggcagaagctgaagctaagcagagatgatgccaagcctctgctgagactgaagggattcccttcctttcctctggtcgagagacaggccaacgaagtggactggtgggacatggtgtgtaacgtgaagaagctgatcaacgagaaaaaggaggatggcaaggtgttttggcagaatctggctggctacaagagacaggaagccctgagaccatacctgagcagcgaggaagatcggaagaagggaaagaaattcgctcggtaccagctgggcgacctgctgctgcacctggaaaagaagcacggcgaggactggggaaaggtgtacgacgaggcctgggagcggattgacaagaaagtggaaggcctgagcaagcacatcaagctggaagaggaacggagaagcgaggacgcccagagcaaggccgccctgaccgactggctgcgggctaaggccagcttcgtgatcgagggcctgaaggaggccgacaaggacgagttctgcagatgcgagctgaagctgcagaagtggtacggggacctgcggggaaagcccttcgccatcgaagccgagaacagcatcctggacatcagcggcttcagcaagcagtacaactgtgccttcatctggcagaaggacggcgtgaagaagctgaacctgtacctgatcatcaactacttcaagggcggcaagctgcggttcaagaagatcaaacctgaagccttcgaagccaacagattctacaccgtgatcaacaaaaagagcggcgagatcgtgcccatggaggtgaacttcaacttcgacgaccccaacctgatcatcctgcctctggcctttggcaagagacagggcagagaattcatctggaacgacctgctgtccctggaaaccggcagcctgaagctggccaacggaagagtgatcgagaagacactgtacaacagaagaacccggcaggatgagcctgccctgttcgtggccctgaccttcgagcggcgggaggtcctggactcctccaatatcaaaccaatgaacctgatcggcgtggcaagaggcgaaaacatccccgccgtgatcgccctgaccgaccccgagggctgcccactgagccggtttaaggatagcctgggaaacccaacccacatcctgagaatcggcgagagctataaggagaagcagcggaccatccaggccaagaaggaggtggagcagcggagagccggcggctacagccggaagtacgccagcaaagccaagaatctggcagacgatatggtgagaaacaccgctagagatctgctgtactacgccgtgacccaggatgccatgctgatcttcgccaacctgagccggggcttcggccggcagggcaagcggaccttcatggccgagagacagtacacacggatggaggactggctgaccgccaagctggcctacgagggcctgagcaagacctacctgtccaagacactggcccagtacacctccaagacatgcagcaactgtgggtttaccatcaccagcgccgactacgacagggtgctggagaagctgaagaagacagcaacaggctggatgaccacaattaacggcaaggagctgaaggtggagggccagattacctactacaacagatacaagagacagaacgtagtcaaggacctgtccgtcgagctggatagactgagcgaagaatctgtgaacaacgacatctcctcctggacaaagggcagaagcggagaagctctgagcctcctgaagaaaagattctcccatagacccgtgcaggagaagttcgtgtgcctgaactgcggcttcgagacacacgcagccgagcaagccgccctgaacatcgccagatcctggctgttcctgcggagccaggagtacaagaaataccagacaaacaagacaaccggcaacaccgataagagagccttcgtcgagacctggcagtccttttaccggaagaagcttaaggaggtgtggaaacctgccgtgcggtctggcggatctggcggaggctcctttccagggcagcgtgaccttcagggacgtggccatcgacttcagccaggaggagtgggcctggctgcagcccgcccagagggacctgtacaggcacgtgatgctggagaactacggccacctggtgagcctgggcctgaacatcagcaagcccgacgtggtgagcctgctggagcagggcaaggagccctggctgggcaagggcgacgtgaggaccgacttcttccccgtgagcgagagcaacggatctggctccggcagcggccccaagaaaaagagaaaagtctaagctgccttctgcggggcttgccttctggccatgcccttcttctctcccttgcacctgtacctcttggtctttgaataaagcctgagtaggaaggctagcaaaaaaaaaaaaaaaaaaaaaaaaaaaaaaaaaaaaaaaaaaaaaaaaaaaaaaaaaaaaaaaaaaaaaaaaaaaaaaaa

SEQ ID NO: 15453 - RNA, 9485 nt, synthetic construct
  source 1..9485: mol_type = other RNA
aggaaataagagagaaaagaagagtaagaagaaatataagagccaccatggcccctaagaagaagcgtaaagtgagccggatggaacgcctcgtctacgaggtgcggcagaagtgcagaaacatcgaggacatctgcatctcctgcggatctctgaacgtgaccctggagcacccactgttcatcggcggcatgtgccagaactgtaaaaactgttttctggagtgtgcctatcaatacgacgatgacggctaccagagctactgcaccatctgttgcggcggaagagaggtgctgatgtgtggaaataacaactgctgccggtgcttctgcgtggaatgcgtggacctgctggtgggccccggcgccgcccaggccgctattaaggaagatccttggaactgctacatgtgcggccacaagggcacatacggcctgctgagacggagagaggactggcctagcagactgcagatgttcttcgccaataaccacgaccaggagttcgacccccctaaggtgtaccctcccgtccccgccgagaagagaaagcccatccgggtcctgagcctgttcgatggcatcgccaccggtctgctggtgctgaaggacctgggcatccaggtggataggtacattgcctccgaggtgtgcgaggactccatcaccgtgggaatggtgcgtcatcagggcaagatcatgtacgtgggcgacgtgcggagcgtgacacagaagcatatccaggagtggggccctttcgacctggtgatcggcggcagcccttgcaatgacctgagcatcgtgaacccagcccggaagggcctgtacgagggaaccggcagactgttcttcgagttttacagactgctgcacgacgcccggcctaaggaaggcgacgaccggcccttcttttggctgttcgagaatgtggtggccatgggagtcagcgacaagcgggatattagccggttcctggagagcaaccccgtgatgatcgatgccaaggaagtgagcgccgcccaccgggccagatacttctggggcaatctgcctggcatgaacagacccctggccagcaccgtgaacgacaagctggagctgcaggagtgcctggagcacggccggatcgccaagttcagcaaggtgagaaccatcaccacccgaagcaacagcatcaaacaaggcaaggaccagcactttcctgtgttcatgaacgagaaggaggacatcctgtggtgtaccgagatggagagagtgttcgggttcccagtccactacacagatgtcagcaacatgtctagactggccagacagagactgctgggaagaagctggtccgtccctgtgatcagacacctgttcgcccctctgaaggagtacttcgcctgcgtgagcagcggcaacagcaacgccaacagccggggccccagcttctctagcggcctggtgccactgtccctgagagggagccacatgggccccatggagatctacaaaaccgtgagcgcctggaagcggcagcctgtgcgcgtgctgagcctgtttcggaatatcgataaagtcctgaaaagcctgggattcctggagagcggctctggctccggcggtggcaccctgaagtacgtggaggatgtgacaaacgtggtcagacgggatgtggagaagtggggccccttcgatctggtgtacggcagcacccaacccctgggcagctcttgtgaccggtgccctggctggtacatgtttcagttccaccggatcctgcagtacgccctgccgagacaggagtcccagcggccattcttttggattttcatggacaacttgctgctgaccgaggatgaccaggaaactaccactcggttcctgcagaccgaagccgtgaccctgcaggacgtgagaggccgggactaccagaacgccatgcgggtgtggtccaacatccctggactgaaaagcaagcacgcacctctgacccctaaagaagaggagtacctgcaggcccaggtgcggagcagaagcaagctggacgcccctaaggtggatctgctggtgaagaattgcctcctgcccctgagagagtacttcaagtatttcagccagaatagtctgcccctgggaggcagcggcggcggcgccctggtgacatttgaggacgtcgccgtgcggttcacccaggaggaatgggctctgctggatccttctcagaaaatcctgtaccgggacgtgatgagagagacataccggaatctgacctccgtgggcatcaactgggaatgttgggaccttgaagcctgcttcagaagcctgggaagaaacctgagagtgcaggtggtgaagagaaagtgcgagctgaccaacagcggcccctgcgccgagggcggcccaagcagcggcgcccctcctcccagcggcggcagcccagccggctccccaacctctaccgaggagggcacctctgagtccgccacccccgagagcggccctggcacctccaccgagcccagcgagggcagcgcacccggcagccctgccggcagccccacctccacagaggagggaaccagcaccgagcccagcgaaggcagcgccccaggcaccagcaccgagcctagtgagcaggagattaaacggatcaacaagatcagaagaagacttgtgaaagacagcaacaccaagaaggccggcaagacaggccccatgaaaaccctgctggttagagtgatgacacccgatctgagagagcggctggaaaacctgagaaagaagcctgaaaatatcccccagcccatcagcaatacatctagagccaacctgaataagctgctgaccgattacaccgaaatgaagaaggcgatcctgcatgtgtactgggaagagttccagaaggaccctgtgggcctgatgagccgggtggcccagcctgccagcaagaagatcgatcagaacaagctgaaacctgagatggacgagaagggcaacctgaccaccgccggctttgcctgctctcagtgtggccagcccctgttcgtgtacaagctggagcaggtgtctgagaagggcaaggcttacaccaactacttcggacggtgcaatgtggccgagcacgaaaagctgatcctgctggcccagctgaagcccgagaaggatagcgacgaagccgtgacatatagcctgggaaagtttgggcagagggccctggatttctacagcattcatgtgaccaaggagtccacccaccccgtgaagcccctggcccagatcgccggaaacagatacgcctccggacctgtgggaaaggccctgagcgacgcatgtatgggcacaatcgcctccttcctgtctaagtaccaggacatcatcatcgaacaccagaaggtggtgaagggcaaccagaagagactggagagcctgcgggagctggccggcaaggaaaacctggaataccctagcgtgaccctgccacctcagcctcacaccaaggagggcgttgatgcctacaacgaagtgatcgcccgggtgcgaatgtgggtgaacctgaacctgtggcagaagctgaagctaagcagagatgatgccaagcctctgctgagactgaagggattcccttcctttcctctggtcgagagacaggccaacgaagtggactggtgggacatggtgtgtaacgtgaagaagctgatcaacgagaaaaaggaggatggcaaggtgttttggcagaatctggctggctacaagagacaggaagccctgagaccatacctgagcagcgaggaagatcggaagaagggaaagaaattcgctcggtaccagctgggcgacctgctgctgcacctggaaaagaagcacggcgaggactggggaaaggtgtacgacgaggcctgggagcggattgacaagaaagtggaaggcctgagcaagcacatcaagctggaagaggaacggagaagcgaggacgcccagagcaaggccgccctgaccgactggctgcgggctaaggccagcttcgtgatcgagggcctgaaggaggccgacaaggacgagttctgcagatgcgagctgaagctgcagaagtggtacggggacctgcggggaaagcccttcgccatcgaagccgagaacagcatcctggacatcagcggcttcagcaagcagtacaactgtgccttcatctggcagaaggacggcgtgaagaagctgaacctgtacctgatcatcaactacttcaagggcggcaagctgcggttcaagaagatcaaacctgaagccttcgaagccaacagattctacaccgtgatcaacaaaaagagcggcgagatcgtgcccatggaggtgaacttcaacttcgacgaccccaacctgatcatcctgcctctggcctttggcaagagacagggcagagaattcatctggaacgacctgctgtccctggaaaccggcagcctgaagctggccaacggaagagtgatcgagaagacactgtacaacagaagaacccggcaggatgagcctgccctgttcgtggccctgaccttcgagcggcgggaggtcctggactcctccaatatcaaaccaatgaacctgatcggcgtggcaagaggcgaaaacatccccgccgtgatcgccctgaccgaccccgagggctgcccactgagccggtttaaggatagcctgggaaacccaacccacatcctgagaatcggcgagagctataaggagaagcagcggaccatccaggccaagaaggaggtggagcagcggagagccggcggctacagccggaagtacgccagcaaagccaagaatctggcagacgatatggtgagaaacaccgctagagatctgctgtactacgccgtgacccaggatgccatgctgatcttcgccaacctgagccggggcttcggccggcagggcaagcggaccttcatggccgagagacagtacacacggatggaggactggctgaccgccaagctggcctacgagggcctgagcaagacctacctgtccaagacactggcccagtacacctccaagacatgcagcaactgtgggtttaccatcaccagcgccgactacgacagggtgctggagaagctgaagaagacagcaacaggctggatgaccacaattaacggcaaggagctgaaggtggagggccagattacctactacaacagatacaagagacagaacgtagtcaaggacctgtccgtcgagctggatagactgagcgaagaatctgtgaacaacgacatctcctcctggacaaagggcagaagcggagaagctctgagcctcctgaagaaaagattctcccatagacccgtgcaggagaagttcgtgtgcctgaactgcggcttcgagacacacgcagccgagcaagccgccctgaacatcgccagatcctggctgttcctgcggagccaggagtacaagaaataccagacaaacaagacaaccggcaacaccgataagagagccttcgtcgagacctggcagtccttttaccggaagaagcttaaggaggtgtggaaacctgccgtgcggtctggcggatctggcggaggctccgagcaggagagcgtgagcttcaaggacgtgaccatcgacttcagcagggaggagtggcagcagctggacttcgcccagaagagcctgtacagggacgtgatgctggagaactacttcaacctgatcagcgtgggctgccaggtgcccaagcccgaggtgatcttcaacctggagcaggtggagaacagctgcatgctgcacaggaagatcagcaggcagagctgcctggacggcgacatcggcggcggcccaagcagcggcgcccctcctcccagcggcggcagcccagccggctccccaacctctaccgaggagggcacctctgagtccgccacccccgagagcggccctggcacctccaccgagcccagcgagggcagcgcacccggcagccctgccggcagccccacctccacagaggagggaaccagcaccgagcccagcgaaggcagcgccccaggcaccagcaccgagcctagtgagcaggagattaaacggatcaacaagatcagaagaagacttgtgaaagacagcaacaccaagaaggccggcaagacaggccccatgaaaaccctgctggttagagtgatgacacccgatctgagagagcggctggaaaacctgagaaagaagcctgaaaatatcccccagcccatcagcaatacatctagagccaacctgaataagctgctgaccgattacaccgaaatgaagaaggcgatcctgcatgtgtactgggaagagttccagaaggaccctgtgggcctgatgagccgggtggcccagcctgccagcaagaagatcgatcagaacaagctgaaacctgagatggacgagaagggcaacctgaccaccgccggctttgcctgctctcagtgtggccagcccctgttcgtgtacaagctggagcaggtgtctgagaagggcaaggcttacaccaactacttcggacggtgcaatgtggccgagcacgaaaagctgatcctgctggcccagctgaagcccgagaaggatagcgacgaagccgtgacatatagcctgggaaagtttgggcagagggccctggatttctacagcattcatgtgaccaaggagtccacccaccccgtgaagcccctggcccagatcgccggaaacagatacgcctccggacctgtgggaaaggccctgagcgacgcatgtatgggcacaatcgcctccttcctgtctaagtaccaggacatcatcatcgaacaccagaaggtggtgaagggcaaccagaagagactggagagcctgcgggagctggccggcaaggaaaacctggaataccctagcgtgaccctgccacctcagcctcacaccaaggagggcgttgatgcctacaacgaagtgatcgcccgggtgcgaatgtgggtgaacctgaacctgtggcagaagctgaagctaagcagagatgatgccaagcctctgctgagactgaagggattcccttcctttcctctggtcgagagacaggccaacgaagtggactggtgggacatggtgtgtaacgtgaagaagctgatcaacgagaaaaaggaggatggcaaggtgttttggcagaatctggctggctacaagagacaggaagccctgagaccatacctgagcagcgaggaagatcggaagaagggaaagaaattcgctcggtaccagctgggcgacctgctgctgcacctggaaaagaagcacggcgaggactggggaaaggtgtacgacgaggcctgggagcggattgacaagaaagtggaaggcctgagcaagcacatcaagctggaagaggaacggagaagcgaggacgcccagagcaaggccgccctgaccgactggctgcgggctaaggccagcttcgtgatcgagggcctgaaggaggccgacaaggacgagttctgcagatgcgagctgaagctgcagaagtggtacggggacctgcggggaaagcccttcgccatcgaagccgagaacagcatcctggacatcagcggcttcagcaagcagtacaactgtgccttcatctggcagaaggacggcgtgaagaagctgaacctgtacctgatcatcaactacttcaagggcggcaagctgcggttcaagaagatcaaacctgaagccttcgaagccaacagattctacaccgtgatcaacaaaaagagcggcgagatcgtgcccatggaggtgaacttcaacttcgacgaccccaacctgatcatcctgcctctggcctttggcaagagacagggcagagaattcatctggaacgacctgctgtccctggaaaccggcagcctgaagctggccaacggaagagtgatcgagaagacactgtacaacagaagaacccggcaggatgagcctgccctgttcgtggccctgaccttcgagcggcgggaggtcctggactcctccaatatcaaaccaatgaacctgatcggcgtggcaagaggcgaaaacatccccgccgtgatcgccctgaccgaccccgagggctgcccactgagccggtttaaggatagcctgggaaacccaacccacatcctgagaatcggcgagagctataaggagaagcagcggaccatccaggccaagaaggaggtggagcagcggagagccggcggctacagccggaagtacgccagcaaagccaagaatctggcagacgatatggtgagaaacaccgctagagatctgctgtactacgccgtgacccaggatgccatgctgatcttcgccaacctgagccggggcttcggccggcagggcaagcggaccttcatggccgagagacagtacacacggatggaggactggctgaccgccaagctggcctacgagggcctgagcaagacctacctgtccaagacactggcccagtacacctccaagacatgcagcaactgtgggtttaccatcaccagcgccgactacgacagggtgctggagaagctgaagaagacagcaacaggctggatgaccacaattaacggcaaggagctgaaggtggagggccagattacctactacaacagatacaagagacagaacgtagtcaaggacctgtccgtcgagctggatagactgagcgaagaatctgtgaacaacgacatctcctcctggacaaagggcagaagcggagaagctctgagcctcctgaagaaaagattctcccatagacccgtgcaggagaagttcgtgtgcctgaactgcggcttcgagacacacgcagccgagcaagccgccctgaacatcgccagatcctggctgttcctgcggagccaggagtacaagaaataccagacaaacaagacaaccggcaacaccgataagagagccttcgtcgagacctggcagtccttttaccggaagaagcttaaggaggtgtggaaacctgccgtgcggtctggcggatctggcggaggctcctgagcaggagagcgtgagcttcaaggacgtgaccatcgacttcagcagggaggagtggcagcagctggacttcgcccagaagagcctgtacagggacgtgatgctggagaactacttcaacctgatcagcgtgggctgccaggtgcccaagcccgaggtgatcttcaacctggagcaggtggagaacagctgcatgctgcacaggaagatcagcaggcagagctgcctggacggcgacatcggcggatctggctccggcagcggccccaagaaaaagagaaaagtctaagctgccttctgcggggcttgccttctggccatgcccttcttctctcccttgcacctgtacctcttggtctttgaataaagcctgagtaggaaggctagcaaaaaaaaaaaaaaaaaaaaaaaaaaaaaaaaaaaaaaaaaaaaaaaaaaaaaaaaaaaaaaaaaaaaaaaaaaaaaaaa

SEQ ID NO: 15454 - RNA, 9485 nt, synthetic construct
  source 1..9485: mol_type = other RNA
aggaaataagagagaaaagaagagtaagaagaaatataagagccaccatggcccctaagaagaagcgtaaagtgagccggatggaacgcctcgtctacgaggtgcggcagaagtgcagaaacatcgaggacatctgcatctcctgcggatctctgaacgtgaccctggagcacccactgttcatcggcggcatgtgccagaactgtaaaaactgttttctggagtgtgcctatcaatacgacgatgacggctaccagagctactgcaccatctgttgcggcggaagagaggtgctgatgtgtggaaataacaactgctgccggtgcttctgcgtggaatgcgtggacctgctggtgggccccggcgccgcccaggccgctattaaggaagatccttggaactgctacatgtgcggccacaagggcacatacggcctgctgagacggagagaggactggcctagcagactgcagatgttcttcgccaataaccacgaccaggagttcgacccccctaaggtgtaccctcccgtccccgccgagaagagaaagcccatccgggtcctgagcctgttcgatggcatcgccaccggtctgctggtgctgaaggacctgggcatccaggtggataggtacattgcctccgaggtgtgcgaggactccatcaccgtgggaatggtgcgtcatcagggcaagatcatgtacgtgggcgacgtgcggagcgtgacacagaagcatatccaggagtggggccctttcgacctggtgatcggcggcagcccttgcaatgacctgagcatcgtgaacccagcccggaagggcctgtacgagggaaccggcagactgttcttcgagttttacagactgctgcacgacgcccggcctaaggaaggcgacgaccggcccttcttttggctgttcgagaatgtggtggccatgggagtcagcgacaagcgggatattagccggttcctggagagcaaccccgtgatgatcgatgccaaggaagtgagcgccgcccaccgggccagatacttctggggcaatctgcctggcatgaacagacccctggccagcaccgtgaacgacaagctggagctgcaggagtgcctggagcacggccggatcgccaagttcagcaaggtgagaaccatcaccacccgaagcaacagcatcaaacaaggcaaggaccagcactttcctgtgttcatgaacgagaaggaggacatcctgtggtgtaccgagatggagagagtgttcgggttcccagtccactacacagatgtcagcaacatgtctagactggccagacagagactgctgggaagaagctggtccgtccctgtgatcagacacctgttcgcccctctgaaggagtacttcgcctgcgtgagcagcggcaacagcaacgccaacagccggggccccagcttctctagcggcctggtgccactgtccctgagagggagccacatgggccccatggagatctacaaaaccgtgagcgcctggaagcggcagcctgtgcgcgtgctgagcctgtttcggaatatcgataaagtcctgaaaagcctgggattcctggagagcggctctggctccggcggtggcaccctgaagtacgtggaggatgtgacaaacgtggtcagacgggatgtggagaagtggggccccttcgatctggtgtacggcagcacccaacccctgggcagctcttgtgaccggtgccctggctggtacatgtttcagttccaccggatcctgcagtacgccctgccgagacaggagtcccagcggccattcttttggattttcatggacaacttgctgctgaccgaggatgaccaggaaactaccactcggttcctgcagaccgaagccgtgaccctgcaggacgtgagaggccgggactaccagaacgccatgcgggtgtggtccaacatccctggactgaaaagcaagcacgcacctctgacccctaaagaagaggagtacctgcaggcccaggtgcggagcagaagcaagctggacgcccctaaggtggatctgctggtgaagaattgcctcctgcccctgagagagtacttcaagtatttcagccagaatagtctgcccctgggaggcagcggcggcggcgccctggtgacatttgaggacgtcgccgtgcggttcacccaggaggaatgggctctgctggatccttctcagaaaatcctgtaccgggacgtgatgagagagacataccggaatctgacctccgtgggcatcaactgggaatgttgggaccttgaagcctgcttcagaagcctgggaagaaacctgagagtgcaggtggtgaagagaaagtgcgagctgaccaacagcggcccctgcgccgagggcggcccaagcagcggcgcccctcctcccagcggcggcagcccagccggctccccaacctctaccgaggagggcacctctgagtccgccacccccgagagcggccctggcacctccaccgagcccagcgagggcagcgcacccggcagccctgccggcagccccacctccacagaggagggaaccagcaccgagcccagcgaaggcagcgccccaggcaccagcaccgagcctagtgagcaggagattaaacggatcaacaagatcagaagaagacttgtgaaagacagcaacaccaagaaggccggcaagacaggccccatgaaaaccctgctggttagagtgatgacacccgatctgagagagcggctggaaaacctgagaaagaagcctgaaaatatcccccagcccatcagcaatacatctagagccaacctgaataagctgctgaccgattacaccgaaatgaagaaggcgatcctgcatgtgtactgggaagagttccagaaggaccctgtgggcctgatgagccgggtggcccagcctgccagcaagaagatcgatcagaacaagctgaaacctgagatggacgagaagggcaacctgaccaccgccggctttgcctgctctcagtgtggccagcccctgttcgtgtacaagctggagcaggtgtctgagaagggcaaggcttacaccaactacttcggacggtgcaatgtggccgagcacgaaaagctgatcctgctggcccagctgaagcccgagaaggatagcgacgaagccgtgacatatagcctgggaaagtttgggcagagggccctggatttctacagcattcatgtgaccaaggagtccacccaccccgtgaagcccctggcccagatcgccggaaacagatacgcctccggacctgtgggaaaggccctgagcgacgcatgtatgggcacaatcgcctccttcctgtctaagtaccaggacatcatcatcgaacaccagaaggtggtgaagggcaaccagaagagactggagagcctgcgggagctggccggcaaggaaaacctggaataccctagcgtgaccctgccacctcagcctcacaccaaggagggcgttgatgcctacaacgaagtgatcgcccgggtgcgaatgtgggtgaacctgaacctgtggcagaagctgaagctaagcagagatgatgccaagcctctgctgagactgaagggattcccttcctttcctctggtcgagagacaggccaacgaagtggactggtgggacatggtgtgtaacgtgaagaagctgatcaacgagaaaaaggaggatggcaaggtgttttggcagaatctggctggctacaagagacaggaagccctgagaccatacctgagcagcgaggaagatcggaagaagggaaagaaattcgctcggtaccagctgggcgacctgctgctgcacctggaaaagaagcacggcgaggactggggaaaggtgtacgacgaggcctgggagcggattgacaagaaagtggaaggcctgagcaagcacatcaagctggaagaggaacggagaagcgaggacgcccagagcaaggccgccctgaccgactggctgcgggctaaggccagcttcgtgatcgagggcctgaaggaggccgacaaggacgagttctgcagatgcgagctgaagctgcagaagtggtacggggacctgcggggaaagcccttcgccatcgaagccgagaacagcatcctggacatcagcggcttcagcaagcagtacaactgtgccttcatctggcagaaggacggcgtgaagaagctgaacctgtacctgatcatcaactacttcaagggcggcaagctgcggttcaagaagatcaaacctgaagccttcgaagccaacagattctacaccgtgatcaacaaaaagagcggcgagatcgtgcccatggaggtgaacttcaacttcgacgaccccaacctgatcatcctgcctctggcctttggcaagagacagggcagagaattcatctggaacgacctgctgtccctggaaaccggcagcctgaagctggccaacggaagagtgatcgagaagacactgtacaacagaagaacccggcaggatgagcctgccctgttcgtggccctgaccttcgagcggcgggaggtcctggactcctccaatatcaaaccaatgaacctgatcggcgtggcaagaggcgaaaacatccccgccgtgatcgccctgaccgaccccgagggctgcccactgagccggtttaaggatagcctgggaaacccaacccacatcctgagaatcggcgagagctataaggagaagcagcggaccatccaggccaagaaggaggtggagcagcggagagccggcggctacagccggaagtacgccagcaaagccaagaatctggcagacgatatggtgagaaacaccgctagagatctgctgtactacgccgtgacccaggatgccatgctgatcttcgccaacctgagccggggcttcggccggcagggcaagcggaccttcatggccgagagacagtacacacggatggaggactggctgaccgccaagctggcctacgagggcctgagcaagacctacctgtccaagacactggcccagtacacctccaagacatgcagcaactgtgggtttaccatcaccagcgccgactacgacagggtgctggagaagctgaagaagacagcaacaggctggatgaccacaattaacggcaaggagctgaaggtggagggccagattacctactacaacagatacaagagacagaacgtagtcaaggacctgtccgtcgagctggatagactgagcgaagaatctgtgaacaacgacatctcctcctggacaaagggcagaagcggagaagctctgagcctcctgaagaaaagattctcccatagacccgtgcaggagaagttcgtgtgcctgaactgcggcttcgagacacacgcagccgagcaagccgccctgaacatcgccagatcctggctgttcctgcggagccaggagtacaagaaataccagacaaacaagacaaccggcaacaccgataagagagccttcgtcgagacctggcagtccttttaccggaagaagcttaaggaggtgtggaaacctgccgtgcggtctggcggatctggcggaggctccatggccgccggccagcccgaggccaggccccaggtgagcctgaccttcgaggacgtggccgtgctgttcaccagggacgagtggaggaagctggcccccagccagaggaacctgtacagggacgtgatgctggagaactacaggaacctggtgagcctgggcctgcccttcaccaagcccaaggtgatcagcctgctgcagcagggcgaggacccctggaaggtggagaaggactgcttcggcggcggcccaagcagcggcgcccctcctcccagcggcggcagcccagccggctccccaacctctaccgaggagggcacctctgagtccgccacccccgagagcggccctggcacctccaccgagcccagcgagggcagcgcacccggcagccctgccggcagccccacctccacagaggagggaaccagcaccgagcccagcgaaggcagcgccccaggcaccagcaccgagcctagtgagcaggagattaaacggatcaacaagatcagaagaagacttgtgaaagacagcaacaccaagaaggccggcaagacaggccccatgaaaaccctgctggttagagtgatgacacccgatctgagagagcggctggaaaacctgagaaagaagcctgaaaatatcccccagcccatcagcaatacatctagagccaacctgaataagctgctgaccgattacaccgaaatgaagaaggcgatcctgcatgtgtactgggaagagttccagaaggaccctgtgggcctgatgagccgggtggcccagcctgccagcaagaagatcgatcagaacaagctgaaacctgagatggacgagaagggcaacctgaccaccgccggctttgcctgctctcagtgtggccagcccctgttcgtgtacaagctggagcaggtgtctgagaagggcaaggcttacaccaactacttcggacggtgcaatgtggccgagcacgaaaagctgatcctgctggcccagctgaagcccgagaaggatagcgacgaagccgtgacatatagcctgggaaagtttgggcagagggccctggatttctacagcattcatgtgaccaaggagtccacccaccccgtgaagcccctggcccagatcgccggaaacagatacgcctccggacctgtgggaaaggccctgagcgacgcatgtatgggcacaatcgcctccttcctgtctaagtaccaggacatcatcatcgaacaccagaaggtggtgaagggcaaccagaagagactggagagcctgcgggagctggccggcaaggaaaacctggaataccctagcgtgaccctgccacctcagcctcacaccaaggagggcgttgatgcctacaacgaagtgatcgcccgggtgcgaatgtgggtgaacctgaacctgtggcagaagctgaagctaagcagagatgatgccaagcctctgctgagactgaagggattcccttcctttcctctggtcgagagacaggccaacgaagtggactggtgggacatggtgtgtaacgtgaagaagctgatcaacgagaaaaaggaggatggcaaggtgttttggcagaatctggctggctacaagagacaggaagccctgagaccatacctgagcagcgaggaagatcggaagaagggaaagaaattcgctcggtaccagctgggcgacctgctgctgcacctggaaaagaagcacggcgaggactggggaaaggtgtacgacgaggcctgggagcggattgacaagaaagtggaaggcctgagcaagcacatcaagctggaagaggaacggagaagcgaggacgcccagagcaaggccgccctgaccgactggctgcgggctaaggccagcttcgtgatcgagggcctgaaggaggccgacaaggacgagttctgcagatgcgagctgaagctgcagaagtggtacggggacctgcggggaaagcccttcgccatcgaagccgagaacagcatcctggacatcagcggcttcagcaagcagtacaactgtgccttcatctggcagaaggacggcgtgaagaagctgaacctgtacctgatcatcaactacttcaagggcggcaagctgcggttcaagaagatcaaacctgaagccttcgaagccaacagattctacaccgtgatcaacaaaaagagcggcgagatcgtgcccatggaggtgaacttcaacttcgacgaccccaacctgatcatcctgcctctggcctttggcaagagacagggcagagaattcatctggaacgacctgctgtccctggaaaccggcagcctgaagctggccaacggaagagtgatcgagaagacactgtacaacagaagaacccggcaggatgagcctgccctgttcgtggccctgaccttcgagcggcgggaggtcctggactcctccaatatcaaaccaatgaacctgatcggcgtggcaagaggcgaaaacatccccgccgtgatcgccctgaccgaccccgagggctgcccactgagccggtttaaggatagcctgggaaacccaacccacatcctgagaatcggcgagagctataaggagaagcagcggaccatccaggccaagaaggaggtggagcagcggagagccggcggctacagccggaagtacgccagcaaagccaagaatctggcagacgatatggtgagaaacaccgctagagatctgctgtactacgccgtgacccaggatgccatgctgatcttcgccaacctgagccggggcttcggccggcagggcaagcggaccttcatggccgagagacagtacacacggatggaggactggctgaccgccaagctggcctacgagggcctgagcaagacctacctgtccaagacactggcccagtacacctccaagacatgcagcaactgtgggtttaccatcaccagcgccgactacgacagggtgctggagaagctgaagaagacagcaacaggctggatgaccacaattaacggcaaggagctgaaggtggagggccagattacctactacaacagatacaagagacagaacgtagtcaaggacctgtccgtcgagctggatagactgagcgaagaatctgtgaacaacgacatctcctcctggacaaagggcagaagcggagaagctctgagcctcctgaagaaaagattctcccatagacccgtgcaggagaagttcgtgtgcctgaactgcggcttcgagacacacgcagccgagcaagccgccctgaacatcgccagatcctggctgttcctgcggagccaggagtacaagaaataccagacaaacaagacaaccggcaacaccgataagagagccttcgtcgagacctggcagtccttttaccggaagaagcttaaggaggtgtggaaacctgccgtgcggtctggcggatctggcggaggctcctatggccgccggccagcccgaggccaggccccaggtgagcctgaccttcgaggacgtggccgtgctgttcaccagggacgagtggaggaagctggcccccagccagaggaacctgtacagggacgtgatgctggagaactacaggaacctggtgagcctgggcctgcccttcaccaagcccaaggtgatcagcctgctgcagcagggcgaggacccctggaaggtggagaaggactgcttcggcggatctggctccggcagcggccccaagaaaaagagaaaagtctaagctgccttctgcggggcttgccttctggccatgcccttcttctctcccttgcacctgtacctcttggtctttgaataaagcctgagtaggaaggctagcaaaaaaaaaaaaaaaaaaaaaaaaaaaaaaaaaaaaaaaaaaaaaaaaaaaaaaaaaaaaaaaaaaaaaaaaaaaaaaaa

SEQ ID NO: 15455 - RNA, 9485 nt, synthetic construct
  source 1..9485: mol_type = other RNA
aggaaataagagagaaaagaagagtaagaagaaatataagagccaccatggcccctaagaagaagcgtaaagtgagccggatggaacgcctcgtctacgaggtgcggcagaagtgcagaaacatcgaggacatctgcatctcctgcggatctctgaacgtgaccctggagcacccactgttcatcggcggcatgtgccagaactgtaaaaactgttttctggagtgtgcctatcaatacgacgatgacggctaccagagctactgcaccatctgttgcggcggaagagaggtgctgatgtgtggaaataacaactgctgccggtgcttctgcgtggaatgcgtggacctgctggtgggccccggcgccgcccaggccgctattaaggaagatccttggaactgctacatgtgcggccacaagggcacatacggcctgctgagacggagagaggactggcctagcagactgcagatgttcttcgccaataaccacgaccaggagttcgacccccctaaggtgtaccctcccgtccccgccgagaagagaaagcccatccgggtcctgagcctgttcgatggcatcgccaccggtctgctggtgctgaaggacctgggcatccaggtggataggtacattgcctccgaggtgtgcgaggactccatcaccgtgggaatggtgcgtcatcagggcaagatcatgtacgtgggcgacgtgcggagcgtgacacagaagcatatccaggagtggggccctttcgacctggtgatcggcggcagcccttgcaatgacctgagcatcgtgaacccagcccggaagggcctgtacgagggaaccggcagactgttcttcgagttttacagactgctgcacgacgcccggcctaaggaaggcgacgaccggcccttcttttggctgttcgagaatgtggtggccatgggagtcagcgacaagcgggatattagccggttcctggagagcaaccccgtgatgatcgatgccaaggaagtgagcgccgcccaccgggccagatacttctggggcaatctgcctggcatgaacagacccctggccagcaccgtgaacgacaagctggagctgcaggagtgcctggagcacggccggatcgccaagttcagcaaggtgagaaccatcaccacccgaagcaacagcatcaaacaaggcaaggaccagcactttcctgtgttcatgaacgagaaggaggacatcctgtggtgtaccgagatggagagagtgttcgggttcccagtccactacacagatgtcagcaacatgtctagactggccagacagagactgctgggaagaagctggtccgtccctgtgatcagacacctgttcgcccctctgaaggagtacttcgcctgcgtgagcagcggcaacagcaacgccaacagccggggccccagcttctctagcggcctggtgccactgtccctgagagggagccacatgggccccatggagatctacaaaaccgtgagcgcctggaagcggcagcctgtgcgcgtgctgagcctgtttcggaatatcgataaagtcctgaaaagcctgggattcctggagagcggctctggctccggcggtggcaccctgaagtacgtggaggatgtgacaaacgtggtcagacgggatgtggagaagtggggccccttcgatctggtgtacggcagcacccaacccctgggcagctcttgtgaccggtgccctggctggtacatgtttcagttccaccggatcctgcagtacgccctgccgagacaggagtcccagcggccattcttttggattttcatggacaacttgctgctgaccgaggatgaccaggaaactaccactcggttcctgcagaccgaagccgtgaccctgcaggacgtgagaggccgggactaccagaacgccatgcgggtgtggtccaacatccctggactgaaaagcaagcacgcacctctgacccctaaagaagaggagtacctgcaggcccaggtgcggagcagaagcaagctggacgcccctaaggtggatctgctggtgaagaattgcctcctgcccctgagagagtacttcaagtatttcagccagaatagtctgcccctgggaggcagcggcggcggcgccctggtgacatttgaggacgtcgccgtgcggttcacccaggaggaatgggctctgctggatccttctcagaaaatcctgtaccgggacgtgatgagagagacataccggaatctgacctccgtgggcatcaactgggaatgttgggaccttgaagcctgcttcagaagcctgggaagaaacctgagagtgcaggtggtgaagagaaagtgcgagctgaccaacagcggcccctgcgccgagggcggcccaagcagcggcgcccctcctcccagcggcggcagcccagccggctccccaacctctaccgaggagggcacctctgagtccgccacccccgagagcggccctggcacctccaccgagcccagcgagggcagcgcacccggcagccctgccggcagccccacctccacagaggagggaaccagcaccgagcccagcgaaggcagcgccccaggcaccagcaccgagcctagtgagcaggagattaaacggatcaacaagatcagaagaagacttgtgaaagacagcaacaccaagaaggccggcaagacaggccccatgaaaaccctgctggttagagtgatgacacccgatctgagagagcggctggaaaacctgagaaagaagcctgaaaatatcccccagcccatcagcaatacatctagagccaacctgaataagctgctgaccgattacaccgaaatgaagaaggcgatcctgcatgtgtactgggaagagttccagaaggaccctgtgggcctgatgagccgggtggcccagcctgccagcaagaagatcgatcagaacaagctgaaacctgagatggacgagaagggcaacctgaccaccgccggctttgcctgctctcagtgtggccagcccctgttcgtgtacaagctggagcaggtgtctgagaagggcaaggcttacaccaactacttcggacggtgcaatgtggccgagcacgaaaagctgatcctgctggcccagctgaagcccgagaaggatagcgacgaagccgtgacatatagcctgggaaagtttgggcagagggccctggatttctacagcattcatgtgaccaaggagtccacccaccccgtgaagcccctggcccagatcgccggaaacagatacgcctccggacctgtgggaaaggccctgagcgacgcatgtatgggcacaatcgcctccttcctgtctaagtaccaggacatcatcatcgaacaccagaaggtggtgaagggcaaccagaagagactggagagcctgcgggagctggccggcaaggaaaacctggaataccctagcgtgaccctgccacctcagcctcacaccaaggagggcgttgatgcctacaacgaagtgatcgcccgggtgcgaatgtgggtgaacctgaacctgtggcagaagctgaagctaagcagagatgatgccaagcctctgctgagactgaagggattcccttcctttcctctggtcgagagacaggccaacgaagtggactggtgggacatggtgtgtaacgtgaagaagctgatcaacgagaaaaaggaggatggcaaggtgttttggcagaatctggctggctacaagagacaggaagccctgagaccatacctgagcagcgaggaagatcggaagaagggaaagaaattcgctcggtaccagctgggcgacctgctgctgcacctggaaaagaagcacggcgaggactggggaaaggtgtacgacgaggcctgggagcggattgacaagaaagtggaaggcctgagcaagcacatcaagctggaagaggaacggagaagcgaggacgcccagagcaaggccgccctgaccgactggctgcgggctaaggccagcttcgtgatcgagggcctgaaggaggccgacaaggacgagttctgcagatgcgagctgaagctgcagaagtggtacggggacctgcggggaaagcccttcgccatcgaagccgagaacagcatcctggacatcagcggcttcagcaagcagtacaactgtgccttcatctggcagaaggacggcgtgaagaagctgaacctgtacctgatcatcaactacttcaagggcggcaagctgcggttcaagaagatcaaacctgaagccttcgaagccaacagattctacaccgtgatcaacaaaaagagcggcgagatcgtgcccatggaggtgaacttcaacttcgacgaccccaacctgatcatcctgcctctggcctttggcaagagacagggcagagaattcatctggaacgacctgctgtccctggaaaccggcagcctgaagctggccaacggaagagtgatcgagaagacactgtacaacagaagaacccggcaggatgagcctgccctgttcgtggccctgaccttcgagcggcgggaggtcctggactcctccaatatcaaaccaatgaacctgatcggcgtggcaagaggcgaaaacatccccgccgtgatcgccctgaccgaccccgagggctgcccactgagccggtttaaggatagcctgggaaacccaacccacatcctgagaatcggcgagagctataaggagaagcagcggaccatccaggccaagaaggaggtggagcagcggagagccggcggctacagccggaagtacgccagcaaagccaagaatctggcagacgatatggtgagaaacaccgctagagatctgctgtactacgccgtgacccaggatgccatgctgatcttcgccaacctgagccggggcttcggccggcagggcaagcggaccttcatggccgagagacagtacacacggatggaggactggctgaccgccaagctggcctacgagggcctgagcaagacctacctgtccaagacactggcccagtacacctccaagacatgcagcaactgtgggtttaccatcaccagcgccgactacgacagggtgctggagaagctgaagaagacagcaacaggctggatgaccacaattaacggcaaggagctgaaggtggagggccagattacctactacaacagatacaagagacagaacgtagtcaaggacctgtccgtcgagctggatagactgagcgaagaatctgtgaacaacgacatctcctcctggacaaagggcagaagcggagaagctctgagcctcctgaagaaaagattctcccatagacccgtgcaggagaagttcgtgtgcctgaactgcggcttcgagacacacgcagccgagcaagccgccctgaacatcgccagatcctggctgttcctgcggagccaggagtacaagaaataccagacaaacaagacaaccggcaacaccgataagagagccttcgtcgagacctggcagtccttttaccggaagaagcttaaggaggtgtggaaacctgccgtgcggtctggcggatctggcggaggctcccagatgcccgtgaagttcgaggacatcgccgtgagcttcagccaggaggagtgggagtacctgaacgaggagcagaaggagctgtacagggaggtgatggaggagaactaccagaccctgatcagcctgggcaccggcagcccccccatcacccccgacatcatcagccacatcgagaggggcgaggagccctacatcagggaggagcccggcagcgaggagaggggccccgtgaggagcagcggcggcccaagcagcggcgcccctcctcccagcggcggcagcccagccggctccccaacctctaccgaggagggcacctctgagtccgccacccccgagagcggccctggcacctccaccgagcccagcgagggcagcgcacccggcagccctgccggcagccccacctccacagaggagggaaccagcaccgagcccagcgaaggcagcgccccaggcaccagcaccgagcctagtgagcaggagattaaacggatcaacaagatcagaagaagacttgtgaaagacagcaacaccaagaaggccggcaagacaggccccatgaaaaccctgctggttagagtgatgacacccgatctgagagagcggctggaaaacctgagaaagaagcctgaaaatatcccccagcccatcagcaatacatctagagccaacctgaataagctgctgaccgattacaccgaaatgaagaaggcgatcctgcatgtgtactgggaagagttccagaaggaccctgtgggcctgatgagccgggtggcccagcctgccagcaagaagatcgatcagaacaagctgaaacctgagatggacgagaagggcaacctgaccaccgccggctttgcctgctctcagtgtggccagcccctgttcgtgtacaagctggagcaggtgtctgagaagggcaaggcttacaccaactacttcggacggtgcaatgtggccgagcacgaaaagctgatcctgctggcccagctgaagcccgagaaggatagcgacgaagccgtgacatatagcctgggaaagtttgggcagagggccctggatttctacagcattcatgtgaccaaggagtccacccaccccgtgaagcccctggcccagatcgccggaaacagatacgcctccggacctgtgggaaaggccctgagcgacgcatgtatgggcacaatcgcctccttcctgtctaagtaccaggacatcatcatcgaacaccagaaggtggtgaagggcaaccagaagagactggagagcctgcgggagctggccggcaaggaaaacctggaataccctagcgtgaccctgccacctcagcctcacaccaaggagggcgttgatgcctacaacgaagtgatcgcccgggtgcgaatgtgggtgaacctgaacctgtggcagaagctgaagctaagcagagatgatgccaagcctctgctgagactgaagggattcccttcctttcctctggtcgagagacaggccaacgaagtggactggtgggacatggtgtgtaacgtgaagaagctgatcaacgagaaaaaggaggatggcaaggtgttttggcagaatctggctggctacaagagacaggaagccctgagaccatacctgagcagcgaggaagatcggaagaagggaaagaaattcgctcggtaccagctgggcgacctgctgctgcacctggaaaagaagcacggcgaggactggggaaaggtgtacgacgaggcctgggagcggattgacaagaaagtggaaggcctgagcaagcacatcaagctggaagaggaacggagaagcgaggacgcccagagcaaggccgccctgaccgactggctgcgggctaaggccagcttcgtgatcgagggcctgaaggaggccgacaaggacgagttctgcagatgcgagctgaagctgcagaagtggtacggggacctgcggggaaagcccttcgccatcgaagccgagaacagcatcctggacatcagcggcttcagcaagcagtacaactgtgccttcatctggcagaaggacggcgtgaagaagctgaacctgtacctgatcatcaactacttcaagggcggcaagctgcggttcaagaagatcaaacctgaagccttcgaagccaacagattctacaccgtgatcaacaaaaagagcggcgagatcgtgcccatggaggtgaacttcaacttcgacgaccccaacctgatcatcctgcctctggcctttggcaagagacagggcagagaattcatctggaacgacctgctgtccctggaaaccggcagcctgaagctggccaacggaagagtgatcgagaagacactgtacaacagaagaacccggcaggatgagcctgccctgttcgtggccctgaccttcgagcggcgggaggtcctggactcctccaatatcaaaccaatgaacctgatcggcgtggcaagaggcgaaaacatccccgccgtgatcgccctgaccgaccccgagggctgcccactgagccggtttaaggatagcctgggaaacccaacccacatcctgagaatcggcgagagctataaggagaagcagcggaccatccaggccaagaaggaggtggagcagcggagagccggcggctacagccggaagtacgccagcaaagccaagaatctggcagacgatatggtgagaaacaccgctagagatctgctgtactacgccgtgacccaggatgccatgctgatcttcgccaacctgagccggggcttcggccggcagggcaagcggaccttcatggccgagagacagtacacacggatggaggactggctgaccgccaagctggcctacgagggcctgagcaagacctacctgtccaagacactggcccagtacacctccaagacatgcagcaactgtgggtttaccatcaccagcgccgactacgacagggtgctggagaagctgaagaagacagcaacaggctggatgaccacaattaacggcaaggagctgaaggtggagggccagattacctactacaacagatacaagagacagaacgtagtcaaggacctgtccgtcgagctggatagactgagcgaagaatctgtgaacaacgacatctcctcctggacaaagggcagaagcggagaagctctgagcctcctgaagaaaagattctcccatagacccgtgcaggagaagttcgtgtgcctgaactgcggcttcgagacacacgcagccgagcaagccgccctgaacatcgccagatcctggctgttcctgcggagccaggagtacaagaaataccagacaaacaagacaaccggcaacaccgataagagagccttcgtcgagacctggcagtccttttaccggaagaagcttaaggaggtgtggaaacctgccgtgcggtctggcggatctggcggaggctcctcagatgcccgtgaagttcgaggacatcgccgtgagcttcagccaggaggagtgggagtacctgaacgaggagcagaaggagctgtacagggaggtgatggaggagaactaccagaccctgatcagcctgggcaccggcagcccccccatcacccccgacatcatcagccacatcgagaggggcgaggagccctacatcagggaggagcccggcagcgaggagaggggccccgtgaggagcagcggatctggctccggcagcggccccaagaaaaagagaaaagtctaagctgccttctgcggggcttgccttctggccatgcccttcttctctcccttgcacctgtacctcttggtctttgaataaagcctgagtaggaaggctagcaaaaaaaaaaaaaaaaaaaaaaaaaaaaaaaaaaaaaaaaaaaaaaaaaaaaaaaaaaaaaaaaaaaaaaaaaaaaaaaa

SEQ ID NO: 15456 - RNA, 9485 nt, synthetic construct
  source 1..9485: mol_type = other RNA
aggaaataagagagaaaagaagagtaagaagaaatataagagccaccatggcccctaagaagaagcgtaaagtgagccggatggaacgcctcgtctacgaggtgcggcagaagtgcagaaacatcgaggacatctgcatctcctgcggatctctgaacgtgaccctggagcacccactgttcatcggcggcatgtgccagaactgtaaaaactgttttctggagtgtgcctatcaatacgacgatgacggctaccagagctactgcaccatctgttgcggcggaagagaggtgctgatgtgtggaaataacaactgctgccggtgcttctgcgtggaatgcgtggacctgctggtgggccccggcgccgcccaggccgctattaaggaagatccttggaactgctacatgtgcggccacaagggcacatacggcctgctgagacggagagaggactggcctagcagactgcagatgttcttcgccaataaccacgaccaggagttcgacccccctaaggtgtaccctcccgtccccgccgagaagagaaagcccatccgggtcctgagcctgttcgatggcatcgccaccggtctgctggtgctgaaggacctgggcatccaggtggataggtacattgcctccgaggtgtgcgaggactccatcaccgtgggaatggtgcgtcatcagggcaagatcatgtacgtgggcgacgtgcggagcgtgacacagaagcatatccaggagtggggccctttcgacctggtgatcggcggcagcccttgcaatgacctgagcatcgtgaacccagcccggaagggcctgtacgagggaaccggcagactgttcttcgagttttacagactgctgcacgacgcccggcctaaggaaggcgacgaccggcccttcttttggctgttcgagaatgtggtggccatgggagtcagcgacaagcgggatattagccggttcctggagagcaaccccgtgatgatcgatgccaaggaagtgagcgccgcccaccgggccagatacttctggggcaatctgcctggcatgaacagacccctggccagcaccgtgaacgacaagctggagctgcaggagtgcctggagcacggccggatcgccaagttcagcaaggtgagaaccatcaccacccgaagcaacagcatcaaacaaggcaaggaccagcactttcctgtgttcatgaacgagaaggaggacatcctgtggtgtaccgagatggagagagtgttcgggttcccagtccactacacagatgtcagcaacatgtctagactggccagacagagactgctgggaagaagctggtccgtccctgtgatcagacacctgttcgcccctctgaaggagtacttcgcctgcgtgagcagcggcaacagcaacgccaacagccggggccccagcttctctagcggcctggtgccactgtccctgagagggagccacatgggccccatggagatctacaaaaccgtgagcgcctggaagcggcagcctgtgcgcgtgctgagcctgtttcggaatatcgataaagtcctgaaaagcctgggattcctggagagcggctctggctccggcggtggcaccctgaagtacgtggaggatgtgacaaacgtggtcagacgggatgtggagaagtggggccccttcgatctggtgtacggcagcacccaacccctgggcagctcttgtgaccggtgccctggctggtacatgtttcagttccaccggatcctgcagtacgccctgccgagacaggagtcccagcggccattcttttggattttcatggacaacttgctgctgaccgaggatgaccaggaaactaccactcggttcctgcagaccgaagccgtgaccctgcaggacgtgagaggccgggactaccagaacgccatgcgggtgtggtccaacatccctggactgaaaagcaagcacgcacctctgacccctaaagaagaggagtacctgcaggcccaggtgcggagcagaagcaagctggacgcccctaaggtggatctgctggtgaagaattgcctcctgcccctgagagagtacttcaagtatttcagccagaatagtctgcccctgggaggcagcggcggcggcgccctggtgacatttgaggacgtcgccgtgcggttcacccaggaggaatgggctctgctggatccttctcagaaaatcctgtaccgggacgtgatgagagagacataccggaatctgacctccgtgggcatcaactgggaatgttgggaccttgaagcctgcttcagaagcctgggaagaaacctgagagtgcaggtggtgaagagaaagtgcgagctgaccaacagcggcccctgcgccgagggcggcccaagcagcggcgcccctcctcccagcggcggcagcccagccggctccccaacctctaccgaggagggcacctctgagtccgccacccccgagagcggccctggcacctccaccgagcccagcgagggcagcgcacccggcagccctgccggcagccccacctccacagaggagggaaccagcaccgagcccagcgaaggcagcgccccaggcaccagcaccgagcctagtgagcaggagattaaacggatcaacaagatcagaagaagacttgtgaaagacagcaacaccaagaaggccggcaagacaggccccatgaaaaccctgctggttagagtgatgacacccgatctgagagagcggctggaaaacctgagaaagaagcctgaaaatatcccccagcccatcagcaatacatctagagccaacctgaataagctgctgaccgattacaccgaaatgaagaaggcgatcctgcatgtgtactgggaagagttccagaaggaccctgtgggcctgatgagccgggtggcccagcctgccagcaagaagatcgatcagaacaagctgaaacctgagatggacgagaagggcaacctgaccaccgccggctttgcctgctctcagtgtggccagcccctgttcgtgtacaagctggagcaggtgtctgagaagggcaaggcttacaccaactacttcggacggtgcaatgtggccgagcacgaaaagctgatcctgctggcccagctgaagcccgagaaggatagcgacgaagccgtgacatatagcctgggaaagtttgggcagagggccctggatttctacagcattcatgtgaccaaggagtccacccaccccgtgaagcccctggcccagatcgccggaaacagatacgcctccggacctgtgggaaaggccctgagcgacgcatgtatgggcacaatcgcctccttcctgtctaagtaccaggacatcatcatcgaacaccagaaggtggtgaagggcaaccagaagagactggagagcctgcgggagctggccggcaaggaaaacctggaataccctagcgtgaccctgccacctcagcctcacaccaaggagggcgttgatgcctacaacgaagtgatcgcccgggtgcgaatgtgggtgaacctgaacctgtggcagaagctgaagctaagcagagatgatgccaagcctctgctgagactgaagggattcccttcctttcctctggtcgagagacaggccaacgaagtggactggtgggacatggtgtgtaacgtgaagaagctgatcaacgagaaaaaggaggatggcaaggtgttttggcagaatctggctggctacaagagacaggaagccctgagaccatacctgagcagcgaggaagatcggaagaagggaaagaaattcgctcggtaccagctgggcgacctgctgctgcacctggaaaagaagcacggcgaggactggggaaaggtgtacgacgaggcctgggagcggattgacaagaaagtggaaggcctgagcaagcacatcaagctggaagaggaacggagaagcgaggacgcccagagcaaggccgccctgaccgactggctgcgggctaaggccagcttcgtgatcgagggcctgaaggaggccgacaaggacgagttctgcagatgcgagctgaagctgcagaagtggtacggggacctgcggggaaagcccttcgccatcgaagccgagaacagcatcctggacatcagcggcttcagcaagcagtacaactgtgccttcatctggcagaaggacggcgtgaagaagctgaacctgtacctgatcatcaactacttcaagggcggcaagctgcggttcaagaagatcaaacctgaagccttcgaagccaacagattctacaccgtgatcaacaaaaagagcggcgagatcgtgcccatggaggtgaacttcaacttcgacgaccccaacctgatcatcctgcctctggcctttggcaagagacagggcagagaattcatctggaacgacctgctgtccctggaaaccggcagcctgaagctggccaacggaagagtgatcgagaagacactgtacaacagaagaacccggcaggatgagcctgccctgttcgtggccctgaccttcgagcggcgggaggtcctggactcctccaatatcaaaccaatgaacctgatcggcgtggcaagaggcgaaaacatccccgccgtgatcgccctgaccgaccccgagggctgcccactgagccggtttaaggatagcctgggaaacccaacccacatcctgagaatcggcgagagctataaggagaagcagcggaccatccaggccaagaaggaggtggagcagcggagagccggcggctacagccggaagtacgccagcaaagccaagaatctggcagacgatatggtgagaaacaccgctagagatctgctgtactacgccgtgacccaggatgccatgctgatcttcgccaacctgagccggggcttcggccggcagggcaagcggaccttcatggccgagagacagtacacacggatggaggactggctgaccgccaagctggcctacgagggcctgagcaagacctacctgtccaagacactggcccagtacacctccaagacatgcagcaactgtgggtttaccatcaccagcgccgactacgacagggtgctggagaagctgaagaagacagcaacaggctggatgaccacaattaacggcaaggagctgaaggtggagggccagattacctactacaacagatacaagagacagaacgtagtcaaggacctgtccgtcgagctggatagactgagcgaagaatctgtgaacaacgacatctcctcctggacaaagggcagaagcggagaagctctgagcctcctgaagaaaagattctcccatagacccgtgcaggagaagttcgtgtgcctgaactgcggcttcgagacacacgcagccgagcaagccgccctgaacatcgccagatcctggctgttcctgcggagccaggagtacaagaaataccagacaaacaagacaaccggcaacaccgataagagagccttcgtcgagacctggcagtccttttaccggaagaagcttaaggaggtgtggaaacctgccgtgcggtctggcggatctggcggaggctccgccagcgcccaggtgaccttcgaggacatcgccgtgagcttctgccacgaggagtggaggtacctggacgagggccagaaggagctgtacaaggaggtgatgaaggagaactacgagaccctgatcagcctgggcttcctgtgcgagaagcccagcctgatcagcaagatcgagcaggaggaggacccctgcgtgagggaccagcagaacagcagggagaggaggaggaggctgaagaacttcggcggcccaagcagcggcgcccctcctcccagcggcggcagcccagccggctccccaacctctaccgaggagggcacctctgagtccgccacccccgagagcggccctggcacctccaccgagcccagcgagggcagcgcacccggcagccctgccggcagccccacctccacagaggagggaaccagcaccgagcccagcgaaggcagcgccccaggcaccagcaccgagcctagtgagcaggagattaaacggatcaacaagatcagaagaagacttgtgaaagacagcaacaccaagaaggccggcaagacaggccccatgaaaaccctgctggttagagtgatgacacccgatctgagagagcggctggaaaacctgagaaagaagcctgaaaatatcccccagcccatcagcaatacatctagagccaacctgaataagctgctgaccgattacaccgaaatgaagaaggcgatcctgcatgtgtactgggaagagttccagaaggaccctgtgggcctgatgagccgggtggcccagcctgccagcaagaagatcgatcagaacaagctgaaacctgagatggacgagaagggcaacctgaccaccgccggctttgcctgctctcagtgtggccagcccctgttcgtgtacaagctggagcaggtgtctgagaagggcaaggcttacaccaactacttcggacggtgcaatgtggccgagcacgaaaagctgatcctgctggcccagctgaagcccgagaaggatagcgacgaagccgtgacatatagcctgggaaagtttgggcagagggccctggatttctacagcattcatgtgaccaaggagtccacccaccccgtgaagcccctggcccagatcgccggaaacagatacgcctccggacctgtgggaaaggccctgagcgacgcatgtatgggcacaatcgcctccttcctgtctaagtaccaggacatcatcatcgaacaccagaaggtggtgaagggcaaccagaagagactggagagcctgcgggagctggccggcaaggaaaacctggaataccctagcgtgaccctgccacctcagcctcacaccaaggagggcgttgatgcctacaacgaagtgatcgcccgggtgcgaatgtgggtgaacctgaacctgtggcagaagctgaagctaagcagagatgatgccaagcctctgctgagactgaagggattcccttcctttcctctggtcgagagacaggccaacgaagtggactggtgggacatggtgtgtaacgtgaagaagctgatcaacgagaaaaaggaggatggcaaggtgttttggcagaatctggctggctacaagagacaggaagccctgagaccatacctgagcagcgaggaagatcggaagaagggaaagaaattcgctcggtaccagctgggcgacctgctgctgcacctggaaaagaagcacggcgaggactggggaaaggtgtacgacgaggcctgggagcggattgacaagaaagtggaaggcctgagcaagcacatcaagctggaagaggaacggagaagcgaggacgcccagagcaaggccgccctgaccgactggctgcgggctaaggccagcttcgtgatcgagggcctgaaggaggccgacaaggacgagttctgcagatgcgagctgaagctgcagaagtggtacggggacctgcggggaaagcccttcgccatcgaagccgagaacagcatcctggacatcagcggcttcagcaagcagtacaactgtgccttcatctggcagaaggacggcgtgaagaagctgaacctgtacctgatcatcaactacttcaagggcggcaagctgcggttcaagaagatcaaacctgaagccttcgaagccaacagattctacaccgtgatcaacaaaaagagcggcgagatcgtgcccatggaggtgaacttcaacttcgacgaccccaacctgatcatcctgcctctggcctttggcaagagacagggcagagaattcatctggaacgacctgctgtccctggaaaccggcagcctgaagctggccaacggaagagtgatcgagaagacactgtacaacagaagaacccggcaggatgagcctgccctgttcgtggccctgaccttcgagcggcgggaggtcctggactcctccaatatcaaaccaatgaacctgatcggcgtggcaagaggcgaaaacatccccgccgtgatcgccctgaccgaccccgagggctgcccactgagccggtttaaggatagcctgggaaacccaacccacatcctgagaatcggcgagagctataaggagaagcagcggaccatccaggccaagaaggaggtggagcagcggagagccggcggctacagccggaagtacgccagcaaagccaagaatctggcagacgatatggtgagaaacaccgctagagatctgctgtactacgccgtgacccaggatgccatgctgatcttcgccaacctgagccggggcttcggccggcagggcaagcggaccttcatggccgagagacagtacacacggatggaggactggctgaccgccaagctggcctacgagggcctgagcaagacctacctgtccaagacactggcccagtacacctccaagacatgcagcaactgtgggtttaccatcaccagcgccgactacgacagggtgctggagaagctgaagaagacagcaacaggctggatgaccacaattaacggcaaggagctgaaggtggagggccagattacctactacaacagatacaagagacagaacgtagtcaaggacctgtccgtcgagctggatagactgagcgaagaatctgtgaacaacgacatctcctcctggacaaagggcagaagcggagaagctctgagcctcctgaagaaaagattctcccatagacccgtgcaggagaagttcgtgtgcctgaactgcggcttcgagacacacgcagccgagcaagccgccctgaacatcgccagatcctggctgttcctgcggagccaggagtacaagaaataccagacaaacaagacaaccggcaacaccgataagagagccttcgtcgagacctggcagtccttttaccggaagaagcttaaggaggtgtggaaacctgccgtgcggtctggcggatctggcggaggctcctgccagcgcccaggtgaccttcgaggacatcgccgtgagcttctgccacgaggagtggaggtacctggacgagggccagaaggagctgtacaaggaggtgatgaaggagaactacgagaccctgatcagcctgggcttcctgtgcgagaagcccagcctgatcagcaagatcgagcaggaggaggacccctgcgtgagggaccagcagaacagcagggagaggaggaggaggctgaagaacttcggatctggctccggcagcggccccaagaaaaagagaaaagtctaagctgccttctgcggggcttgccttctggccatgcccttcttctctcccttgcacctgtacctcttggtctttgaataaagcctgagtaggaaggctagcaaaaaaaaaaaaaaaaaaaaaaaaaaaaaaaaaaaaaaaaaaaaaaaaaaaaaaaaaaaaaaaaaaaaaaaaaaaaaaaa

SEQ ID NO: 15457 - RNA, 9485 nt, synthetic construct
  source 1..9485: mol_type = other RNA
aggaaataagagagaaaagaagagtaagaagaaatataagagccaccatggcccctaagaagaagcgtaaagtgagccggatggaacgcctcgtctacgaggtgcggcagaagtgcagaaacatcgaggacatctgcatctcctgcggatctctgaacgtgaccctggagcacccactgttcatcggcggcatgtgccagaactgtaaaaactgttttctggagtgtgcctatcaatacgacgatgacggctaccagagctactgcaccatctgttgcggcggaagagaggtgctgatgtgtggaaataacaactgctgccggtgcttctgcgtggaatgcgtggacctgctggtgggccccggcgccgcccaggccgctattaaggaagatccttggaactgctacatgtgcggccacaagggcacatacggcctgctgagacggagagaggactggcctagcagactgcagatgttcttcgccaataaccacgaccaggagttcgacccccctaaggtgtaccctcccgtccccgccgagaagagaaagcccatccgggtcctgagcctgttcgatggcatcgccaccggtctgctggtgctgaaggacctgggcatccaggtggataggtacattgcctccgaggtgtgcgaggactccatcaccgtgggaatggtgcgtcatcagggcaagatcatgtacgtgggcgacgtgcggagcgtgacacagaagcatatccaggagtggggccctttcgacctggtgatcggcggcagcccttgcaatgacctgagcatcgtgaacccagcccggaagggcctgtacgagggaaccggcagactgttcttcgagttttacagactgctgcacgacgcccggcctaaggaaggcgacgaccggcccttcttttggctgttcgagaatgtggtggccatgggagtcagcgacaagcgggatattagccggttcctggagagcaaccccgtgatgatcgatgccaaggaagtgagcgccgcccaccgggccagatacttctggggcaatctgcctggcatgaacagacccctggccagcaccgtgaacgacaagctggagctgcaggagtgcctggagcacggccggatcgccaagttcagcaaggtgagaaccatcaccacccgaagcaacagcatcaaacaaggcaaggaccagcactttcctgtgttcatgaacgagaaggaggacatcctgtggtgtaccgagatggagagagtgttcgggttcccagtccactacacagatgtcagcaacatgtctagactggccagacagagactgctgggaagaagctggtccgtccctgtgatcagacacctgttcgcccctctgaaggagtacttcgcctgcgtgagcagcggcaacagcaacgccaacagccggggccccagcttctctagcggcctggtgccactgtccctgagagggagccacatgggccccatggagatctacaaaaccgtgagcgcctggaagcggcagcctgtgcgcgtgctgagcctgtttcggaatatcgataaagtcctgaaaagcctgggattcctggagagcggctctggctccggcggtggcaccctgaagtacgtggaggatgtgacaaacgtggtcagacgggatgtggagaagtggggccccttcgatctggtgtacggcagcacccaacccctgggcagctcttgtgaccggtgccctggctggtacatgtttcagttccaccggatcctgcagtacgccctgccgagacaggagtcccagcggccattcttttggattttcatggacaacttgctgctgaccgaggatgaccaggaaactaccactcggttcctgcagaccgaagccgtgaccctgcaggacgtgagaggccgggactaccagaacgccatgcgggtgtggtccaacatccctggactgaaaagcaagcacgcacctctgacccctaaagaagaggagtacctgcaggcccaggtgcggagcagaagcaagctggacgcccctaaggtggatctgctggtgaagaattgcctcctgcccctgagagagtacttcaagtatttcagccagaatagtctgcccctgggaggcagcggcggcggcgccctggtgacatttgaggacgtcgccgtgcggttcacccaggaggaatgggctctgctggatccttctcagaaaatcctgtaccgggacgtgatgagagagacataccggaatctgacctccgtgggcatcaactgggaatgttgggaccttgaagcctgcttcagaagcctgggaagaaacctgagagtgcaggtggtgaagagaaagtgcgagctgaccaacagcggcccctgcgccgagggcggcccaagcagcggcgcccctcctcccagcggcggcagcccagccggctccccaacctctaccgaggagggcacctctgagtccgccacccccgagagcggccctggcacctccaccgagcccagcgagggcagcgcacccggcagccctgccggcagccccacctccacagaggagggaaccagcaccgagcccagcgaaggcagcgccccaggcaccagcaccgagcctagtgagcaggagattaaacggatcaacaagatcagaagaagacttgtgaaagacagcaacaccaagaaggccggcaagacaggccccatgaaaaccctgctggttagagtgatgacacccgatctgagagagcggctggaaaacctgagaaagaagcctgaaaatatcccccagcccatcagcaatacatctagagccaacctgaataagctgctgaccgattacaccgaaatgaagaaggcgatcctgcatgtgtactgggaagagttccagaaggaccctgtgggcctgatgagccgggtggcccagcctgccagcaagaagatcgatcagaacaagctgaaacctgagatggacgagaagggcaacctgaccaccgccggctttgcctgctctcagtgtggccagcccctgttcgtgtacaagctggagcaggtgtctgagaagggcaaggcttacaccaactacttcggacggtgcaatgtggccgagcacgaaaagctgatcctgctggcccagctgaagcccgagaaggatagcgacgaagccgtgacatatagcctgggaaagtttgggcagagggccctggatttctacagcattcatgtgaccaaggagtccacccaccccgtgaagcccctggcccagatcgccggaaacagatacgcctccggacctgtgggaaaggccctgagcgacgcatgtatgggcacaatcgcctccttcctgtctaagtaccaggacatcatcatcgaacaccagaaggtggtgaagggcaaccagaagagactggagagcctgcgggagctggccggcaaggaaaacctggaataccctagcgtgaccctgccacctcagcctcacaccaaggagggcgttgatgcctacaacgaagtgatcgcccgggtgcgaatgtgggtgaacctgaacctgtggcagaagctgaagctaagcagagatgatgccaagcctctgctgagactgaagggattcccttcctttcctctggtcgagagacaggccaacgaagtggactggtgggacatggtgtgtaacgtgaagaagctgatcaacgagaaaaaggaggatggcaaggtgttttggcagaatctggctggctacaagagacaggaagccctgagaccatacctgagcagcgaggaagatcggaagaagggaaagaaattcgctcggtaccagctgggcgacctgctgctgcacctggaaaagaagcacggcgaggactggggaaaggtgtacgacgaggcctgggagcggattgacaagaaagtggaaggcctgagcaagcacatcaagctggaagaggaacggagaagcgaggacgcccagagcaaggccgccctgaccgactggctgcgggctaaggccagcttcgtgatcgagggcctgaaggaggccgacaaggacgagttctgcagatgcgagctgaagctgcagaagtggtacggggacctgcggggaaagcccttcgccatcgaagccgagaacagcatcctggacatcagcggcttcagcaagcagtacaactgtgccttcatctggcagaaggacggcgtgaagaagctgaacctgtacctgatcatcaactacttcaagggcggcaagctgcggttcaagaagatcaaacctgaagccttcgaagccaacagattctacaccgtgatcaacaaaaagagcggcgagatcgtgcccatggaggtgaacttcaacttcgacgaccccaacctgatcatcctgcctctggcctttggcaagagacagggcagagaattcatctggaacgacctgctgtccctggaaaccggcagcctgaagctggccaacggaagagtgatcgagaagacactgtacaacagaagaacccggcaggatgagcctgccctgttcgtggccctgaccttcgagcggcgggaggtcctggactcctccaatatcaaaccaatgaacctgatcggcgtggcaagaggcgaaaacatccccgccgtgatcgccctgaccgaccccgagggctgcccactgagccggtttaaggatagcctgggaaacccaacccacatcctgagaatcggcgagagctataaggagaagcagcggaccatccaggccaagaaggaggtggagcagcggagagccggcggctacagccggaagtacgccagcaaagccaagaatctggcagacgatatggtgagaaacaccgctagagatctgctgtactacgccgtgacccaggatgccatgctgatcttcgccaacctgagccggggcttcggccggcagggcaagcggaccttcatggccgagagacagtacacacggatggaggactggctgaccgccaagctggcctacgagggcctgagcaagacctacctgtccaagacactggcccagtacacctccaagacatgcagcaactgtgggtttaccatcaccagcgccgactacgacagggtgctggagaagctgaagaagacagcaacaggctggatgaccacaattaacggcaaggagctgaaggtggagggccagattacctactacaacagatacaagagacagaacgtagtcaaggacctgtccgtcgagctggatagactgagcgaagaatctgtgaacaacgacatctcctcctggacaaagggcagaagcggagaagctctgagcctcctgaagaaaagattctcccatagacccgtgcaggagaagttcgtgtgcctgaactgcggcttcgagacacacgcagccgagcaagccgccctgaacatcgccagatcctggctgttcctgcggagccaggagtacaagaaataccagacaaacaagacaaccggcaacaccgataagagagccttcgtcgagacctggcagtccttttaccggaagaagcttaaggaggtgtggaaacctgccgtgcggtctggcggatctggcggaggctccagccagggcctggtgaccttcggcgacgtggccgtggacttcagccaggaggagtgggcctggctgagcaccacccagaggaccctgtacaggaaggtgaccctggagaactacaggaacctggccagcctgggcctgtgcgtgagcaagcccgccgtgatcagcctgctggagcagggcaaggagccctggatcgtgaagaggaagatgaccaggggcggctgccccgacctgaacgccgtgggcggcccaagcagcggcgcccctcctcccagcggcggcagcccagccggctccccaacctctaccgaggagggcacctctgagtccgccacccccgagagcggccctggcacctccaccgagcccagcgagggcagcgcacccggcagccctgccggcagccccacctccacagaggagggaaccagcaccgagcccagcgaaggcagcgccccaggcaccagcaccgagcctagtgagcaggagattaaacggatcaacaagatcagaagaagacttgtgaaagacagcaacaccaagaaggccggcaagacaggccccatgaaaaccctgctggttagagtgatgacacccgatctgagagagcggctggaaaacctgagaaagaagcctgaaaatatcccccagcccatcagcaatacatctagagccaacctgaataagctgctgaccgattacaccgaaatgaagaaggcgatcctgcatgtgtactgggaagagttccagaaggaccctgtgggcctgatgagccgggtggcccagcctgccagcaagaagatcgatcagaacaagctgaaacctgagatggacgagaagggcaacctgaccaccgccggctttgcctgctctcagtgtggccagcccctgttcgtgtacaagctggagcaggtgtctgagaagggcaaggcttacaccaactacttcggacggtgcaatgtggccgagcacgaaaagctgatcctgctggcccagctgaagcccgagaaggatagcgacgaagccgtgacatatagcctgggaaagtttgggcagagggccctggatttctacagcattcatgtgaccaaggagtccacccaccccgtgaagcccctggcccagatcgccggaaacagatacgcctccggacctgtgggaaaggccctgagcgacgcatgtatgggcacaatcgcctccttcctgtctaagtaccaggacatcatcatcgaacaccagaaggtggtgaagggcaaccagaagagactggagagcctgcgggagctggccggcaaggaaaacctggaataccctagcgtgaccctgccacctcagcctcacaccaaggagggcgttgatgcctacaacgaagtgatcgcccgggtgcgaatgtgggtgaacctgaacctgtggcagaagctgaagctaagcagagatgatgccaagcctctgctgagactgaagggattcccttcctttcctctggtcgagagacaggccaacgaagtggactggtgggacatggtgtgtaacgtgaagaagctgatcaacgagaaaaaggaggatggcaaggtgttttggcagaatctggctggctacaagagacaggaagccctgagaccatacctgagcagcgaggaagatcggaagaagggaaagaaattcgctcggtaccagctgggcgacctgctgctgcacctggaaaagaagcacggcgaggactggggaaaggtgtacgacgaggcctgggagcggattgacaagaaagtggaaggcctgagcaagcacatcaagctggaagaggaacggagaagcgaggacgcccagagcaaggccgccctgaccgactggctgcgggctaaggccagcttcgtgatcgagggcctgaaggaggccgacaaggacgagttctgcagatgcgagctgaagctgcagaagtggtacggggacctgcggggaaagcccttcgccatcgaagccgagaacagcatcctggacatcagcggcttcagcaagcagtacaactgtgccttcatctggcagaaggacggcgtgaagaagctgaacctgtacctgatcatcaactacttcaagggcggcaagctgcggttcaagaagatcaaacctgaagccttcgaagccaacagattctacaccgtgatcaacaaaaagagcggcgagatcgtgcccatggaggtgaacttcaacttcgacgaccccaacctgatcatcctgcctctggcctttggcaagagacagggcagagaattcatctggaacgacctgctgtccctggaaaccggcagcctgaagctggccaacggaagagtgatcgagaagacactgtacaacagaagaacccggcaggatgagcctgccctgttcgtggccctgaccttcgagcggcgggaggtcctggactcctccaatatcaaaccaatgaacctgatcggcgtggcaagaggcgaaaacatccccgccgtgatcgccctgaccgaccccgagggctgcccactgagccggtttaaggatagcctgggaaacccaacccacatcctgagaatcggcgagagctataaggagaagcagcggaccatccaggccaagaaggaggtggagcagcggagagccggcggctacagccggaagtacgccagcaaagccaagaatctggcagacgatatggtgagaaacaccgctagagatctgctgtactacgccgtgacccaggatgccatgctgatcttcgccaacctgagccggggcttcggccggcagggcaagcggaccttcatggccgagagacagtacacacggatggaggactggctgaccgccaagctggcctacgagggcctgagcaagacctacctgtccaagacactggcccagtacacctccaagacatgcagcaactgtgggtttaccatcaccagcgccgactacgacagggtgctggagaagctgaagaagacagcaacaggctggatgaccacaattaacggcaaggagctgaaggtggagggccagattacctactacaacagatacaagagacagaacgtagtcaaggacctgtccgtcgagctggatagactgagcgaagaatctgtgaacaacgacatctcctcctggacaaagggcagaagcggagaagctctgagcctcctgaagaaaagattctcccatagacccgtgcaggagaagttcgtgtgcctgaactgcggcttcgagacacacgcagccgagcaagccgccctgaacatcgccagatcctggctgttcctgcggagccaggagtacaagaaataccagacaaacaagacaaccggcaacaccgataagagagccttcgtcgagacctggcagtccttttaccggaagaagcttaaggaggtgtggaaacctgccgtgcggtctggcggatctggcggaggctcctagccagggcctggtgaccttcggcgacgtggccgtggacttcagccaggaggagtgggcctggctgagcaccacccagaggaccctgtacaggaaggtgaccctggagaactacaggaacctggccagcctgggcctgtgcgtgagcaagcccgccgtgatcagcctgctggagcagggcaaggagccctggatcgtgaagaggaagatgaccaggggcggctgccccgacctgaacgccgtgggatctggctccggcagcggccccaagaaaaagagaaaagtctaagctgccttctgcggggcttgccttctggccatgcccttcttctctcccttgcacctgtacctcttggtctttgaataaagcctgagtaggaaggctagcaaaaaaaaaaaaaaaaaaaaaaaaaaaaaaaaaaaaaaaaaaaaaaaaaaaaaaaaaaaaaaaaaaaaaaaaaaaaaaaa

SEQ ID NO: 15458 - RNA, 9485 nt, synthetic construct
  source 1..9485: mol_type = other RNA
aggaaataagagagaaaagaagagtaagaagaaatataagagccaccatggcccctaagaagaagcgtaaagtgagccggatggaacgcctcgtctacgaggtgcggcagaagtgcagaaacatcgaggacatctgcatctcctgcggatctctgaacgtgaccctggagcacccactgttcatcggcggcatgtgccagaactgtaaaaactgttttctggagtgtgcctatcaatacgacgatgacggctaccagagctactgcaccatctgttgcggcggaagagaggtgctgatgtgtggaaataacaactgctgccggtgcttctgcgtggaatgcgtggacctgctggtgggccccggcgccgcccaggccgctattaaggaagatccttggaactgctacatgtgcggccacaagggcacatacggcctgctgagacggagagaggactggcctagcagactgcagatgttcttcgccaataaccacgaccaggagttcgacccccctaaggtgtaccctcccgtccccgccgagaagagaaagcccatccgggtcctgagcctgttcgatggcatcgccaccggtctgctggtgctgaaggacctgggcatccaggtggataggtacattgcctccgaggtgtgcgaggactccatcaccgtgggaatggtgcgtcatcagggcaagatcatgtacgtgggcgacgtgcggagcgtgacacagaagcatatccaggagtggggccctttcgacctggtgatcggcggcagcccttgcaatgacctgagcatcgtgaacccagcccggaagggcctgtacgagggaaccggcagactgttcttcgagttttacagactgctgcacgacgcccggcctaaggaaggcgacgaccggcccttcttttggctgttcgagaatgtggtggccatgggagtcagcgacaagcgggatattagccggttcctggagagcaaccccgtgatgatcgatgccaaggaagtgagcgccgcccaccgggccagatacttctggggcaatctgcctggcatgaacagacccctggccagcaccgtgaacgacaagctggagctgcaggagtgcctggagcacggccggatcgccaagttcagcaaggtgagaaccatcaccacccgaagcaacagcatcaaacaaggcaaggaccagcactttcctgtgttcatgaacgagaaggaggacatcctgtggtgtaccgagatggagagagtgttcgggttcccagtccactacacagatgtcagcaacatgtctagactggccagacagagactgctgggaagaagctggtccgtccctgtgatcagacacctgttcgcccctctgaaggagtacttcgcctgcgtgagcagcggcaacagcaacgccaacagccggggccccagcttctctagcggcctggtgccactgtccctgagagggagccacatgggccccatggagatctacaaaaccgtgagcgcctggaagcggcagcctgtgcgcgtgctgagcctgtttcggaatatcgataaagtcctgaaaagcctgggattcctggagagcggctctggctccggcggtggcaccctgaagtacgtggaggatgtgacaaacgtggtcagacgggatgtggagaagtggggccccttcgatctggtgtacggcagcacccaacccctgggcagctcttgtgaccggtgccctggctggtacatgtttcagttccaccggatcctgcagtacgccctgccgagacaggagtcccagcggccattcttttggattttcatggacaacttgctgctgaccgaggatgaccaggaaactaccactcggttcctgcagaccgaagccgtgaccctgcaggacgtgagaggccgggactaccagaacgccatgcgggtgtggtccaacatccctggactgaaaagcaagcacgcacctctgacccctaaagaagaggagtacctgcaggcccaggtgcggagcagaagcaagctggacgcccctaaggtggatctgctggtgaagaattgcctcctgcccctgagagagtacttcaagtatttcagccagaatagtctgcccctgggaggcagcggcggcggcgccctggtgacatttgaggacgtcgccgtgcggttcacccaggaggaatgggctctgctggatccttctcagaaaatcctgtaccgggacgtgatgagagagacataccggaatctgacctccgtgggcatcaactgggaatgttgggaccttgaagcctgcttcagaagcctgggaagaaacctgagagtgcaggtggtgaagagaaagtgcgagctgaccaacagcggcccctgcgccgagggcggcccaagcagcggcgcccctcctcccagcggcggcagcccagccggctccccaacctctaccgaggagggcacctctgagtccgccacccccgagagcggccctggcacctccaccgagcccagcgagggcagcgcacccggcagccctgccggcagccccacctccacagaggagggaaccagcaccgagcccagcgaaggcagcgccccaggcaccagcaccgagcctagtgagcaggagattaaacggatcaacaagatcagaagaagacttgtgaaagacagcaacaccaagaaggccggcaagacaggccccatgaaaaccctgctggttagagtgatgacacccgatctgagagagcggctggaaaacctgagaaagaagcctgaaaatatcccccagcccatcagcaatacatctagagccaacctgaataagctgctgaccgattacaccgaaatgaagaaggcgatcctgcatgtgtactgggaagagttccagaaggaccctgtgggcctgatgagccgggtggcccagcctgccagcaagaagatcgatcagaacaagctgaaacctgagatggacgagaagggcaacctgaccaccgccggctttgcctgctctcagtgtggccagcccctgttcgtgtacaagctggagcaggtgtctgagaagggcaaggcttacaccaactacttcggacggtgcaatgtggccgagcacgaaaagctgatcctgctggcccagctgaagcccgagaaggatagcgacgaagccgtgacatatagcctgggaaagtttgggcagagggccctggatttctacagcattcatgtgaccaaggagtccacccaccccgtgaagcccctggcccagatcgccggaaacagatacgcctccggacctgtgggaaaggccctgagcgacgcatgtatgggcacaatcgcctccttcctgtctaagtaccaggacatcatcatcgaacaccagaaggtggtgaagggcaaccagaagagactggagagcctgcgggagctggccggcaaggaaaacctggaataccctagcgtgaccctgccacctcagcctcacaccaaggagggcgttgatgcctacaacgaagtgatcgcccgggtgcgaatgtgggtgaacctgaacctgtggcagaagctgaagctaagcagagatgatgccaagcctctgctgagactgaagggattcccttcctttcctctggtcgagagacaggccaacgaagtggactggtgggacatggtgtgtaacgtgaagaagctgatcaacgagaaaaaggaggatggcaaggtgttttggcagaatctggctggctacaagagacaggaagccctgagaccatacctgagcagcgaggaagatcggaagaagggaaagaaattcgctcggtaccagctgggcgacctgctgctgcacctggaaaagaagcacggcgaggactggggaaaggtgtacgacgaggcctgggagcggattgacaagaaagtggaaggcctgagcaagcacatcaagctggaagaggaacggagaagcgaggacgcccagagcaaggccgccctgaccgactggctgcgggctaaggccagcttcgtgatcgagggcctgaaggaggccgacaaggacgagttctgcagatgcgagctgaagctgcagaagtggtacggggacctgcggggaaagcccttcgccatcgaagccgagaacagcatcctggacatcagcggcttcagcaagcagtacaactgtgccttcatctggcagaaggacggcgtgaagaagctgaacctgtacctgatcatcaactacttcaagggcggcaagctgcggttcaagaagatcaaacctgaagccttcgaagccaacagattctacaccgtgatcaacaaaaagagcggcgagatcgtgcccatggaggtgaacttcaacttcgacgaccccaacctgatcatcctgcctctggcctttggcaagagacagggcagagaattcatctggaacgacctgctgtccctggaaaccggcagcctgaagctggccaacggaagagtgatcgagaagacactgtacaacagaagaacccggcaggatgagcctgccctgttcgtggccctgaccttcgagcggcgggaggtcctggactcctccaatatcaaaccaatgaacctgatcggcgtggcaagaggcgaaaacatccccgccgtgatcgccctgaccgaccccgagggctgcccactgagccggtttaaggatagcctgggaaacccaacccacatcctgagaatcggcgagagctataaggagaagcagcggaccatccaggccaagaaggaggtggagcagcggagagccggcggctacagccggaagtacgccagcaaagccaagaatctggcagacgatatggtgagaaacaccgctagagatctgctgtactacgccgtgacccaggatgccatgctgatcttcgccaacctgagccggggcttcggccggcagggcaagcggaccttcatggccgagagacagtacacacggatggaggactggctgaccgccaagctggcctacgagggcctgagcaagacctacctgtccaagacactggcccagtacacctccaagacatgcagcaactgtgggtttaccatcaccagcgccgactacgacagggtgctggagaagctgaagaagacagcaacaggctggatgaccacaattaacggcaaggagctgaaggtggagggccagattacctactacaacagatacaagagacagaacgtagtcaaggacctgtccgtcgagctggatagactgagcgaagaatctgtgaacaacgacatctcctcctggacaaagggcagaagcggagaagctctgagcctcctgaagaaaagattctcccatagacccgtgcaggagaagttcgtgtgcctgaactgcggcttcgagacacacgcagccgagcaagccgccctgaacatcgccagatcctggctgttcctgcggagccaggagtacaagaaataccagacaaacaagacaaccggcaacaccgataagagagccttcgtcgagacctggcagtccttttaccggaagaagcttaaggaggtgtggaaacctgccgtgcggtctggcggatctggcggaggctccagcaaggtgcccgtgaccttcggcgacctggccatctacttcagccaggaggagtgggagtggctgagccccatccagaaggacctgtacgaggacgtgatgctggagaactaccagaacctggtgagcctgggcctgagcttcaggaggcccaacgtgatcaccctgctggagaagggcaaggccccctggatggtggagcccgccaggaagaggaggggcgtggacagcggcagcaagtgcggcggcccaagcagcggcgcccctcctcccagcggcggcagcccagccggctccccaacctctaccgaggagggcacctctgagtccgccacccccgagagcggccctggcacctccaccgagcccagcgagggcagcgcacccggcagccctgccggcagccccacctccacagaggagggaaccagcaccgagcccagcgaaggcagcgccccaggcaccagcaccgagcctagtgagcaggagattaaacggatcaacaagatcagaagaagacttgtgaaagacagcaacaccaagaaggccggcaagacaggccccatgaaaaccctgctggttagagtgatgacacccgatctgagagagcggctggaaaacctgagaaagaagcctgaaaatatcccccagcccatcagcaatacatctagagccaacctgaataagctgctgaccgattacaccgaaatgaagaaggcgatcctgcatgtgtactgggaagagttccagaaggaccctgtgggcctgatgagccgggtggcccagcctgccagcaagaagatcgatcagaacaagctgaaacctgagatggacgagaagggcaacctgaccaccgccggctttgcctgctctcagtgtggccagcccctgttcgtgtacaagctggagcaggtgtctgagaagggcaaggcttacaccaactacttcggacggtgcaatgtggccgagcacgaaaagctgatcctgctggcccagctgaagcccgagaaggatagcgacgaagccgtgacatatagcctgggaaagtttgggcagagggccctggatttctacagcattcatgtgaccaaggagtccacccaccccgtgaagcccctggcccagatcgccggaaacagatacgcctccggacctgtgggaaaggccctgagcgacgcatgtatgggcacaatcgcctccttcctgtctaagtaccaggacatcatcatcgaacaccagaaggtggtgaagggcaaccagaagagactggagagcctgcgggagctggccggcaaggaaaacctggaataccctagcgtgaccctgccacctcagcctcacaccaaggagggcgttgatgcctacaacgaagtgatcgcccgggtgcgaatgtgggtgaacctgaacctgtggcagaagctgaagctaagcagagatgatgccaagcctctgctgagactgaagggattcccttcctttcctctggtcgagagacaggccaacgaagtggactggtgggacatggtgtgtaacgtgaagaagctgatcaacgagaaaaaggaggatggcaaggtgttttggcagaatctggctggctacaagagacaggaagccctgagaccatacctgagcagcgaggaagatcggaagaagggaaagaaattcgctcggtaccagctgggcgacctgctgctgcacctggaaaagaagcacggcgaggactggggaaaggtgtacgacgaggcctgggagcggattgacaagaaagtggaaggcctgagcaagcacatcaagctggaagaggaacggagaagcgaggacgcccagagcaaggccgccctgaccgactggctgcgggctaaggccagcttcgtgatcgagggcctgaaggaggccgacaaggacgagttctgcagatgcgagctgaagctgcagaagtggtacggggacctgcggggaaagcccttcgccatcgaagccgagaacagcatcctggacatcagcggcttcagcaagcagtacaactgtgccttcatctggcagaaggacggcgtgaagaagctgaacctgtacctgatcatcaactacttcaagggcggcaagctgcggttcaagaagatcaaacctgaagccttcgaagccaacagattctacaccgtgatcaacaaaaagagcggcgagatcgtgcccatggaggtgaacttcaacttcgacgaccccaacctgatcatcctgcctctggcctttggcaagagacagggcagagaattcatctggaacgacctgctgtccctggaaaccggcagcctgaagctggccaacggaagagtgatcgagaagacactgtacaacagaagaacccggcaggatgagcctgccctgttcgtggccctgaccttcgagcggcgggaggtcctggactcctccaatatcaaaccaatgaacctgatcggcgtggcaagaggcgaaaacatccccgccgtgatcgccctgaccgaccccgagggctgcccactgagccggtttaaggatagcctgggaaacccaacccacatcctgagaatcggcgagagctataaggagaagcagcggaccatccaggccaagaaggaggtggagcagcggagagccggcggctacagccggaagtacgccagcaaagccaagaatctggcagacgatatggtgagaaacaccgctagagatctgctgtactacgccgtgacccaggatgccatgctgatcttcgccaacctgagccggggcttcggccggcagggcaagcggaccttcatggccgagagacagtacacacggatggaggactggctgaccgccaagctggcctacgagggcctgagcaagacctacctgtccaagacactggcccagtacacctccaagacatgcagcaactgtgggtttaccatcaccagcgccgactacgacagggtgctggagaagctgaagaagacagcaacaggctggatgaccacaattaacggcaaggagctgaaggtggagggccagattacctactacaacagatacaagagacagaacgtagtcaaggacctgtccgtcgagctggatagactgagcgaagaatctgtgaacaacgacatctcctcctggacaaagggcagaagcggagaagctctgagcctcctgaagaaaagattctcccatagacccgtgcaggagaagttcgtgtgcctgaactgcggcttcgagacacacgcagccgagcaagccgccctgaacatcgccagatcctggctgttcctgcggagccaggagtacaagaaataccagacaaacaagacaaccggcaacaccgataagagagccttcgtcgagacctggcagtccttttaccggaagaagcttaaggaggtgtggaaacctgccgtgcggtctggcggatctggcggaggctcctagcaaggtgcccgtgaccttcggcgacctggccatctacttcagccaggaggagtgggagtggctgagccccatccagaaggacctgtacgaggacgtgatgctggagaactaccagaacctggtgagcctgggcctgagcttcaggaggcccaacgtgatcaccctgctggagaagggcaaggccccctggatggtggagcccgccaggaagaggaggggcgtggacagcggcagcaagtgcggatctggctccggcagcggccccaagaaaaagagaaaagtctaagctgccttctgcggggcttgccttctggccatgcccttcttctctcccttgcacctgtacctcttggtctttgaataaagcctgagtaggaaggctagcaaaaaaaaaaaaaaaaaaaaaaaaaaaaaaaaaaaaaaaaaaaaaaaaaaaaaaaaaaaaaaaaaaaaaaaaaaaaaaaa

SEQ ID NO: 15459 - RNA, 9485 nt, synthetic construct
  source 1..9485: mol_type = other RNA
aggaaataagagagaaaagaagagtaagaagaaatataagagccaccatggcccctaagaagaagcgtaaagtgagccggatggaacgcctcgtctacgaggtgcggcagaagtgcagaaacatcgaggacatctgcatctcctgcggatctctgaacgtgaccctggagcacccactgttcatcggcggcatgtgccagaactgtaaaaactgttttctggagtgtgcctatcaatacgacgatgacggctaccagagctactgcaccatctgttgcggcggaagagaggtgctgatgtgtggaaataacaactgctgccggtgcttctgcgtggaatgcgtggacctgctggtgggccccggcgccgcccaggccgctattaaggaagatccttggaactgctacatgtgcggccacaagggcacatacggcctgctgagacggagagaggactggcctagcagactgcagatgttcttcgccaataaccacgaccaggagttcgacccccctaaggtgtaccctcccgtccccgccgagaagagaaagcccatccgggtcctgagcctgttcgatggcatcgccaccggtctgctggtgctgaaggacctgggcatccaggtggataggtacattgcctccgaggtgtgcgaggactccatcaccgtgggaatggtgcgtcatcagggcaagatcatgtacgtgggcgacgtgcggagcgtgacacagaagcatatccaggagtggggccctttcgacctggtgatcggcggcagcccttgcaatgacctgagcatcgtgaacccagcccggaagggcctgtacgagggaaccggcagactgttcttcgagttttacagactgctgcacgacgcccggcctaaggaaggcgacgaccggcccttcttttggctgttcgagaatgtggtggccatgggagtcagcgacaagcgggatattagccggttcctggagagcaaccccgtgatgatcgatgccaaggaagtgagcgccgcccaccgggccagatacttctggggcaatctgcctggcatgaacagacccctggccagcaccgtgaacgacaagctggagctgcaggagtgcctggagcacggccggatcgccaagttcagcaaggtgagaaccatcaccacccgaagcaacagcatcaaacaaggcaaggaccagcactttcctgtgttcatgaacgagaaggaggacatcctgtggtgtaccgagatggagagagtgttcgggttcccagtccactacacagatgtcagcaacatgtctagactggccagacagagactgctgggaagaagctggtccgtccctgtgatcagacacctgttcgcccctctgaaggagtacttcgcctgcgtgagcagcggcaacagcaacgccaacagccggggccccagcttctctagcggcctggtgccactgtccctgagagggagccacatgggccccatggagatctacaaaaccgtgagcgcctggaagcggcagcctgtgcgcgtgctgagcctgtttcggaatatcgataaagtcctgaaaagcctgggattcctggagagcggctctggctccggcggtggcaccctgaagtacgtggaggatgtgacaaacgtggtcagacgggatgtggagaagtggggccccttcgatctggtgtacggcagcacccaacccctgggcagctcttgtgaccggtgccctggctggtacatgtttcagttccaccggatcctgcagtacgccctgccgagacaggagtcccagcggccattcttttggattttcatggacaacttgctgctgaccgaggatgaccaggaaactaccactcggttcctgcagaccgaagccgtgaccctgcaggacgtgagaggccgggactaccagaacgccatgcgggtgtggtccaacatccctggactgaaaagcaagcacgcacctctgacccctaaagaagaggagtacctgcaggcccaggtgcggagcagaagcaagctggacgcccctaaggtggatctgctggtgaagaattgcctcctgcccctgagagagtacttcaagtatttcagccagaatagtctgcccctgggaggcagcggcggcggcgccctggtgacatttgaggacgtcgccgtgcggttcacccaggaggaatgggctctgctggatccttctcagaaaatcctgtaccgggacgtgatgagagagacataccggaatctgacctccgtgggcatcaactgggaatgttgggaccttgaagcctgcttcagaagcctgggaagaaacctgagagtgcaggtggtgaagagaaagtgcgagctgaccaacagcggcccctgcgccgagggcggcccaagcagcggcgcccctcctcccagcggcggcagcccagccggctccccaacctctaccgaggagggcacctctgagtccgccacccccgagagcggccctggcacctccaccgagcccagcgagggcagcgcacccggcagccctgccggcagccccacctccacagaggagggaaccagcaccgagcccagcgaaggcagcgccccaggcaccagcaccgagcctagtgagcaggagattaaacggatcaacaagatcagaagaagacttgtgaaagacagcaacaccaagaaggccggcaagacaggccccatgaaaaccctgctggttagagtgatgacacccgatctgagagagcggctggaaaacctgagaaagaagcctgaaaatatcccccagcccatcagcaatacatctagagccaacctgaataagctgctgaccgattacaccgaaatgaagaaggcgatcctgcatgtgtactgggaagagttccagaaggaccctgtgggcctgatgagccgggtggcccagcctgccagcaagaagatcgatcagaacaagctgaaacctgagatggacgagaagggcaacctgaccaccgccggctttgcctgctctcagtgtggccagcccctgttcgtgtacaagctggagcaggtgtctgagaagggcaaggcttacaccaactacttcggacggtgcaatgtggccgagcacgaaaagctgatcctgctggcccagctgaagcccgagaaggatagcgacgaagccgtgacatatagcctgggaaagtttgggcagagggccctggatttctacagcattcatgtgaccaaggagtccacccaccccgtgaagcccctggcccagatcgccggaaacagatacgcctccggacctgtgggaaaggccctgagcgacgcatgtatgggcacaatcgcctccttcctgtctaagtaccaggacatcatcatcgaacaccagaaggtggtgaagggcaaccagaagagactggagagcctgcgggagctggccggcaaggaaaacctggaataccctagcgtgaccctgccacctcagcctcacaccaaggagggcgttgatgcctacaacgaagtgatcgcccgggtgcgaatgtgggtgaacctgaacctgtggcagaagctgaagctaagcagagatgatgccaagcctctgctgagactgaagggattcccttcctttcctctggtcgagagacaggccaacgaagtggactggtgggacatggtgtgtaacgtgaagaagctgatcaacgagaaaaaggaggatggcaaggtgttttggcagaatctggctggctacaagagacaggaagccctgagaccatacctgagcagcgaggaagatcggaagaagggaaagaaattcgctcggtaccagctgggcgacctgctgctgcacctggaaaagaagcacggcgaggactggggaaaggtgtacgacgaggcctgggagcggattgacaagaaagtggaaggcctgagcaagcacatcaagctggaagaggaacggagaagcgaggacgcccagagcaaggccgccctgaccgactggctgcgggctaaggccagcttcgtgatcgagggcctgaaggaggccgacaaggacgagttctgcagatgcgagctgaagctgcagaagtggtacggggacctgcggggaaagcccttcgccatcgaagccgagaacagcatcctggacatcagcggcttcagcaagcagtacaactgtgccttcatctggcagaaggacggcgtgaagaagctgaacctgtacctgatcatcaactacttcaagggcggcaagctgcggttcaagaagatcaaacctgaagccttcgaagccaacagattctacaccgtgatcaacaaaaagagcggcgagatcgtgcccatggaggtgaacttcaacttcgacgaccccaacctgatcatcctgcctctggcctttggcaagagacagggcagagaattcatctggaacgacctgctgtccctggaaaccggcagcctgaagctggccaacggaagagtgatcgagaagacactgtacaacagaagaacccggcaggatgagcctgccctgttcgtggccctgaccttcgagcggcgggaggtcctggactcctccaatatcaaaccaatgaacctgatcggcgtggcaagaggcgaaaacatccccgccgtgatcgccctgaccgaccccgagggctgcccactgagccggtttaaggatagcctgggaaacccaacccacatcctgagaatcggcgagagctataaggagaagcagcggaccatccaggccaagaaggaggtggagcagcggagagccggcggctacagccggaagtacgccagcaaagccaagaatctggcagacgatatggtgagaaacaccgctagagatctgctgtactacgccgtgacccaggatgccatgctgatcttcgccaacctgagccggggcttcggccggcagggcaagcggaccttcatggccgagagacagtacacacggatggaggactggctgaccgccaagctggcctacgagggcctgagcaagacctacctgtccaagacactggcccagtacacctccaagacatgcagcaactgtgggtttaccatcaccagcgccgactacgacagggtgctggagaagctgaagaagacagcaacaggctggatgaccacaattaacggcaaggagctgaaggtggagggccagattacctactacaacagatacaagagacagaacgtagtcaaggacctgtccgtcgagctggatagactgagcgaagaatctgtgaacaacgacatctcctcctggacaaagggcagaagcggagaagctctgagcctcctgaagaaaagattctcccatagacccgtgcaggagaagttcgtgtgcctgaactgcggcttcgagacacacgcagccgagcaagccgccctgaacatcgccagatcctggctgttcctgcggagccaggagtacaagaaataccagacaaacaagacaaccggcaacaccgataagagagccttcgtcgagacctggcagtccttttaccggaagaagcttaaggaggtgtggaaacctgccgtgcggtctggcggatctggcggaggctccctgcaggagctgctgaccttcaaggacgtgagcgtggagttcagcgtggacgagtgggcctgcctggaccccgcccagcagaccctgtacagggacgtgatgctggagaactacaggcacctggtgttcctgggcctgacccccagcaagccccacctgatcacctgcctggagcagagcaaggagccctggaaggtgaaggcctaccagaccgtggtgaagcaccccgccgtgagcaaccacggcggcccaagcagcggcgcccctcctcccagcggcggcagcccagccggctccccaacctctaccgaggagggcacctctgagtccgccacccccgagagcggccctggcacctccaccgagcccagcgagggcagcgcacccggcagccctgccggcagccccacctccacagaggagggaaccagcaccgagcccagcgaaggcagcgccccaggcaccagcaccgagcctagtgagcaggagattaaacggatcaacaagatcagaagaagacttgtgaaagacagcaacaccaagaaggccggcaagacaggccccatgaaaaccctgctggttagagtgatgacacccgatctgagagagcggctggaaaacctgagaaagaagcctgaaaatatcccccagcccatcagcaatacatctagagccaacctgaataagctgctgaccgattacaccgaaatgaagaaggcgatcctgcatgtgtactgggaagagttccagaaggaccctgtgggcctgatgagccgggtggcccagcctgccagcaagaagatcgatcagaacaagctgaaacctgagatggacgagaagggcaacctgaccaccgccggctttgcctgctctcagtgtggccagcccctgttcgtgtacaagctggagcaggtgtctgagaagggcaaggcttacaccaactacttcggacggtgcaatgtggccgagcacgaaaagctgatcctgctggcccagctgaagcccgagaaggatagcgacgaagccgtgacatatagcctgggaaagtttgggcagagggccctggatttctacagcattcatgtgaccaaggagtccacccaccccgtgaagcccctggcccagatcgccggaaacagatacgcctccggacctgtgggaaaggccctgagcgacgcatgtatgggcacaatcgcctccttcctgtctaagtaccaggacatcatcatcgaacaccagaaggtggtgaagggcaaccagaagagactggagagcctgcgggagctggccggcaaggaaaacctggaataccctagcgtgaccctgccacctcagcctcacaccaaggagggcgttgatgcctacaacgaagtgatcgcccgggtgcgaatgtgggtgaacctgaacctgtggcagaagctgaagctaagcagagatgatgccaagcctctgctgagactgaagggattcccttcctttcctctggtcgagagacaggccaacgaagtggactggtgggacatggtgtgtaacgtgaagaagctgatcaacgagaaaaaggaggatggcaaggtgttttggcagaatctggctggctacaagagacaggaagccctgagaccatacctgagcagcgaggaagatcggaagaagggaaagaaattcgctcggtaccagctgggcgacctgctgctgcacctggaaaagaagcacggcgaggactggggaaaggtgtacgacgaggcctgggagcggattgacaagaaagtggaaggcctgagcaagcacatcaagctggaagaggaacggagaagcgaggacgcccagagcaaggccgccctgaccgactggctgcgggctaaggccagcttcgtgatcgagggcctgaaggaggccgacaaggacgagttctgcagatgcgagctgaagctgcagaagtggtacggggacctgcggggaaagcccttcgccatcgaagccgagaacagcatcctggacatcagcggcttcagcaagcagtacaactgtgccttcatctggcagaaggacggcgtgaagaagctgaacctgtacctgatcatcaactacttcaagggcggcaagctgcggttcaagaagatcaaacctgaagccttcgaagccaacagattctacaccgtgatcaacaaaaagagcggcgagatcgtgcccatggaggtgaacttcaacttcgacgaccccaacctgatcatcctgcctctggcctttggcaagagacagggcagagaattcatctggaacgacctgctgtccctggaaaccggcagcctgaagctggccaacggaagagtgatcgagaagacactgtacaacagaagaacccggcaggatgagcctgccctgttcgtggccctgaccttcgagcggcgggaggtcctggactcctccaatatcaaaccaatgaacctgatcggcgtggcaagaggcgaaaacatccccgccgtgatcgccctgaccgaccccgagggctgcccactgagccggtttaaggatagcctgggaaacccaacccacatcctgagaatcggcgagagctataaggagaagcagcggaccatccaggccaagaaggaggtggagcagcggagagccggcggctacagccggaagtacgccagcaaagccaagaatctggcagacgatatggtgagaaacaccgctagagatctgctgtactacgccgtgacccaggatgccatgctgatcttcgccaacctgagccggggcttcggccggcagggcaagcggaccttcatggccgagagacagtacacacggatggaggactggctgaccgccaagctggcctacgagggcctgagcaagacctacctgtccaagacactggcccagtacacctccaagacatgcagcaactgtgggtttaccatcaccagcgccgactacgacagggtgctggagaagctgaagaagacagcaacaggctggatgaccacaattaacggcaaggagctgaaggtggagggccagattacctactacaacagatacaagagacagaacgtagtcaaggacctgtccgtcgagctggatagactgagcgaagaatctgtgaacaacgacatctcctcctggacaaagggcagaagcggagaagctctgagcctcctgaagaaaagattctcccatagacccgtgcaggagaagttcgtgtgcctgaactgcggcttcgagacacacgcagccgagcaagccgccctgaacatcgccagatcctggctgttcctgcggagccaggagtacaagaaataccagacaaacaagacaaccggcaacaccgataagagagccttcgtcgagacctggcagtccttttaccggaagaagcttaaggaggtgtggaaacctgccgtgcggtctggcggatctggcggaggctcctctgcaggagctgctgaccttcaaggacgtgagcgtggagttcagcgtggacgagtgggcctgcctggaccccgcccagcagaccctgtacagggacgtgatgctggagaactacaggcacctggtgttcctgggcctgacccccagcaagccccacctgatcacctgcctggagcagagcaaggagccctggaaggtgaaggcctaccagaccgtggtgaagcaccccgccgtgagcaaccacggatctggctccggcagcggccccaagaaaaagagaaaagtctaagctgccttctgcggggcttgccttctggccatgcccttcttctctcccttgcacctgtacctcttggtctttgaataaagcctgagtaggaaggctagcaaaaaaaaaaaaaaaaaaaaaaaaaaaaaaaaaaaaaaaaaaaaaaaaaaaaaaaaaaaaaaaaaaaaaaaaaaaaaaaa

SEQ ID NO: 15460 - RNA, 9479 nt, synthetic construct
  source 1..9479: mol_type = other RNA
aggaaataagagagaaaagaagagtaagaagaaatataagagccaccatggcccctaagaagaagcgtaaagtgagccggatggaacgcctcgtctacgaggtgcggcagaagtgcagaaacatcgaggacatctgcatctcctgcggatctctgaacgtgaccctggagcacccactgttcatcggcggcatgtgccagaactgtaaaaactgttttctggagtgtgcctatcaatacgacgatgacggctaccagagctactgcaccatctgttgcggcggaagagaggtgctgatgtgtggaaataacaactgctgccggtgcttctgcgtggaatgcgtggacctgctggtgggccccggcgccgcccaggccgctattaaggaagatccttggaactgctacatgtgcggccacaagggcacatacggcctgctgagacggagagaggactggcctagcagactgcagatgttcttcgccaataaccacgaccaggagttcgacccccctaaggtgtaccctcccgtccccgccgagaagagaaagcccatccgggtcctgagcctgttcgatggcatcgccaccggtctgctggtgctgaaggacctgggcatccaggtggataggtacattgcctccgaggtgtgcgaggactccatcaccgtgggaatggtgcgtcatcagggcaagatcatgtacgtgggcgacgtgcggagcgtgacacagaagcatatccaggagtggggccctttcgacctggtgatcggcggcagcccttgcaatgacctgagcatcgtgaacccagcccggaagggcctgtacgagggaaccggcagactgttcttcgagttttacagactgctgcacgacgcccggcctaaggaaggcgacgaccggcccttcttttggctgttcgagaatgtggtggccatgggagtcagcgacaagcgggatattagccggttcctggagagcaaccccgtgatgatcgatgccaaggaagtgagcgccgcccaccgggccagatacttctggggcaatctgcctggcatgaacagacccctggccagcaccgtgaacgacaagctggagctgcaggagtgcctggagcacggccggatcgccaagttcagcaaggtgagaaccatcaccacccgaagcaacagcatcaaacaaggcaaggaccagcactttcctgtgttcatgaacgagaaggaggacatcctgtggtgtaccgagatggagagagtgttcgggttcccagtccactacacagatgtcagcaacatgtctagactggccagacagagactgctgggaagaagctggtccgtccctgtgatcagacacctgttcgcccctctgaaggagtacttcgcctgcgtgagcagcggcaacagcaacgccaacagccggggccccagcttctctagcggcctggtgccactgtccctgagagggagccacatgggccccatggagatctacaaaaccgtgagcgcctggaagcggcagcctgtgcgcgtgctgagcctgtttcggaatatcgataaagtcctgaaaagcctgggattcctggagagcggctctggctccggcggtggcaccctgaagtacgtggaggatgtgacaaacgtggtcagacgggatgtggagaagtggggccccttcgatctggtgtacggcagcacccaacccctgggcagctcttgtgaccggtgccctggctggtacatgtttcagttccaccggatcctgcagtacgccctgccgagacaggagtcccagcggccattcttttggattttcatggacaacttgctgctgaccgaggatgaccaggaaactaccactcggttcctgcagaccgaagccgtgaccctgcaggacgtgagaggccgggactaccagaacgccatgcgggtgtggtccaacatccctggactgaaaagcaagcacgcacctctgacccctaaagaagaggagtacctgcaggcccaggtgcggagcagaagcaagctggacgcccctaaggtggatctgctggtgaagaattgcctcctgcccctgagagagtacttcaagtatttcagccagaatagtctgcccctgggaggcagcggcggcggcgccctggtgacatttgaggacgtcgccgtgcggttcacccaggaggaatgggctctgctggatccttctcagaaaatcctgtaccgggacgtgatgagagagacataccggaatctgacctccgtgggcatcaactgggaatgttgggaccttgaagcctgcttcagaagcctgggaagaaacctgagagtgcaggtggtgaagagaaagtgcgagctgaccaacagcggcccctgcgccgagggcggcccaagcagcggcgcccctcctcccagcggcggcagcccagccggctccccaacctctaccgaggagggcacctctgagtccgccacccccgagagcggccctggcacctccaccgagcccagcgagggcagcgcacccggcagccctgccggcagccccacctccacagaggagggaaccagcaccgagcccagcgaaggcagcgccccaggcaccagcaccgagcctagtgagcaggagattaaacggatcaacaagatcagaagaagacttgtgaaagacagcaacaccaagaaggccggcaagacaggccccatgaaaaccctgctggttagagtgatgacacccgatctgagagagcggctggaaaacctgagaaagaagcctgaaaatatcccccagcccatcagcaatacatctagagccaacctgaataagctgctgaccgattacaccgaaatgaagaaggcgatcctgcatgtgtactgggaagagttccagaaggaccctgtgggcctgatgagccgggtggcccagcctgccagcaagaagatcgatcagaacaagctgaaacctgagatggacgagaagggcaacctgaccaccgccggctttgcctgctctcagtgtggccagcccctgttcgtgtacaagctggagcaggtgtctgagaagggcaaggcttacaccaactacttcggacggtgcaatgtggccgagcacgaaaagctgatcctgctggcccagctgaagcccgagaaggatagcgacgaagccgtgacatatagcctgggaaagtttgggcagagggccctggatttctacagcattcatgtgaccaaggagtccacccaccccgtgaagcccctggcccagatcgccggaaacagatacgcctccggacctgtgggaaaggccctgagcgacgcatgtatgggcacaatcgcctccttcctgtctaagtaccaggacatcatcatcgaacaccagaaggtggtgaagggcaaccagaagagactggagagcctgcgggagctggccggcaaggaaaacctggaataccctagcgtgaccctgccacctcagcctcacaccaaggagggcgttgatgcctacaacgaagtgatcgcccgggtgcgaatgtgggtgaacctgaacctgtggcagaagctgaagctaagcagagatgatgccaagcctctgctgagactgaagggattcccttcctttcctctggtcgagagacaggccaacgaagtggactggtgggacatggtgtgtaacgtgaagaagctgatcaacgagaaaaaggaggatggcaaggtgttttggcagaatctggctggctacaagagacaggaagccctgagaccatacctgagcagcgaggaagatcggaagaagggaaagaaattcgctcggtaccagctgggcgacctgctgctgcacctggaaaagaagcacggcgaggactggggaaaggtgtacgacgaggcctgggagcggattgacaagaaagtggaaggcctgagcaagcacatcaagctggaagaggaacggagaagcgaggacgcccagagcaaggccgccctgaccgactggctgcgggctaaggccagcttcgtgatcgagggcctgaaggaggccgacaaggacgagttctgcagatgcgagctgaagctgcagaagtggtacggggacctgcggggaaagcccttcgccatcgaagccgagaacagcatcctggacatcagcggcttcagcaagcagtacaactgtgccttcatctggcagaaggacggcgtgaagaagctgaacctgtacctgatcatcaactacttcaagggcggcaagctgcggttcaagaagatcaaacctgaagccttcgaagccaacagattctacaccgtgatcaacaaaaagagcggcgagatcgtgcccatggaggtgaacttcaacttcgacgaccccaacctgatcatcctgcctctggcctttggcaagagacagggcagagaattcatctggaacgacctgctgtccctggaaaccggcagcctgaagctggccaacggaagagtgatcgagaagacactgtacaacagaagaacccggcaggatgagcctgccctgttcgtggccctgaccttcgagcggcgggaggtcctggactcctccaatatcaaaccaatgaacctgatcggcgtggcaagaggcgaaaacatccccgccgtgatcgccctgaccgaccccgagggctgcccactgagccggtttaaggatagcctgggaaacccaacccacatcctgagaatcggcgagagctataaggagaagcagcggaccatccaggccaagaaggaggtggagcagcggagagccggcggctacagccggaagtacgccagcaaagccaagaatctggcagacgatatggtgagaaacaccgctagagatctgctgtactacgccgtgacccaggatgccatgctgatcttcgccaacctgagccggggcttcggccggcagggcaagcggaccttcatggccgagagacagtacacacggatggaggactggctgaccgccaagctggcctacgagggcctgagcaagacctacctgtccaagacactggcccagtacacctccaagacatgcagcaactgtgggtttaccatcaccagcgccgactacgacagggtgctggagaagctgaagaagacagcaacaggctggatgaccacaattaacggcaaggagctgaaggtggagggccagattacctactacaacagatacaagagacagaacgtagtcaaggacctgtccgtcgagctggatagactgagcgaagaatctgtgaacaacgacatctcctcctggacaaagggcagaagcggagaagctctgagcctcctgaagaaaagattctcccatagacccgtgcaggagaagttcgtgtgcctgaactgcggcttcgagacacacgcagccgagcaagccgccctgaacatcgccagatcctggctgttcctgcggagccaggagtacaagaaataccagacaaacaagacaaccggcaacaccgataagagagccttcgtcgagacctggcagtccttttaccggaagaagcttaaggaggtgtggaaacctgccgtgcggtctggcggatctggcggaggctccaacgtggaggtggtgaaggtgatgccccaggacctggtgaccttcaaggacgtggccatcgacttcagccaggaggagtggcagtggatgaaccccgcccagaagagactgtacagaagcatgatgctggagaactaccagagcctggtgagcctgggcctgtgcatcagcaagccctacgtgatcagcctgctggagcagggcagagagccctgggagatgaccagcgagatgaccagaggcggcccaagcagcggcgcccctcctcccagcggcggcagcccagccggctccccaacctctaccgaggagggcacctctgagtccgccacccccgagagcggccctggcacctccaccgagcccagcgagggcagcgcacccggcagccctgccggcagccccacctccacagaggagggaaccagcaccgagcccagcgaaggcagcgccccaggcaccagcaccgagcctagtgagcaggagattaaacggatcaacaagatcagaagaagacttgtgaaagacagcaacaccaagaaggccggcaagacaggccccatgaaaaccctgctggttagagtgatgacacccgatctgagagagcggctggaaaacctgagaaagaagcctgaaaatatcccccagcccatcagcaatacatctagagccaacctgaataagctgctgaccgattacaccgaaatgaagaaggcgatcctgcatgtgtactgggaagagttccagaaggaccctgtgggcctgatgagccgggtggcccagcctgccagcaagaagatcgatcagaacaagctgaaacctgagatggacgagaagggcaacctgaccaccgccggctttgcctgctctcagtgtggccagcccctgttcgtgtacaagctggagcaggtgtctgagaagggcaaggcttacaccaactacttcggacggtgcaatgtggccgagcacgaaaagctgatcctgctggcccagctgaagcccgagaaggatagcgacgaagccgtgacatatagcctgggaaagtttgggcagagggccctggatttctacagcattcatgtgaccaaggagtccacccaccccgtgaagcccctggcccagatcgccggaaacagatacgcctccggacctgtgggaaaggccctgagcgacgcatgtatgggcacaatcgcctccttcctgtctaagtaccaggacatcatcatcgaacaccagaaggtggtgaagggcaaccagaagagactggagagcctgcgggagctggccggcaaggaaaacctggaataccctagcgtgaccctgccacctcagcctcacaccaaggagggcgttgatgcctacaacgaagtgatcgcccgggtgcgaatgtgggtgaacctgaacctgtggcagaagctgaagctaagcagagatgatgccaagcctctgctgagactgaagggattcccttcctttcctctggtcgagagacaggccaacgaagtggactggtgggacatggtgtgtaacgtgaagaagctgatcaacgagaaaaaggaggatggcaaggtgttttggcagaatctggctggctacaagagacaggaagccctgagaccatacctgagcagcgaggaagatcggaagaagggaaagaaattcgctcggtaccagctgggcgacctgctgctgcacctggaaaagaagcacggcgaggactggggaaaggtgtacgacgaggcctgggagcggattgacaagaaagtggaaggcctgagcaagcacatcaagctggaagaggaacggagaagcgaggacgcccagagcaaggccgccctgaccgactggctgcgggctaaggccagcttcgtgatcgagggcctgaaggaggccgacaaggacgagttctgcagatgcgagctgaagctgcagaagtggtacggggacctgcggggaaagcccttcgccatcgaagccgagaacagcatcctggacatcagcggcttcagcaagcagtacaactgtgccttcatctggcagaaggacggcgtgaagaagctgaacctgtacctgatcatcaactacttcaagggcggcaagctgcggttcaagaagatcaaacctgaagccttcgaagccaacagattctacaccgtgatcaacaaaaagagcggcgagatcgtgcccatggaggtgaacttcaacttcgacgaccccaacctgatcatcctgcctctggcctttggcaagagacagggcagagaattcatctggaacgacctgctgtccctggaaaccggcagcctgaagctggccaacggaagagtgatcgagaagacactgtacaacagaagaacccggcaggatgagcctgccctgttcgtggccctgaccttcgagcggcgggaggtcctggactcctccaatatcaaaccaatgaacctgatcggcgtggcaagaggcgaaaacatccccgccgtgatcgccctgaccgaccccgagggctgcccactgagccggtttaaggatagcctgggaaacccaacccacatcctgagaatcggcgagagctataaggagaagcagcggaccatccaggccaagaaggaggtggagcagcggagagccggcggctacagccggaagtacgccagcaaagccaagaatctggcagacgatatggtgagaaacaccgctagagatctgctgtactacgccgtgacccaggatgccatgctgatcttcgccaacctgagccggggcttcggccggcagggcaagcggaccttcatggccgagagacagtacacacggatggaggactggctgaccgccaagctggcctacgagggcctgagcaagacctacctgtccaagacactggcccagtacacctccaagacatgcagcaactgtgggtttaccatcaccagcgccgactacgacagggtgctggagaagctgaagaagacagcaacaggctggatgaccacaattaacggcaaggagctgaaggtggagggccagattacctactacaacagatacaagagacagaacgtagtcaaggacctgtccgtcgagctggatagactgagcgaagaatctgtgaacaacgacatctcctcctggacaaagggcagaagcggagaagctctgagcctcctgaagaaaagattctcccatagacccgtgcaggagaagttcgtgtgcctgaactgcggcttcgagacacacgcagccgagcaagccgccctgaacatcgccagatcctggctgttcctgcggagccaggagtacaagaaataccagacaaacaagacaaccggcaacaccgataagagagccttcgtcgagacctggcagtccttttaccggaagaagcttaaggaggtgtggaaacctgccgtgcggtctggcggatctggcggaggctcctaacgtggaggtggtgaaggtgatgccccaggacctggtgaccttcaaggacgtggccatcgacttcagccaggaggagtggcagtggatgaaccccgcccagaagagactgtacagaagcatgatgctggagaactaccagagcctggtgagcctgggcctgtgcatcagcaagccctacgtgatcagcctgctggagcagggcagagagccctgggagatgaccagcgagatgaccagaggatctggctccggcagcggccccaagaaaaagagaaaagtctaagctgccttctgcggggcttgccttctggccatgcccttcttctctcccttgcacctgtacctcttggtctttgaataaagcctgagtaggaaggctagcaaaaaaaaaaaaaaaaaaaaaaaaaaaaaaaaaaaaaaaaaaaaaaaaaaaaaaaaaaaaaaaaaaaaaaaaaaaaaaaa

SEQ ID NO: 15461 - RNA, 9485 nt, synthetic construct
  source 1..9485: mol_type = other RNA
aggaaataagagagaaaagaagagtaagaagaaatataagagccaccatggcccctaagaagaagcgtaaagtgagccggatggaacgcctcgtctacgaggtgcggcagaagtgcagaaacatcgaggacatctgcatctcctgcggatctctgaacgtgaccctggagcacccactgttcatcggcggcatgtgccagaactgtaaaaactgttttctggagtgtgcctatcaatacgacgatgacggctaccagagctactgcaccatctgttgcggcggaagagaggtgctgatgtgtggaaataacaactgctgccggtgcttctgcgtggaatgcgtggacctgctggtgggccccggcgccgcccaggccgctattaaggaagatccttggaactgctacatgtgcggccacaagggcacatacggcctgctgagacggagagaggactggcctagcagactgcagatgttcttcgccaataaccacgaccaggagttcgacccccctaaggtgtaccctcccgtccccgccgagaagagaaagcccatccgggtcctgagcctgttcgatggcatcgccaccggtctgctggtgctgaaggacctgggcatccaggtggataggtacattgcctccgaggtgtgcgaggactccatcaccgtgggaatggtgcgtcatcagggcaagatcatgtacgtgggcgacgtgcggagcgtgacacagaagcatatccaggagtggggccctttcgacctggtgatcggcggcagcccttgcaatgacctgagcatcgtgaacccagcccggaagggcctgtacgagggaaccggcagactgttcttcgagttttacagactgctgcacgacgcccggcctaaggaaggcgacgaccggcccttcttttggctgttcgagaatgtggtggccatgggagtcagcgacaagcgggatattagccggttcctggagagcaaccccgtgatgatcgatgccaaggaagtgagcgccgcccaccgggccagatacttctggggcaatctgcctggcatgaacagacccctggccagcaccgtgaacgacaagctggagctgcaggagtgcctggagcacggccggatcgccaagttcagcaaggtgagaaccatcaccacccgaagcaacagcatcaaacaaggcaaggaccagcactttcctgtgttcatgaacgagaaggaggacatcctgtggtgtaccgagatggagagagtgttcgggttcccagtccactacacagatgtcagcaacatgtctagactggccagacagagactgctgggaagaagctggtccgtccctgtgatcagacacctgttcgcccctctgaaggagtacttcgcctgcgtgagcagcggcaacagcaacgccaacagccggggccccagcttctctagcggcctggtgccactgtccctgagagggagccacatgggccccatggagatctacaaaaccgtgagcgcctggaagcggcagcctgtgcgcgtgctgagcctgtttcggaatatcgataaagtcctgaaaagcctgggattcctggagagcggctctggctccggcggtggcaccctgaagtacgtggaggatgtgacaaacgtggtcagacgggatgtggagaagtggggccccttcgatctggtgtacggcagcacccaacccctgggcagctcttgtgaccggtgccctggctggtacatgtttcagttccaccggatcctgcagtacgccctgccgagacaggagtcccagcggccattcttttggattttcatggacaacttgctgctgaccgaggatgaccaggaaactaccactcggttcctgcagaccgaagccgtgaccctgcaggacgtgagaggccgggactaccagaacgccatgcgggtgtggtccaacatccctggactgaaaagcaagcacgcacctctgacccctaaagaagaggagtacctgcaggcccaggtgcggagcagaagcaagctggacgcccctaaggtggatctgctggtgaagaattgcctcctgcccctgagagagtacttcaagtatttcagccagaatagtctgcccctgggaggcagcggcggcggcgccctggtgacatttgaggacgtcgccgtgcggttcacccaggaggaatgggctctgctggatccttctcagaaaatcctgtaccgggacgtgatgagagagacataccggaatctgacctccgtgggcatcaactgggaatgttgggaccttgaagcctgcttcagaagcctgggaagaaacctgagagtgcaggtggtgaagagaaagtgcgagctgaccaacagcggcccctgcgccgagggcggcccaagcagcggcgcccctcctcccagcggcggcagcccagccggctccccaacctctaccgaggagggcacctctgagtccgccacccccgagagcggccctggcacctccaccgagcccagcgagggcagcgcacccggcagccctgccggcagccccacctccacagaggagggaaccagcaccgagcccagcgaaggcagcgccccaggcaccagcaccgagcctagtgagcaggagattaaacggatcaacaagatcagaagaagacttgtgaaagacagcaacaccaagaaggccggcaagacaggccccatgaaaaccctgctggttagagtgatgacacccgatctgagagagcggctggaaaacctgagaaagaagcctgaaaatatcccccagcccatcagcaatacatctagagccaacctgaataagctgctgaccgattacaccgaaatgaagaaggcgatcctgcatgtgtactgggaagagttccagaaggaccctgtgggcctgatgagccgggtggcccagcctgccagcaagaagatcgatcagaacaagctgaaacctgagatggacgagaagggcaacctgaccaccgccggctttgcctgctctcagtgtggccagcccctgttcgtgtacaagctggagcaggtgtctgagaagggcaaggcttacaccaactacttcggacggtgcaatgtggccgagcacgaaaagctgatcctgctggcccagctgaagcccgagaaggatagcgacgaagccgtgacatatagcctgggaaagtttgggcagagggccctggatttctacagcattcatgtgaccaaggagtccacccaccccgtgaagcccctggcccagatcgccggaaacagatacgcctccggacctgtgggaaaggccctgagcgacgcatgtatgggcacaatcgcctccttcctgtctaagtaccaggacatcatcatcgaacaccagaaggtggtgaagggcaaccagaagagactggagagcctgcgggagctggccggcaaggaaaacctggaataccctagcgtgaccctgccacctcagcctcacaccaaggagggcgttgatgcctacaacgaagtgatcgcccgggtgcgaatgtgggtgaacctgaacctgtggcagaagctgaagctaagcagagatgatgccaagcctctgctgagactgaagggattcccttcctttcctctggtcgagagacaggccaacgaagtggactggtgggacatggtgtgtaacgtgaagaagctgatcaacgagaaaaaggaggatggcaaggtgttttggcagaatctggctggctacaagagacaggaagccctgagaccatacctgagcagcgaggaagatcggaagaagggaaagaaattcgctcggtaccagctgggcgacctgctgctgcacctggaaaagaagcacggcgaggactggggaaaggtgtacgacgaggcctgggagcggattgacaagaaagtggaaggcctgagcaagcacatcaagctggaagaggaacggagaagcgaggacgcccagagcaaggccgccctgaccgactggctgcgggctaaggccagcttcgtgatcgagggcctgaaggaggccgacaaggacgagttctgcagatgcgagctgaagctgcagaagtggtacggggacctgcggggaaagcccttcgccatcgaagccgagaacagcatcctggacatcagcggcttcagcaagcagtacaactgtgccttcatctggcagaaggacggcgtgaagaagctgaacctgtacctgatcatcaactacttcaagggcggcaagctgcggttcaagaagatcaaacctgaagccttcgaagccaacagattctacaccgtgatcaacaaaaagagcggcgagatcgtgcccatggaggtgaacttcaacttcgacgaccccaacctgatcatcctgcctctggcctttggcaagagacagggcagagaattcatctggaacgacctgctgtccctggaaaccggcagcctgaagctggccaacggaagagtgatcgagaagacactgtacaacagaagaacccggcaggatgagcctgccctgttcgtggccctgaccttcgagcggcgggaggtcctggactcctccaatatcaaaccaatgaacctgatcggcgtggcaagaggcgaaaacatccccgccgtgatcgccctgaccgaccccgagggctgcccactgagccggtttaaggatagcctgggaaacccaacccacatcctgagaatcggcgagagctataaggagaagcagcggaccatccaggccaagaaggaggtggagcagcggagagccggcggctacagccggaagtacgccagcaaagccaagaatctggcagacgatatggtgagaaacaccgctagagatctgctgtactacgccgtgacccaggatgccatgctgatcttcgccaacctgagccggggcttcggccggcagggcaagcggaccttcatggccgagagacagtacacacggatggaggactggctgaccgccaagctggcctacgagggcctgagcaagacctacctgtccaagacactggcccagtacacctccaagacatgcagcaactgtgggtttaccatcaccagcgccgactacgacagggtgctggagaagctgaagaagacagcaacaggctggatgaccacaattaacggcaaggagctgaaggtggagggccagattacctactacaacagatacaagagacagaacgtagtcaaggacctgtccgtcgagctggatagactgagcgaagaatctgtgaacaacgacatctcctcctggacaaagggcagaagcggagaagctctgagcctcctgaagaaaagattctcccatagacccgtgcaggagaagttcgtgtgcctgaactgcggcttcgagacacacgcagccgagcaagccgccctgaacatcgccagatcctggctgttcctgcggagccaggagtacaagaaataccagacaaacaagacaaccggcaacaccgataagagagccttcgtcgagacctggcagtccttttaccggaagaagcttaaggaggtgtggaaacctgccgtgcggtctggcggatctggcggaggctccttccaggagagcgtggccttcgaggacgtggccgtgtacttcacccagaaccagtggggcagcctggaccccgcccagagggccctgtacagcgaggtgatgctggagaactacgccaacgtggccagcctggtggccttccccttccccaagcccgccctgatcagccacctggagaagggcgaggccccctggggccccgacccctgggacgccgagatccccagcggcatcaaccagggcggcggcccaagcagcggcgcccctcctcccagcggcggcagcccagccggctccccaacctctaccgaggagggcacctctgagtccgccacccccgagagcggccctggcacctccaccgagcccagcgagggcagcgcacccggcagccctgccggcagccccacctccacagaggagggaaccagcaccgagcccagcgaaggcagcgccccaggcaccagcaccgagcctagtgagcaggagattaaacggatcaacaagatcagaagaagacttgtgaaagacagcaacaccaagaaggccggcaagacaggccccatgaaaaccctgctggttagagtgatgacacccgatctgagagagcggctggaaaacctgagaaagaagcctgaaaatatcccccagcccatcagcaatacatctagagccaacctgaataagctgctgaccgattacaccgaaatgaagaaggcgatcctgcatgtgtactgggaagagttccagaaggaccctgtgggcctgatgagccgggtggcccagcctgccagcaagaagatcgatcagaacaagctgaaacctgagatggacgagaagggcaacctgaccaccgccggctttgcctgctctcagtgtggccagcccctgttcgtgtacaagctggagcaggtgtctgagaagggcaaggcttacaccaactacttcggacggtgcaatgtggccgagcacgaaaagctgatcctgctggcccagctgaagcccgagaaggatagcgacgaagccgtgacatatagcctgggaaagtttgggcagagggccctggatttctacagcattcatgtgaccaaggagtccacccaccccgtgaagcccctggcccagatcgccggaaacagatacgcctccggacctgtgggaaaggccctgagcgacgcatgtatgggcacaatcgcctccttcctgtctaagtaccaggacatcatcatcgaacaccagaaggtggtgaagggcaaccagaagagactggagagcctgcgggagctggccggcaaggaaaacctggaataccctagcgtgaccctgccacctcagcctcacaccaaggagggcgttgatgcctacaacgaagtgatcgcccgggtgcgaatgtgggtgaacctgaacctgtggcagaagctgaagctaagcagagatgatgccaagcctctgctgagactgaagggattcccttcctttcctctggtcgagagacaggccaacgaagtggactggtgggacatggtgtgtaacgtgaagaagctgatcaacgagaaaaaggaggatggcaaggtgttttggcagaatctggctggctacaagagacaggaagccctgagaccatacctgagcagcgaggaagatcggaagaagggaaagaaattcgctcggtaccagctgggcgacctgctgctgcacctggaaaagaagcacggcgaggactggggaaaggtgtacgacgaggcctgggagcggattgacaagaaagtggaaggcctgagcaagcacatcaagctggaagaggaacggagaagcgaggacgcccagagcaaggccgccctgaccgactggctgcgggctaaggccagcttcgtgatcgagggcctgaaggaggccgacaaggacgagttctgcagatgcgagctgaagctgcagaagtggtacggggacctgcggggaaagcccttcgccatcgaagccgagaacagcatcctggacatcagcggcttcagcaagcagtacaactgtgccttcatctggcagaaggacggcgtgaagaagctgaacctgtacctgatcatcaactacttcaagggcggcaagctgcggttcaagaagatcaaacctgaagccttcgaagccaacagattctacaccgtgatcaacaaaaagagcggcgagatcgtgcccatggaggtgaacttcaacttcgacgaccccaacctgatcatcctgcctctggcctttggcaagagacagggcagagaattcatctggaacgacctgctgtccctggaaaccggcagcctgaagctggccaacggaagagtgatcgagaagacactgtacaacagaagaacccggcaggatgagcctgccctgttcgtggccctgaccttcgagcggcgggaggtcctggactcctccaatatcaaaccaatgaacctgatcggcgtggcaagaggcgaaaacatccccgccgtgatcgccctgaccgaccccgagggctgcccactgagccggtttaaggatagcctgggaaacccaacccacatcctgagaatcggcgagagctataaggagaagcagcggaccatccaggccaagaaggaggtggagcagcggagagccggcggctacagccggaagtacgccagcaaagccaagaatctggcagacgatatggtgagaaacaccgctagagatctgctgtactacgccgtgacccaggatgccatgctgatcttcgccaacctgagccggggcttcggccggcagggcaagcggaccttcatggccgagagacagtacacacggatggaggactggctgaccgccaagctggcctacgagggcctgagcaagacctacctgtccaagacactggcccagtacacctccaagacatgcagcaactgtgggtttaccatcaccagcgccgactacgacagggtgctggagaagctgaagaagacagcaacaggctggatgaccacaattaacggcaaggagctgaaggtggagggccagattacctactacaacagatacaagagacagaacgtagtcaaggacctgtccgtcgagctggatagactgagcgaagaatctgtgaacaacgacatctcctcctggacaaagggcagaagcggagaagctctgagcctcctgaagaaaagattctcccatagacccgtgcaggagaagttcgtgtgcctgaactgcggcttcgagacacacgcagccgagcaagccgccctgaacatcgccagatcctggctgttcctgcggagccaggagtacaagaaataccagacaaacaagacaaccggcaacaccgataagagagccttcgtcgagacctggcagtccttttaccggaagaagcttaaggaggtgtggaaacctgccgtgcggtctggcggatctggcggaggctcctttccaggagagcgtggccttcgaggacgtggccgtgtacttcacccagaaccagtggggcagcctggaccccgcccagagggccctgtacagcgaggtgatgctggagaactacgccaacgtggccagcctggtggccttccccttccccaagcccgccctgatcagccacctggagaagggcgaggccccctggggccccgacccctgggacgccgagatccccagcggcatcaaccagggcggatctggctccggcagcggccccaagaaaaagagaaaagtctaagctgccttctgcggggcttgccttctggccatgcccttcttctctcccttgcacctgtacctcttggtctttgaataaagcctgagtaggaaggctagcaaaaaaaaaaaaaaaaaaaaaaaaaaaaaaaaaaaaaaaaaaaaaaaaaaaaaaaaaaaaaaaaaaaaaaaaaaaaaaaa

SEQ ID NO: 15462 - RNA, 9485 nt, synthetic construct
  source 1..9485: mol_type = other RNA
aggaaataagagagaaaagaagagtaagaagaaatataagagccaccatggcccctaagaagaagcgtaaagtgagccggatggaacgcctcgtctacgaggtgcggcagaagtgcagaaacatcgaggacatctgcatctcctgcggatctctgaacgtgaccctggagcacccactgttcatcggcggcatgtgccagaactgtaaaaactgttttctggagtgtgcctatcaatacgacgatgacggctaccagagctactgcaccatctgttgcggcggaagagaggtgctgatgtgtggaaataacaactgctgccggtgcttctgcgtggaatgcgtggacctgctggtgggccccggcgccgcccaggccgctattaaggaagatccttggaactgctacatgtgcggccacaagggcacatacggcctgctgagacggagagaggactggcctagcagactgcagatgttcttcgccaataaccacgaccaggagttcgacccccctaaggtgtaccctcccgtccccgccgagaagagaaagcccatccgggtcctgagcctgttcgatggcatcgccaccggtctgctggtgctgaaggacctgggcatccaggtggataggtacattgcctccgaggtgtgcgaggactccatcaccgtgggaatggtgcgtcatcagggcaagatcatgtacgtgggcgacgtgcggagcgtgacacagaagcatatccaggagtggggccctttcgacctggtgatcggcggcagcccttgcaatgacctgagcatcgtgaacccagcccggaagggcctgtacgagggaaccggcagactgttcttcgagttttacagactgctgcacgacgcccggcctaaggaaggcgacgaccggcccttcttttggctgttcgagaatgtggtggccatgggagtcagcgacaagcgggatattagccggttcctggagagcaaccccgtgatgatcgatgccaaggaagtgagcgccgcccaccgggccagatacttctggggcaatctgcctggcatgaacagacccctggccagcaccgtgaacgacaagctggagctgcaggagtgcctggagcacggccggatcgccaagttcagcaaggtgagaaccatcaccacccgaagcaacagcatcaaacaaggcaaggaccagcactttcctgtgttcatgaacgagaaggaggacatcctgtggtgtaccgagatggagagagtgttcgggttcccagtccactacacagatgtcagcaacatgtctagactggccagacagagactgctgggaagaagctggtccgtccctgtgatcagacacctgttcgcccctctgaaggagtacttcgcctgcgtgagcagcggcaacagcaacgccaacagccggggccccagcttctctagcggcctggtgccactgtccctgagagggagccacatgggccccatggagatctacaaaaccgtgagcgcctggaagcggcagcctgtgcgcgtgctgagcctgtttcggaatatcgataaagtcctgaaaagcctgggattcctggagagcggctctggctccggcggtggcaccctgaagtacgtggaggatgtgacaaacgtggtcagacgggatgtggagaagtggggccccttcgatctggtgtacggcagcacccaacccctgggcagctcttgtgaccggtgccctggctggtacatgtttcagttccaccggatcctgcagtacgccctgccgagacaggagtcccagcggccattcttttggattttcatggacaacttgctgctgaccgaggatgaccaggaaactaccactcggttcctgcagaccgaagccgtgaccctgcaggacgtgagaggccgggactaccagaacgccatgcgggtgtggtccaacatccctggactgaaaagcaagcacgcacctctgacccctaaagaagaggagtacctgcaggcccaggtgcggagcagaagcaagctggacgcccctaaggtggatctgctggtgaagaattgcctcctgcccctgagagagtacttcaagtatttcagccagaatagtctgcccctgggaggcagcggcggcggcgccctggtgacatttgaggacgtcgccgtgcggttcacccaggaggaatgggctctgctggatccttctcagaaaatcctgtaccgggacgtgatgagagagacataccggaatctgacctccgtgggcatcaactgggaatgttgggaccttgaagcctgcttcagaagcctgggaagaaacctgagagtgcaggtggtgaagagaaagtgcgagctgaccaacagcggcccctgcgccgagggcggcccaagcagcggcgcccctcctcccagcggcggcagcccagccggctccccaacctctaccgaggagggcacctctgagtccgccacccccgagagcggccctggcacctccaccgagcccagcgagggcagcgcacccggcagccctgccggcagccccacctccacagaggagggaaccagcaccgagcccagcgaaggcagcgccccaggcaccagcaccgagcctagtgagcaggagattaaacggatcaacaagatcagaagaagacttgtgaaagacagcaacaccaagaaggccggcaagacaggccccatgaaaaccctgctggttagagtgatgacacccgatctgagagagcggctggaaaacctgagaaagaagcctgaaaatatcccccagcccatcagcaatacatctagagccaacctgaataagctgctgaccgattacaccgaaatgaagaaggcgatcctgcatgtgtactgggaagagttccagaaggaccctgtgggcctgatgagccgggtggcccagcctgccagcaagaagatcgatcagaacaagctgaaacctgagatggacgagaagggcaacctgaccaccgccggctttgcctgctctcagtgtggccagcccctgttcgtgtacaagctggagcaggtgtctgagaagggcaaggcttacaccaactacttcggacggtgcaatgtggccgagcacgaaaagctgatcctgctggcccagctgaagcccgagaaggatagcgacgaagccgtgacatatagcctgggaaagtttgggcagagggccctggatttctacagcattcatgtgaccaaggagtccacccaccccgtgaagcccctggcccagatcgccggaaacagatacgcctccggacctgtgggaaaggccctgagcgacgcatgtatgggcacaatcgcctccttcctgtctaagtaccaggacatcatcatcgaacaccagaaggtggtgaagggcaaccagaagagactggagagcctgcgggagctggccggcaaggaaaacctggaataccctagcgtgaccctgccacctcagcctcacaccaaggagggcgttgatgcctacaacgaagtgatcgcccgggtgcgaatgtgggtgaacctgaacctgtggcagaagctgaagctaagcagagatgatgccaagcctctgctgagactgaagggattcccttcctttcctctggtcgagagacaggccaacgaagtggactggtgggacatggtgtgtaacgtgaagaagctgatcaacgagaaaaaggaggatggcaaggtgttttggcagaatctggctggctacaagagacaggaagccctgagaccatacctgagcagcgaggaagatcggaagaagggaaagaaattcgctcggtaccagctgggcgacctgctgctgcacctggaaaagaagcacggcgaggactggggaaaggtgtacgacgaggcctgggagcggattgacaagaaagtggaaggcctgagcaagcacatcaagctggaagaggaacggagaagcgaggacgcccagagcaaggccgccctgaccgactggctgcgggctaaggccagcttcgtgatcgagggcctgaaggaggccgacaaggacgagttctgcagatgcgagctgaagctgcagaagtggtacggggacctgcggggaaagcccttcgccatcgaagccgagaacagcatcctggacatcagcggcttcagcaagcagtacaactgtgccttcatctggcagaaggacggcgtgaagaagctgaacctgtacctgatcatcaactacttcaagggcggcaagctgcggttcaagaagatcaaacctgaagccttcgaagccaacagattctacaccgtgatcaacaaaaagagcggcgagatcgtgcccatggaggtgaacttcaacttcgacgaccccaacctgatcatcctgcctctggcctttggcaagagacagggcagagaattcatctggaacgacctgctgtccctggaaaccggcagcctgaagctggccaacggaagagtgatcgagaagacactgtacaacagaagaacccggcaggatgagcctgccctgttcgtggccctgaccttcgagcggcgggaggtcctggactcctccaatatcaaaccaatgaacctgatcggcgtggcaagaggcgaaaacatccccgccgtgatcgccctgaccgaccccgagggctgcccactgagccggtttaaggatagcctgggaaacccaacccacatcctgagaatcggcgagagctataaggagaagcagcggaccatccaggccaagaaggaggtggagcagcggagagccggcggctacagccggaagtacgccagcaaagccaagaatctggcagacgatatggtgagaaacaccgctagagatctgctgtactacgccgtgacccaggatgccatgctgatcttcgccaacctgagccggggcttcggccggcagggcaagcggaccttcatggccgagagacagtacacacggatggaggactggctgaccgccaagctggcctacgagggcctgagcaagacctacctgtccaagacactggcccagtacacctccaagacatgcagcaactgtgggtttaccatcaccagcgccgactacgacagggtgctggagaagctgaagaagacagcaacaggctggatgaccacaattaacggcaaggagctgaaggtggagggccagattacctactacaacagatacaagagacagaacgtagtcaaggacctgtccgtcgagctggatagactgagcgaagaatctgtgaacaacgacatctcctcctggacaaagggcagaagcggagaagctctgagcctcctgaagaaaagattctcccatagacccgtgcaggagaagttcgtgtgcctgaactgcggcttcgagacacacgcagccgagcaagccgccctgaacatcgccagatcctggctgttcctgcggagccaggagtacaagaaataccagacaaacaagacaaccggcaacaccgataagagagccttcgtcgagacctggcagtccttttaccggaagaagcttaaggaggtgtggaaacctgccgtgcggtctggcggatctggcggaggctccccccagaagagcgtgaccttcgaggacgtggccgtgtacttcacccaggccgagtgggacggcctgagccccgcccagaggaccctgtacagggacgtgatgctggagaactacggcaacgtggccagcctgggcttccccctgctgaagcccgccgtgatcagccagctggagggcggcggcgagctgggcggccccagccccctggccgccggcaccggcctgaggggcctgtggaccgtgggcggcccaagcagcggcgcccctcctcccagcggcggcagcccagccggctccccaacctctaccgaggagggcacctctgagtccgccacccccgagagcggccctggcacctccaccgagcccagcgagggcagcgcacccggcagccctgccggcagccccacctccacagaggagggaaccagcaccgagcccagcgaaggcagcgccccaggcaccagcaccgagcctagtgagcaggagattaaacggatcaacaagatcagaagaagacttgtgaaagacagcaacaccaagaaggccggcaagacaggccccatgaaaaccctgctggttagagtgatgacacccgatctgagagagcggctggaaaacctgagaaagaagcctgaaaatatcccccagcccatcagcaatacatctagagccaacctgaataagctgctgaccgattacaccgaaatgaagaaggcgatcctgcatgtgtactgggaagagttccagaaggaccctgtgggcctgatgagccgggtggcccagcctgccagcaagaagatcgatcagaacaagctgaaacctgagatggacgagaagggcaacctgaccaccgccggctttgcctgctctcagtgtggccagcccctgttcgtgtacaagctggagcaggtgtctgagaagggcaaggcttacaccaactacttcggacggtgcaatgtggccgagcacgaaaagctgatcctgctggcccagctgaagcccgagaaggatagcgacgaagccgtgacatatagcctgggaaagtttgggcagagggccctggatttctacagcattcatgtgaccaaggagtccacccaccccgtgaagcccctggcccagatcgccggaaacagatacgcctccggacctgtgggaaaggccctgagcgacgcatgtatgggcacaatcgcctccttcctgtctaagtaccaggacatcatcatcgaacaccagaaggtggtgaagggcaaccagaagagactggagagcctgcgggagctggccggcaaggaaaacctggaataccctagcgtgaccctgccacctcagcctcacaccaaggagggcgttgatgcctacaacgaagtgatcgcccgggtgcgaatgtgggtgaacctgaacctgtggcagaagctgaagctaagcagagatgatgccaagcctctgctgagactgaagggattcccttcctttcctctggtcgagagacaggccaacgaagtggactggtgggacatggtgtgtaacgtgaagaagctgatcaacgagaaaaaggaggatggcaaggtgttttggcagaatctggctggctacaagagacaggaagccctgagaccatacctgagcagcgaggaagatcggaagaagggaaagaaattcgctcggtaccagctgggcgacctgctgctgcacctggaaaagaagcacggcgaggactggggaaaggtgtacgacgaggcctgggagcggattgacaagaaagtggaaggcctgagcaagcacatcaagctggaagaggaacggagaagcgaggacgcccagagcaaggccgccctgaccgactggctgcgggctaaggccagcttcgtgatcgagggcctgaaggaggccgacaaggacgagttctgcagatgcgagctgaagctgcagaagtggtacggggacctgcggggaaagcccttcgccatcgaagccgagaacagcatcctggacatcagcggcttcagcaagcagtacaactgtgccttcatctggcagaaggacggcgtgaagaagctgaacctgtacctgatcatcaactacttcaagggcggcaagctgcggttcaagaagatcaaacctgaagccttcgaagccaacagattctacaccgtgatcaacaaaaagagcggcgagatcgtgcccatggaggtgaacttcaacttcgacgaccccaacctgatcatcctgcctctggcctttggcaagagacagggcagagaattcatctggaacgacctgctgtccctggaaaccggcagcctgaagctggccaacggaagagtgatcgagaagacactgtacaacagaagaacccggcaggatgagcctgccctgttcgtggccctgaccttcgagcggcgggaggtcctggactcctccaatatcaaaccaatgaacctgatcggcgtggcaagaggcgaaaacatccccgccgtgatcgccctgaccgaccccgagggctgcccactgagccggtttaaggatagcctgggaaacccaacccacatcctgagaatcggcgagagctataaggagaagcagcggaccatccaggccaagaaggaggtggagcagcggagagccggcggctacagccggaagtacgccagcaaagccaagaatctggcagacgatatggtgagaaacaccgctagagatctgctgtactacgccgtgacccaggatgccatgctgatcttcgccaacctgagccggggcttcggccggcagggcaagcggaccttcatggccgagagacagtacacacggatggaggactggctgaccgccaagctggcctacgagggcctgagcaagacctacctgtccaagacactggcccagtacacctccaagacatgcagcaactgtgggtttaccatcaccagcgccgactacgacagggtgctggagaagctgaagaagacagcaacaggctggatgaccacaattaacggcaaggagctgaaggtggagggccagattacctactacaacagatacaagagacagaacgtagtcaaggacctgtccgtcgagctggatagactgagcgaagaatctgtgaacaacgacatctcctcctggacaaagggcagaagcggagaagctctgagcctcctgaagaaaagattctcccatagacccgtgcaggagaagttcgtgtgcctgaactgcggcttcgagacacacgcagccgagcaagccgccctgaacatcgccagatcctggctgttcctgcggagccaggagtacaagaaataccagacaaacaagacaaccggcaacaccgataagagagccttcgtcgagacctggcagtccttttaccggaagaagcttaaggaggtgtggaaacctgccgtgcggtctggcggatctggcggaggctcctccccagaagagcgtgaccttcgaggacgtggccgtgtacttcacccaggccgagtgggacggcctgagccccgcccagaggaccctgtacagggacgtgatgctggagaactacggcaacgtggccagcctgggcttccccctgctgaagcccgccgtgatcagccagctggagggcggcggcgagctgggcggccccagccccctggccgccggcaccggcctgaggggcctgtggaccgtgggatctggctccggcagcggccccaagaaaaagagaaaagtctaagctgccttctgcggggcttgccttctggccatgcccttcttctctcccttgcacctgtacctcttggtctttgaataaagcctgagtaggaaggctagcaaaaaaaaaaaaaaaaaaaaaaaaaaaaaaaaaaaaaaaaaaaaaaaaaaaaaaaaaaaaaaaaaaaaaaaaaaaaaaaa

SEQ ID NO: 15463 - RNA, 9485 nt, synthetic construct
  source 1..9485: mol_type = other RNA
aggaaataagagagaaaagaagagtaagaagaaatataagagccaccatggcccctaagaagaagcgtaaagtgagccggatggaacgcctcgtctacgaggtgcggcagaagtgcagaaacatcgaggacatctgcatctcctgcggatctctgaacgtgaccctggagcacccactgttcatcggcggcatgtgccagaactgtaaaaactgttttctggagtgtgcctatcaatacgacgatgacggctaccagagctactgcaccatctgttgcggcggaagagaggtgctgatgtgtggaaataacaactgctgccggtgcttctgcgtggaatgcgtggacctgctggtgggccccggcgccgcccaggccgctattaaggaagatccttggaactgctacatgtgcggccacaagggcacatacggcctgctgagacggagagaggactggcctagcagactgcagatgttcttcgccaataaccacgaccaggagttcgacccccctaaggtgtaccctcccgtccccgccgagaagagaaagcccatccgggtcctgagcctgttcgatggcatcgccaccggtctgctggtgctgaaggacctgggcatccaggtggataggtacattgcctccgaggtgtgcgaggactccatcaccgtgggaatggtgcgtcatcagggcaagatcatgtacgtgggcgacgtgcggagcgtgacacagaagcatatccaggagtggggccctttcgacctggtgatcggcggcagcccttgcaatgacctgagcatcgtgaacccagcccggaagggcctgtacgagggaaccggcagactgttcttcgagttttacagactgctgcacgacgcccggcctaaggaaggcgacgaccggcccttcttttggctgttcgagaatgtggtggccatgggagtcagcgacaagcgggatattagccggttcctggagagcaaccccgtgatgatcgatgccaaggaagtgagcgccgcccaccgggccagatacttctggggcaatctgcctggcatgaacagacccctggccagcaccgtgaacgacaagctggagctgcaggagtgcctggagcacggccggatcgccaagttcagcaaggtgagaaccatcaccacccgaagcaacagcatcaaacaaggcaaggaccagcactttcctgtgttcatgaacgagaaggaggacatcctgtggtgtaccgagatggagagagtgttcgggttcccagtccactacacagatgtcagcaacatgtctagactggccagacagagactgctgggaagaagctggtccgtccctgtgatcagacacctgttcgcccctctgaaggagtacttcgcctgcgtgagcagcggcaacagcaacgccaacagccggggccccagcttctctagcggcctggtgccactgtccctgagagggagccacatgggccccatggagatctacaaaaccgtgagcgcctggaagcggcagcctgtgcgcgtgctgagcctgtttcggaatatcgataaagtcctgaaaagcctgggattcctggagagcggctctggctccggcggtggcaccctgaagtacgtggaggatgtgacaaacgtggtcagacgggatgtggagaagtggggccccttcgatctggtgtacggcagcacccaacccctgggcagctcttgtgaccggtgccctggctggtacatgtttcagttccaccggatcctgcagtacgccctgccgagacaggagtcccagcggccattcttttggattttcatggacaacttgctgctgaccgaggatgaccaggaaactaccactcggttcctgcagaccgaagccgtgaccctgcaggacgtgagaggccgggactaccagaacgccatgcgggtgtggtccaacatccctggactgaaaagcaagcacgcacctctgacccctaaagaagaggagtacctgcaggcccaggtgcggagcagaagcaagctggacgcccctaaggtggatctgctggtgaagaattgcctcctgcccctgagagagtacttcaagtatttcagccagaatagtctgcccctgggaggcagcggcggcggcgccctggtgacatttgaggacgtcgccgtgcggttcacccaggaggaatgggctctgctggatccttctcagaaaatcctgtaccgggacgtgatgagagagacataccggaatctgacctccgtgggcatcaactgggaatgttgggaccttgaagcctgcttcagaagcctgggaagaaacctgagagtgcaggtggtgaagagaaagtgcgagctgaccaacagcggcccctgcgccgagggcggcccaagcagcggcgcccctcctcccagcggcggcagcccagccggctccccaacctctaccgaggagggcacctctgagtccgccacccccgagagcggccctggcacctccaccgagcccagcgagggcagcgcacccggcagccctgccggcagccccacctccacagaggagggaaccagcaccgagcccagcgaaggcagcgccccaggcaccagcaccgagcctagtgagcaggagattaaacggatcaacaagatcagaagaagacttgtgaaagacagcaacaccaagaaggccggcaagacaggccccatgaaaaccctgctggttagagtgatgacacccgatctgagagagcggctggaaaacctgagaaagaagcctgaaaatatcccccagcccatcagcaatacatctagagccaacctgaataagctgctgaccgattacaccgaaatgaagaaggcgatcctgcatgtgtactgggaagagttccagaaggaccctgtgggcctgatgagccgggtggcccagcctgccagcaagaagatcgatcagaacaagctgaaacctgagatggacgagaagggcaacctgaccaccgccggctttgcctgctctcagtgtggccagcccctgttcgtgtacaagctggagcaggtgtctgagaagggcaaggcttacaccaactacttcggacggtgcaatgtggccgagcacgaaaagctgatcctgctggcccagctgaagcccgagaaggatagcgacgaagccgtgacatatagcctgggaaagtttgggcagagggccctggatttctacagcattcatgtgaccaaggagtccacccaccccgtgaagcccctggcccagatcgccggaaacagatacgcctccggacctgtgggaaaggccctgagcgacgcatgtatgggcacaatcgcctccttcctgtctaagtaccaggacatcatcatcgaacaccagaaggtggtgaagggcaaccagaagagactggagagcctgcgggagctggccggcaaggaaaacctggaataccctagcgtgaccctgccacctcagcctcacaccaaggagggcgttgatgcctacaacgaagtgatcgcccgggtgcgaatgtgggtgaacctgaacctgtggcagaagctgaagctaagcagagatgatgccaagcctctgctgagactgaagggattcccttcctttcctctggtcgagagacaggccaacgaagtggactggtgggacatggtgtgtaacgtgaagaagctgatcaacgagaaaaaggaggatggcaaggtgttttggcagaatctggctggctacaagagacaggaagccctgagaccatacctgagcagcgaggaagatcggaagaagggaaagaaattcgctcggtaccagctgggcgacctgctgctgcacctggaaaagaagcacggcgaggactggggaaaggtgtacgacgaggcctgggagcggattgacaagaaagtggaaggcctgagcaagcacatcaagctggaagaggaacggagaagcgaggacgcccagagcaaggccgccctgaccgactggctgcgggctaaggccagcttcgtgatcgagggcctgaaggaggccgacaaggacgagttctgcagatgcgagctgaagctgcagaagtggtacggggacctgcggggaaagcccttcgccatcgaagccgagaacagcatcctggacatcagcggcttcagcaagcagtacaactgtgccttcatctggcagaaggacggcgtgaagaagctgaacctgtacctgatcatcaactacttcaagggcggcaagctgcggttcaagaagatcaaacctgaagccttcgaagccaacagattctacaccgtgatcaacaaaaagagcggcgagatcgtgcccatggaggtgaacttcaacttcgacgaccccaacctgatcatcctgcctctggcctttggcaagagacagggcagagaattcatctggaacgacctgctgtccctggaaaccggcagcctgaagctggccaacggaagagtgatcgagaagacactgtacaacagaagaacccggcaggatgagcctgccctgttcgtggccctgaccttcgagcggcgggaggtcctggactcctccaatatcaaaccaatgaacctgatcggcgtggcaagaggcgaaaacatccccgccgtgatcgccctgaccgaccccgagggctgcccactgagccggtttaaggatagcctgggaaacccaacccacatcctgagaatcggcgagagctataaggagaagcagcggaccatccaggccaagaaggaggtggagcagcggagagccggcggctacagccggaagtacgccagcaaagccaagaatctggcagacgatatggtgagaaacaccgctagagatctgctgtactacgccgtgacccaggatgccatgctgatcttcgccaacctgagccggggcttcggccggcagggcaagcggaccttcatggccgagagacagtacacacggatggaggactggctgaccgccaagctggcctacgagggcctgagcaagacctacctgtccaagacactggcccagtacacctccaagacatgcagcaactgtgggtttaccatcaccagcgccgactacgacagggtgctggagaagctgaagaagacagcaacaggctggatgaccacaattaacggcaaggagctgaaggtggagggccagattacctactacaacagatacaagagacagaacgtagtcaaggacctgtccgtcgagctggatagactgagcgaagaatctgtgaacaacgacatctcctcctggacaaagggcagaagcggagaagctctgagcctcctgaagaaaagattctcccatagacccgtgcaggagaagttcgtgtgcctgaactgcggcttcgagacacacgcagccgagcaagccgccctgaacatcgccagatcctggctgttcctgcggagccaggagtacaagaaataccagacaaacaagacaaccggcaacaccgataagagagccttcgtcgagacctggcagtccttttaccggaagaagcttaaggaggtgtggaaacctgccgtgcggtctggcggatctggcggaggctccatggccttcgaggacgtggccgtgtacttcagccaggaggagtgggtgttcctggacgccgcccagagggccctgtacaggcacgtgatgctggagaacttcgccctggtggacagcatcggcctgagcatcagcaggcccagggtgatcatccagctgcagaggggcgaggagccctgggtgagcaacaggaccaacaccggccccggcaggggcaccaggaggaggcccagcctgggcagcggcggcccaagcagcggcgcccctcctcccagcggcggcagcccagccggctccccaacctctaccgaggagggcacctctgagtccgccacccccgagagcggccctggcacctccaccgagcccagcgagggcagcgcacccggcagccctgccggcagccccacctccacagaggagggaaccagcaccgagcccagcgaaggcagcgccccaggcaccagcaccgagcctagtgagcaggagattaaacggatcaacaagatcagaagaagacttgtgaaagacagcaacaccaagaaggccggcaagacaggccccatgaaaaccctgctggttagagtgatgacacccgatctgagagagcggctggaaaacctgagaaagaagcctgaaaatatcccccagcccatcagcaatacatctagagccaacctgaataagctgctgaccgattacaccgaaatgaagaaggcgatcctgcatgtgtactgggaagagttccagaaggaccctgtgggcctgatgagccgggtggcccagcctgccagcaagaagatcgatcagaacaagctgaaacctgagatggacgagaagggcaacctgaccaccgccggctttgcctgctctcagtgtggccagcccctgttcgtgtacaagctggagcaggtgtctgagaagggcaaggcttacaccaactacttcggacggtgcaatgtggccgagcacgaaaagctgatcctgctggcccagctgaagcccgagaaggatagcgacgaagccgtgacatatagcctgggaaagtttgggcagagggccctggatttctacagcattcatgtgaccaaggagtccacccaccccgtgaagcccctggcccagatcgccggaaacagatacgcctccggacctgtgggaaaggccctgagcgacgcatgtatgggcacaatcgcctccttcctgtctaagtaccaggacatcatcatcgaacaccagaaggtggtgaagggcaaccagaagagactggagagcctgcgggagctggccggcaaggaaaacctggaataccctagcgtgaccctgccacctcagcctcacaccaaggagggcgttgatgcctacaacgaagtgatcgcccgggtgcgaatgtgggtgaacctgaacctgtggcagaagctgaagctaagcagagatgatgccaagcctctgctgagactgaagggattcccttcctttcctctggtcgagagacaggccaacgaagtggactggtgggacatggtgtgtaacgtgaagaagctgatcaacgagaaaaaggaggatggcaaggtgttttggcagaatctggctggctacaagagacaggaagccctgagaccatacctgagcagcgaggaagatcggaagaagggaaagaaattcgctcggtaccagctgggcgacctgctgctgcacctggaaaagaagcacggcgaggactggggaaaggtgtacgacgaggcctgggagcggattgacaagaaagtggaaggcctgagcaagcacatcaagctggaagaggaacggagaagcgaggacgcccagagcaaggccgccctgaccgactggctgcgggctaaggccagcttcgtgatcgagggcctgaaggaggccgacaaggacgagttctgcagatgcgagctgaagctgcagaagtggtacggggacctgcggggaaagcccttcgccatcgaagccgagaacagcatcctggacatcagcggcttcagcaagcagtacaactgtgccttcatctggcagaaggacggcgtgaagaagctgaacctgtacctgatcatcaactacttcaagggcggcaagctgcggttcaagaagatcaaacctgaagccttcgaagccaacagattctacaccgtgatcaacaaaaagagcggcgagatcgtgcccatggaggtgaacttcaacttcgacgaccccaacctgatcatcctgcctctggcctttggcaagagacagggcagagaattcatctggaacgacctgctgtccctggaaaccggcagcctgaagctggccaacggaagagtgatcgagaagacactgtacaacagaagaacccggcaggatgagcctgccctgttcgtggccctgaccttcgagcggcgggaggtcctggactcctccaatatcaaaccaatgaacctgatcggcgtggcaagaggcgaaaacatccccgccgtgatcgccctgaccgaccccgagggctgcccactgagccggtttaaggatagcctgggaaacccaacccacatcctgagaatcggcgagagctataaggagaagcagcggaccatccaggccaagaaggaggtggagcagcggagagccggcggctacagccggaagtacgccagcaaagccaagaatctggcagacgatatggtgagaaacaccgctagagatctgctgtactacgccgtgacccaggatgccatgctgatcttcgccaacctgagccggggcttcggccggcagggcaagcggaccttcatggccgagagacagtacacacggatggaggactggctgaccgccaagctggcctacgagggcctgagcaagacctacctgtccaagacactggcccagtacacctccaagacatgcagcaactgtgggtttaccatcaccagcgccgactacgacagggtgctggagaagctgaagaagacagcaacaggctggatgaccacaattaacggcaaggagctgaaggtggagggccagattacctactacaacagatacaagagacagaacgtagtcaaggacctgtccgtcgagctggatagactgagcgaagaatctgtgaacaacgacatctcctcctggacaaagggcagaagcggagaagctctgagcctcctgaagaaaagattctcccatagacccgtgcaggagaagttcgtgtgcctgaactgcggcttcgagacacacgcagccgagcaagccgccctgaacatcgccagatcctggctgttcctgcggagccaggagtacaagaaataccagacaaacaagacaaccggcaacaccgataagagagccttcgtcgagacctggcagtccttttaccggaagaagcttaaggaggtgtggaaacctgccgtgcggtctggcggatctggcggaggctcctatggccttcgaggacgtggccgtgtacttcagccaggaggagtgggtgttcctggacgccgcccagagggccctgtacaggcacgtgatgctggagaacttcgccctggtggacagcatcggcctgagcatcagcaggcccagggtgatcatccagctgcagaggggcgaggagccctgggtgagcaacaggaccaacaccggccccggcaggggcaccaggaggaggcccagcctgggcagcggatctggctccggcagcggccccaagaaaaagagaaaagtctaagctgccttctgcggggcttgccttctggccatgcccttcttctctcccttgcacctgtacctcttggtctttgaataaagcctgagtaggaaggctagcaaaaaaaaaaaaaaaaaaaaaaaaaaaaaaaaaaaaaaaaaaaaaaaaaaaaaaaaaaaaaaaaaaaaaaaaaaaaaaaa

SEQ ID NO: 15464 - RNA, 9485 nt, synthetic construct
  source 1..9485: mol_type = other RNA
aggaaataagagagaaaagaagagtaagaagaaatataagagccaccatggcccctaagaagaagcgtaaagtgagccggatggaacgcctcgtctacgaggtgcggcagaagtgcagaaacatcgaggacatctgcatctcctgcggatctctgaacgtgaccctggagcacccactgttcatcggcggcatgtgccagaactgtaaaaactgttttctggagtgtgcctatcaatacgacgatgacggctaccagagctactgcaccatctgttgcggcggaagagaggtgctgatgtgtggaaataacaactgctgccggtgcttctgcgtggaatgcgtggacctgctggtgggccccggcgccgcccaggccgctattaaggaagatccttggaactgctacatgtgcggccacaagggcacatacggcctgctgagacggagagaggactggcctagcagactgcagatgttcttcgccaataaccacgaccaggagttcgacccccctaaggtgtaccctcccgtccccgccgagaagagaaagcccatccgggtcctgagcctgttcgatggcatcgccaccggtctgctggtgctgaaggacctgggcatccaggtggataggtacattgcctccgaggtgtgcgaggactccatcaccgtgggaatggtgcgtcatcagggcaagatcatgtacgtgggcgacgtgcggagcgtgacacagaagcatatccaggagtggggccctttcgacctggtgatcggcggcagcccttgcaatgacctgagcatcgtgaacccagcccggaagggcctgtacgagggaaccggcagactgttcttcgagttttacagactgctgcacgacgcccggcctaaggaaggcgacgaccggcccttcttttggctgttcgagaatgtggtggccatgggagtcagcgacaagcgggatattagccggttcctggagagcaaccccgtgatgatcgatgccaaggaagtgagcgccgcccaccgggccagatacttctggggcaatctgcctggcatgaacagacccctggccagcaccgtgaacgacaagctggagctgcaggagtgcctggagcacggccggatcgccaagttcagcaaggtgagaaccatcaccacccgaagcaacagcatcaaacaaggcaaggaccagcactttcctgtgttcatgaacgagaaggaggacatcctgtggtgtaccgagatggagagagtgttcgggttcccagtccactacacagatgtcagcaacatgtctagactggccagacagagactgctgggaagaagctggtccgtccctgtgatcagacacctgttcgcccctctgaaggagtacttcgcctgcgtgagcagcggcaacagcaacgccaacagccggggccccagcttctctagcggcctggtgccactgtccctgagagggagccacatgggccccatggagatctacaaaaccgtgagcgcctggaagcggcagcctgtgcgcgtgctgagcctgtttcggaatatcgataaagtcctgaaaagcctgggattcctggagagcggctctggctccggcggtggcaccctgaagtacgtggaggatgtgacaaacgtggtcagacgggatgtggagaagtggggccccttcgatctggtgtacggcagcacccaacccctgggcagctcttgtgaccggtgccctggctggtacatgtttcagttccaccggatcctgcagtacgccctgccgagacaggagtcccagcggccattcttttggattttcatggacaacttgctgctgaccgaggatgaccaggaaactaccactcggttcctgcagaccgaagccgtgaccctgcaggacgtgagaggccgggactaccagaacgccatgcgggtgtggtccaacatccctggactgaaaagcaagcacgcacctctgacccctaaagaagaggagtacctgcaggcccaggtgcggagcagaagcaagctggacgcccctaaggtggatctgctggtgaagaattgcctcctgcccctgagagagtacttcaagtatttcagccagaatagtctgcccctgggaggcagcggcggcggcgccctggtgacatttgaggacgtcgccgtgcggttcacccaggaggaatgggctctgctggatccttctcagaaaatcctgtaccgggacgtgatgagagagacataccggaatctgacctccgtgggcatcaactgggaatgttgggaccttgaagcctgcttcagaagcctgggaagaaacctgagagtgcaggtggtgaagagaaagtgcgagctgaccaacagcggcccctgcgccgagggcggcccaagcagcggcgcccctcctcccagcggcggcagcccagccggctccccaacctctaccgaggagggcacctctgagtccgccacccccgagagcggccctggcacctccaccgagcccagcgagggcagcgcacccggcagccctgccggcagccccacctccacagaggagggaaccagcaccgagcccagcgaaggcagcgccccaggcaccagcaccgagcctagtgagcaggagattaaacggatcaacaagatcagaagaagacttgtgaaagacagcaacaccaagaaggccggcaagacaggccccatgaaaaccctgctggttagagtgatgacacccgatctgagagagcggctggaaaacctgagaaagaagcctgaaaatatcccccagcccatcagcaatacatctagagccaacctgaataagctgctgaccgattacaccgaaatgaagaaggcgatcctgcatgtgtactgggaagagttccagaaggaccctgtgggcctgatgagccgggtggcccagcctgccagcaagaagatcgatcagaacaagctgaaacctgagatggacgagaagggcaacctgaccaccgccggctttgcctgctctcagtgtggccagcccctgttcgtgtacaagctggagcaggtgtctgagaagggcaaggcttacaccaactacttcggacggtgcaatgtggccgagcacgaaaagctgatcctgctggcccagctgaagcccgagaaggatagcgacgaagccgtgacatatagcctgggaaagtttgggcagagggccctggatttctacagcattcatgtgaccaaggagtccacccaccccgtgaagcccctggcccagatcgccggaaacagatacgcctccggacctgtgggaaaggccctgagcgacgcatgtatgggcacaatcgcctccttcctgtctaagtaccaggacatcatcatcgaacaccagaaggtggtgaagggcaaccagaagagactggagagcctgcgggagctggccggcaaggaaaacctggaataccctagcgtgaccctgccacctcagcctcacaccaaggagggcgttgatgcctacaacgaagtgatcgcccgggtgcgaatgtgggtgaacctgaacctgtggcagaagctgaagctaagcagagatgatgccaagcctctgctgagactgaagggattcccttcctttcctctggtcgagagacaggccaacgaagtggactggtgggacatggtgtgtaacgtgaagaagctgatcaacgagaaaaaggaggatggcaaggtgttttggcagaatctggctggctacaagagacaggaagccctgagaccatacctgagcagcgaggaagatcggaagaagggaaagaaattcgctcggtaccagctgggcgacctgctgctgcacctggaaaagaagcacggcgaggactggggaaaggtgtacgacgaggcctgggagcggattgacaagaaagtggaaggcctgagcaagcacatcaagctggaagaggaacggagaagcgaggacgcccagagcaaggccgccctgaccgactggctgcgggctaaggccagcttcgtgatcgagggcctgaaggaggccgacaaggacgagttctgcagatgcgagctgaagctgcagaagtggtacggggacctgcggggaaagcccttcgccatcgaagccgagaacagcatcctggacatcagcggcttcagcaagcagtacaactgtgccttcatctggcagaaggacggcgtgaagaagctgaacctgtacctgatcatcaactacttcaagggcggcaagctgcggttcaagaagatcaaacctgaagccttcgaagccaacagattctacaccgtgatcaacaaaaagagcggcgagatcgtgcccatggaggtgaacttcaacttcgacgaccccaacctgatcatcctgcctctggcctttggcaagagacagggcagagaattcatctggaacgacctgctgtccctggaaaccggcagcctgaagctggccaacggaagagtgatcgagaagacactgtacaacagaagaacccggcaggatgagcctgccctgttcgtggccctgaccttcgagcggcgggaggtcctggactcctccaatatcaaaccaatgaacctgatcggcgtggcaagaggcgaaaacatccccgccgtgatcgccctgaccgaccccgagggctgcccactgagccggtttaaggatagcctgggaaacccaacccacatcctgagaatcggcgagagctataaggagaagcagcggaccatccaggccaagaaggaggtggagcagcggagagccggcggctacagccggaagtacgccagcaaagccaagaatctggcagacgatatggtgagaaacaccgctagagatctgctgtactacgccgtgacccaggatgccatgctgatcttcgccaacctgagccggggcttcggccggcagggcaagcggaccttcatggccgagagacagtacacacggatggaggactggctgaccgccaagctggcctacgagggcctgagcaagacctacctgtccaagacactggcccagtacacctccaagacatgcagcaactgtgggtttaccatcaccagcgccgactacgacagggtgctggagaagctgaagaagacagcaacaggctggatgaccacaattaacggcaaggagctgaaggtggagggccagattacctactacaacagatacaagagacagaacgtagtcaaggacctgtccgtcgagctggatagactgagcgaagaatctgtgaacaacgacatctcctcctggacaaagggcagaagcggagaagctctgagcctcctgaagaaaagattctcccatagacccgtgcaggagaagttcgtgtgcctgaactgcggcttcgagacacacgcagccgagcaagccgccctgaacatcgccagatcctggctgttcctgcggagccaggagtacaagaaataccagacaaacaagacaaccggcaacaccgataagagagccttcgtcgagacctggcagtccttttaccggaagaagcttaaggaggtgtggaaacctgccgtgcggtctggcggatctggcggaggctccgcccacggcagcgtgatgttcaacgacgtgagcatcgtgttcagccaggaggagtgggagtacctggacctggagcagagggacctgtacagggacgtgatgctggagaactacagcaacctggtgagcctgggctgcttcatcagcaagcccgacgtgatcagcctgctggagcagggcaaggagccctggaaggtggtgaggaagggcaggaggcagtaccccgacctggagaccaggtacggcggcccaagcagcggcgcccctcctcccagcggcggcagcccagccggctccccaacctctaccgaggagggcacctctgagtccgccacccccgagagcggccctggcacctccaccgagcccagcgagggcagcgcacccggcagccctgccggcagccccacctccacagaggagggaaccagcaccgagcccagcgaaggcagcgccccaggcaccagcaccgagcctagtgagcaggagattaaacggatcaacaagatcagaagaagacttgtgaaagacagcaacaccaagaaggccggcaagacaggccccatgaaaaccctgctggttagagtgatgacacccgatctgagagagcggctggaaaacctgagaaagaagcctgaaaatatcccccagcccatcagcaatacatctagagccaacctgaataagctgctgaccgattacaccgaaatgaagaaggcgatcctgcatgtgtactgggaagagttccagaaggaccctgtgggcctgatgagccgggtggcccagcctgccagcaagaagatcgatcagaacaagctgaaacctgagatggacgagaagggcaacctgaccaccgccggctttgcctgctctcagtgtggccagcccctgttcgtgtacaagctggagcaggtgtctgagaagggcaaggcttacaccaactacttcggacggtgcaatgtggccgagcacgaaaagctgatcctgctggcccagctgaagcccgagaaggatagcgacgaagccgtgacatatagcctgggaaagtttgggcagagggccctggatttctacagcattcatgtgaccaaggagtccacccaccccgtgaagcccctggcccagatcgccggaaacagatacgcctccggacctgtgggaaaggccctgagcgacgcatgtatgggcacaatcgcctccttcctgtctaagtaccaggacatcatcatcgaacaccagaaggtggtgaagggcaaccagaagagactggagagcctgcgggagctggccggcaaggaaaacctggaataccctagcgtgaccctgccacctcagcctcacaccaaggagggcgttgatgcctacaacgaagtgatcgcccgggtgcgaatgtgggtgaacctgaacctgtggcagaagctgaagctaagcagagatgatgccaagcctctgctgagactgaagggattcccttcctttcctctggtcgagagacaggccaacgaagtggactggtgggacatggtgtgtaacgtgaagaagctgatcaacgagaaaaaggaggatggcaaggtgttttggcagaatctggctggctacaagagacaggaagccctgagaccatacctgagcagcgaggaagatcggaagaagggaaagaaattcgctcggtaccagctgggcgacctgctgctgcacctggaaaagaagcacggcgaggactggggaaaggtgtacgacgaggcctgggagcggattgacaagaaagtggaaggcctgagcaagcacatcaagctggaagaggaacggagaagcgaggacgcccagagcaaggccgccctgaccgactggctgcgggctaaggccagcttcgtgatcgagggcctgaaggaggccgacaaggacgagttctgcagatgcgagctgaagctgcagaagtggtacggggacctgcggggaaagcccttcgccatcgaagccgagaacagcatcctggacatcagcggcttcagcaagcagtacaactgtgccttcatctggcagaaggacggcgtgaagaagctgaacctgtacctgatcatcaactacttcaagggcggcaagctgcggttcaagaagatcaaacctgaagccttcgaagccaacagattctacaccgtgatcaacaaaaagagcggcgagatcgtgcccatggaggtgaacttcaacttcgacgaccccaacctgatcatcctgcctctggcctttggcaagagacagggcagagaattcatctggaacgacctgctgtccctggaaaccggcagcctgaagctggccaacggaagagtgatcgagaagacactgtacaacagaagaacccggcaggatgagcctgccctgttcgtggccctgaccttcgagcggcgggaggtcctggactcctccaatatcaaaccaatgaacctgatcggcgtggcaagaggcgaaaacatccccgccgtgatcgccctgaccgaccccgagggctgcccactgagccggtttaaggatagcctgggaaacccaacccacatcctgagaatcggcgagagctataaggagaagcagcggaccatccaggccaagaaggaggtggagcagcggagagccggcggctacagccggaagtacgccagcaaagccaagaatctggcagacgatatggtgagaaacaccgctagagatctgctgtactacgccgtgacccaggatgccatgctgatcttcgccaacctgagccggggcttcggccggcagggcaagcggaccttcatggccgagagacagtacacacggatggaggactggctgaccgccaagctggcctacgagggcctgagcaagacctacctgtccaagacactggcccagtacacctccaagacatgcagcaactgtgggtttaccatcaccagcgccgactacgacagggtgctggagaagctgaagaagacagcaacaggctggatgaccacaattaacggcaaggagctgaaggtggagggccagattacctactacaacagatacaagagacagaacgtagtcaaggacctgtccgtcgagctggatagactgagcgaagaatctgtgaacaacgacatctcctcctggacaaagggcagaagcggagaagctctgagcctcctgaagaaaagattctcccatagacccgtgcaggagaagttcgtgtgcctgaactgcggcttcgagacacacgcagccgagcaagccgccctgaacatcgccagatcctggctgttcctgcggagccaggagtacaagaaataccagacaaacaagacaaccggcaacaccgataagagagccttcgtcgagacctggcagtccttttaccggaagaagcttaaggaggtgtggaaacctgccgtgcggtctggcggatctggcggaggctcctgcccacggcagcgtgatgttcaacgacgtgagcatcgtgttcagccaggaggagtgggagtacctggacctggagcagagggacctgtacagggacgtgatgctggagaactacagcaacctggtgagcctgggctgcttcatcagcaagcccgacgtgatcagcctgctggagcagggcaaggagccctggaaggtggtgaggaagggcaggaggcagtaccccgacctggagaccaggtacggatctggctccggcagcggccccaagaaaaagagaaaagtctaagctgccttctgcggggcttgccttctggccatgcccttcttctctcccttgcacctgtacctcttggtctttgaataaagcctgagtaggaaggctagcaaaaaaaaaaaaaaaaaaaaaaaaaaaaaaaaaaaaaaaaaaaaaaaaaaaaaaaaaaaaaaaaaaaaaaaaaaaaaaaa

SEQ ID NO: 15465 - RNA, 9485 nt, synthetic construct
  source 1..9485: mol_type = other RNA
aggaaataagagagaaaagaagagtaagaagaaatataagagccaccatggcccctaagaagaagcgtaaagtgagccggatggaacgcctcgtctacgaggtgcggcagaagtgcagaaacatcgaggacatctgcatctcctgcggatctctgaacgtgaccctggagcacccactgttcatcggcggcatgtgccagaactgtaaaaactgttttctggagtgtgcctatcaatacgacgatgacggctaccagagctactgcaccatctgttgcggcggaagagaggtgctgatgtgtggaaataacaactgctgccggtgcttctgcgtggaatgcgtggacctgctggtgggccccggcgccgcccaggccgctattaaggaagatccttggaactgctacatgtgcggccacaagggcacatacggcctgctgagacggagagaggactggcctagcagactgcagatgttcttcgccaataaccacgaccaggagttcgacccccctaaggtgtaccctcccgtccccgccgagaagagaaagcccatccgggtcctgagcctgttcgatggcatcgccaccggtctgctggtgctgaaggacctgggcatccaggtggataggtacattgcctccgaggtgtgcgaggactccatcaccgtgggaatggtgcgtcatcagggcaagatcatgtacgtgggcgacgtgcggagcgtgacacagaagcatatccaggagtggggccctttcgacctggtgatcggcggcagcccttgcaatgacctgagcatcgtgaacccagcccggaagggcctgtacgagggaaccggcagactgttcttcgagttttacagactgctgcacgacgcccggcctaaggaaggcgacgaccggcccttcttttggctgttcgagaatgtggtggccatgggagtcagcgacaagcgggatattagccggttcctggagagcaaccccgtgatgatcgatgccaaggaagtgagcgccgcccaccgggccagatacttctggggcaatctgcctggcatgaacagacccctggccagcaccgtgaacgacaagctggagctgcaggagtgcctggagcacggccggatcgccaagttcagcaaggtgagaaccatcaccacccgaagcaacagcatcaaacaaggcaaggaccagcactttcctgtgttcatgaacgagaaggaggacatcctgtggtgtaccgagatggagagagtgttcgggttcccagtccactacacagatgtcagcaacatgtctagactggccagacagagactgctgggaagaagctggtccgtccctgtgatcagacacctgttcgcccctctgaaggagtacttcgcctgcgtgagcagcggcaacagcaacgccaacagccggggccccagcttctctagcggcctggtgccactgtccctgagagggagccacatgggccccatggagatctacaaaaccgtgagcgcctggaagcggcagcctgtgcgcgtgctgagcctgtttcggaatatcgataaagtcctgaaaagcctgggattcctggagagcggctctggctccggcggtggcaccctgaagtacgtggaggatgtgacaaacgtggtcagacgggatgtggagaagtggggccccttcgatctggtgtacggcagcacccaacccctgggcagctcttgtgaccggtgccctggctggtacatgtttcagttccaccggatcctgcagtacgccctgccgagacaggagtcccagcggccattcttttggattttcatggacaacttgctgctgaccgaggatgaccaggaaactaccactcggttcctgcagaccgaagccgtgaccctgcaggacgtgagaggccgggactaccagaacgccatgcgggtgtggtccaacatccctggactgaaaagcaagcacgcacctctgacccctaaagaagaggagtacctgcaggcccaggtgcggagcagaagcaagctggacgcccctaaggtggatctgctggtgaagaattgcctcctgcccctgagagagtacttcaagtatttcagccagaatagtctgcccctgggaggcagcggcggcggcgccctggtgacatttgaggacgtcgccgtgcggttcacccaggaggaatgggctctgctggatccttctcagaaaatcctgtaccgggacgtgatgagagagacataccggaatctgacctccgtgggcatcaactgggaatgttgggaccttgaagcctgcttcagaagcctgggaagaaacctgagagtgcaggtggtgaagagaaagtgcgagctgaccaacagcggcccctgcgccgagggcggcccaagcagcggcgcccctcctcccagcggcggcagcccagccggctccccaacctctaccgaggagggcacctctgagtccgccacccccgagagcggccctggcacctccaccgagcccagcgagggcagcgcacccggcagccctgccggcagccccacctccacagaggagggaaccagcaccgagcccagcgaaggcagcgccccaggcaccagcaccgagcctagtgagcaggagattaaacggatcaacaagatcagaagaagacttgtgaaagacagcaacaccaagaaggccggcaagacaggccccatgaaaaccctgctggttagagtgatgacacccgatctgagagagcggctggaaaacctgagaaagaagcctgaaaatatcccccagcccatcagcaatacatctagagccaacctgaataagctgctgaccgattacaccgaaatgaagaaggcgatcctgcatgtgtactgggaagagttccagaaggaccctgtgggcctgatgagccgggtggcccagcctgccagcaagaagatcgatcagaacaagctgaaacctgagatggacgagaagggcaacctgaccaccgccggctttgcctgctctcagtgtggccagcccctgttcgtgtacaagctggagcaggtgtctgagaagggcaaggcttacaccaactacttcggacggtgcaatgtggccgagcacgaaaagctgatcctgctggcccagctgaagcccgagaaggatagcgacgaagccgtgacatatagcctgggaaagtttgggcagagggccctggatttctacagcattcatgtgaccaaggagtccacccaccccgtgaagcccctggcccagatcgccggaaacagatacgcctccggacctgtgggaaaggccctgagcgacgcatgtatgggcacaatcgcctccttcctgtctaagtaccaggacatcatcatcgaacaccagaaggtggtgaagggcaaccagaagagactggagagcctgcgggagctggccggcaaggaaaacctggaataccctagcgtgaccctgccacctcagcctcacaccaaggagggcgttgatgcctacaacgaagtgatcgcccgggtgcgaatgtgggtgaacctgaacctgtggcagaagctgaagctaagcagagatgatgccaagcctctgctgagactgaagggattcccttcctttcctctggtcgagagacaggccaacgaagtggactggtgggacatggtgtgtaacgtgaagaagctgatcaacgagaaaaaggaggatggcaaggtgttttggcagaatctggctggctacaagagacaggaagccctgagaccatacctgagcagcgaggaagatcggaagaagggaaagaaattcgctcggtaccagctgggcgacctgctgctgcacctggaaaagaagcacggcgaggactggggaaaggtgtacgacgaggcctgggagcggattgacaagaaagtggaaggcctgagcaagcacatcaagctggaagaggaacggagaagcgaggacgcccagagcaaggccgccctgaccgactggctgcgggctaaggccagcttcgtgatcgagggcctgaaggaggccgacaaggacgagttctgcagatgcgagctgaagctgcagaagtggtacggggacctgcggggaaagcccttcgccatcgaagccgagaacagcatcctggacatcagcggcttcagcaagcagtacaactgtgccttcatctggcagaaggacggcgtgaagaagctgaacctgtacctgatcatcaactacttcaagggcggcaagctgcggttcaagaagatcaaacctgaagccttcgaagccaacagattctacaccgtgatcaacaaaaagagcggcgagatcgtgcccatggaggtgaacttcaacttcgacgaccccaacctgatcatcctgcctctggcctttggcaagagacagggcagagaattcatctggaacgacctgctgtccctggaaaccggcagcctgaagctggccaacggaagagtgatcgagaagacactgtacaacagaagaacccggcaggatgagcctgccctgttcgtggccctgaccttcgagcggcgggaggtcctggactcctccaatatcaaaccaatgaacctgatcggcgtggcaagaggcgaaaacatccccgccgtgatcgccctgaccgaccccgagggctgcccactgagccggtttaaggatagcctgggaaacccaacccacatcctgagaatcggcgagagctataaggagaagcagcggaccatccaggccaagaaggaggtggagcagcggagagccggcggctacagccggaagtacgccagcaaagccaagaatctggcagacgatatggtgagaaacaccgctagagatctgctgtactacgccgtgacccaggatgccatgctgatcttcgccaacctgagccggggcttcggccggcagggcaagcggaccttcatggccgagagacagtacacacggatggaggactggctgaccgccaagctggcctacgagggcctgagcaagacctacctgtccaagacactggcccagtacacctccaagacatgcagcaactgtgggtttaccatcaccagcgccgactacgacagggtgctggagaagctgaagaagacagcaacaggctggatgaccacaattaacggcaaggagctgaaggtggagggccagattacctactacaacagatacaagagacagaacgtagtcaaggacctgtccgtcgagctggatagactgagcgaagaatctgtgaacaacgacatctcctcctggacaaagggcagaagcggagaagctctgagcctcctgaagaaaagattctcccatagacccgtgcaggagaagttcgtgtgcctgaactgcggcttcgagacacacgcagccgagcaagccgccctgaacatcgccagatcctggctgttcctgcggagccaggagtacaagaaataccagacaaacaagacaaccggcaacaccgataagagagccttcgtcgagacctggcagtccttttaccggaagaagcttaaggaggtgtggaaacctgccgtgcggtctggcggatctggcggaggctccgcccacggcagcgtgatgttcaacgacgtgagcatcgtgttcagccaggaggagtgggagtacctggacctggagcagagggacctgtacagggacgtgatgctggagaactacagcaacctggtgagcctgggctgcttcatcagcaagcccgacgtgatcagcctgctggagcagggcaaggagccctggaaggtggtgaggaagggcaggaggaggtaccccgacctggagaccaggtacggcggcccaagcagcggcgcccctcctcccagcggcggcagcccagccggctccccaacctctaccgaggagggcacctctgagtccgccacccccgagagcggccctggcacctccaccgagcccagcgagggcagcgcacccggcagccctgccggcagccccacctccacagaggagggaaccagcaccgagcccagcgaaggcagcgccccaggcaccagcaccgagcctagtgagcaggagattaaacggatcaacaagatcagaagaagacttgtgaaagacagcaacaccaagaaggccggcaagacaggccccatgaaaaccctgctggttagagtgatgacacccgatctgagagagcggctggaaaacctgagaaagaagcctgaaaatatcccccagcccatcagcaatacatctagagccaacctgaataagctgctgaccgattacaccgaaatgaagaaggcgatcctgcatgtgtactgggaagagttccagaaggaccctgtgggcctgatgagccgggtggcccagcctgccagcaagaagatcgatcagaacaagctgaaacctgagatggacgagaagggcaacctgaccaccgccggctttgcctgctctcagtgtggccagcccctgttcgtgtacaagctggagcaggtgtctgagaagggcaaggcttacaccaactacttcggacggtgcaatgtggccgagcacgaaaagctgatcctgctggcccagctgaagcccgagaaggatagcgacgaagccgtgacatatagcctgggaaagtttgggcagagggccctggatttctacagcattcatgtgaccaaggagtccacccaccccgtgaagcccctggcccagatcgccggaaacagatacgcctccggacctgtgggaaaggccctgagcgacgcatgtatgggcacaatcgcctccttcctgtctaagtaccaggacatcatcatcgaacaccagaaggtggtgaagggcaaccagaagagactggagagcctgcgggagctggccggcaaggaaaacctggaataccctagcgtgaccctgccacctcagcctcacaccaaggagggcgttgatgcctacaacgaagtgatcgcccgggtgcgaatgtgggtgaacctgaacctgtggcagaagctgaagctaagcagagatgatgccaagcctctgctgagactgaagggattcccttcctttcctctggtcgagagacaggccaacgaagtggactggtgggacatggtgtgtaacgtgaagaagctgatcaacgagaaaaaggaggatggcaaggtgttttggcagaatctggctggctacaagagacaggaagccctgagaccatacctgagcagcgaggaagatcggaagaagggaaagaaattcgctcggtaccagctgggcgacctgctgctgcacctggaaaagaagcacggcgaggactggggaaaggtgtacgacgaggcctgggagcggattgacaagaaagtggaaggcctgagcaagcacatcaagctggaagaggaacggagaagcgaggacgcccagagcaaggccgccctgaccgactggctgcgggctaaggccagcttcgtgatcgagggcctgaaggaggccgacaaggacgagttctgcagatgcgagctgaagctgcagaagtggtacggggacctgcggggaaagcccttcgccatcgaagccgagaacagcatcctggacatcagcggcttcagcaagcagtacaactgtgccttcatctggcagaaggacggcgtgaagaagctgaacctgtacctgatcatcaactacttcaagggcggcaagctgcggttcaagaagatcaaacctgaagccttcgaagccaacagattctacaccgtgatcaacaaaaagagcggcgagatcgtgcccatggaggtgaacttcaacttcgacgaccccaacctgatcatcctgcctctggcctttggcaagagacagggcagagaattcatctggaacgacctgctgtccctggaaaccggcagcctgaagctggccaacggaagagtgatcgagaagacactgtacaacagaagaacccggcaggatgagcctgccctgttcgtggccctgaccttcgagcggcgggaggtcctggactcctccaatatcaaaccaatgaacctgatcggcgtggcaagaggcgaaaacatccccgccgtgatcgccctgaccgaccccgagggctgcccactgagccggtttaaggatagcctgggaaacccaacccacatcctgagaatcggcgagagctataaggagaagcagcggaccatccaggccaagaaggaggtggagcagcggagagccggcggctacagccggaagtacgccagcaaagccaagaatctggcagacgatatggtgagaaacaccgctagagatctgctgtactacgccgtgacccaggatgccatgctgatcttcgccaacctgagccggggcttcggccggcagggcaagcggaccttcatggccgagagacagtacacacggatggaggactggctgaccgccaagctggcctacgagggcctgagcaagacctacctgtccaagacactggcccagtacacctccaagacatgcagcaactgtgggtttaccatcaccagcgccgactacgacagggtgctggagaagctgaagaagacagcaacaggctggatgaccacaattaacggcaaggagctgaaggtggagggccagattacctactacaacagatacaagagacagaacgtagtcaaggacctgtccgtcgagctggatagactgagcgaagaatctgtgaacaacgacatctcctcctggacaaagggcagaagcggagaagctctgagcctcctgaagaaaagattctcccatagacccgtgcaggagaagttcgtgtgcctgaactgcggcttcgagacacacgcagccgagcaagccgccctgaacatcgccagatcctggctgttcctgcggagccaggagtacaagaaataccagacaaacaagacaaccggcaacaccgataagagagccttcgtcgagacctggcagtccttttaccggaagaagcttaaggaggtgtggaaacctgccgtgcggtctggcggatctggcggaggctcctgcccacggcagcgtgatgttcaacgacgtgagcatcgtgttcagccaggaggagtgggagtacctggacctggagcagagggacctgtacagggacgtgatgctggagaactacagcaacctggtgagcctgggctgcttcatcagcaagcccgacgtgatcagcctgctggagcagggcaaggagccctggaaggtggtgaggaagggcaggaggaggtaccccgacctggagaccaggtacggatctggctccggcagcggccccaagaaaaagagaaaagtctaagctgccttctgcggggcttgccttctggccatgcccttcttctctcccttgcacctgtacctcttggtctttgaataaagcctgagtaggaaggctagcaaaaaaaaaaaaaaaaaaaaaaaaaaaaaaaaaaaaaaaaaaaaaaaaaaaaaaaaaaaaaaaaaaaaaaaaaaaaaaaa

SEQ ID NO: 15466 - RNA, 9485 nt, synthetic construct
  source 1..9485: mol_type = other RNA
aggaaataagagagaaaagaagagtaagaagaaatataagagccaccatggcccctaagaagaagcgtaaagtgagccggatggaacgcctcgtctacgaggtgcggcagaagtgcagaaacatcgaggacatctgcatctcctgcggatctctgaacgtgaccctggagcacccactgttcatcggcggcatgtgccagaactgtaaaaactgttttctggagtgtgcctatcaatacgacgatgacggctaccagagctactgcaccatctgttgcggcggaagagaggtgctgatgtgtggaaataacaactgctgccggtgcttctgcgtggaatgcgtggacctgctggtgggccccggcgccgcccaggccgctattaaggaagatccttggaactgctacatgtgcggccacaagggcacatacggcctgctgagacggagagaggactggcctagcagactgcagatgttcttcgccaataaccacgaccaggagttcgacccccctaaggtgtaccctcccgtccccgccgagaagagaaagcccatccgggtcctgagcctgttcgatggcatcgccaccggtctgctggtgctgaaggacctgggcatccaggtggataggtacattgcctccgaggtgtgcgaggactccatcaccgtgggaatggtgcgtcatcagggcaagatcatgtacgtgggcgacgtgcggagcgtgacacagaagcatatccaggagtggggccctttcgacctggtgatcggcggcagcccttgcaatgacctgagcatcgtgaacccagcccggaagggcctgtacgagggaaccggcagactgttcttcgagttttacagactgctgcacgacgcccggcctaaggaaggcgacgaccggcccttcttttggctgttcgagaatgtggtggccatgggagtcagcgacaagcgggatattagccggttcctggagagcaaccccgtgatgatcgatgccaaggaagtgagcgccgcccaccgggccagatacttctggggcaatctgcctggcatgaacagacccctggccagcaccgtgaacgacaagctggagctgcaggagtgcctggagcacggccggatcgccaagttcagcaaggtgagaaccatcaccacccgaagcaacagcatcaaacaaggcaaggaccagcactttcctgtgttcatgaacgagaaggaggacatcctgtggtgtaccgagatggagagagtgttcgggttcccagtccactacacagatgtcagcaacatgtctagactggccagacagagactgctgggaagaagctggtccgtccctgtgatcagacacctgttcgcccctctgaaggagtacttcgcctgcgtgagcagcggcaacagcaacgccaacagccggggccccagcttctctagcggcctggtgccactgtccctgagagggagccacatgggccccatggagatctacaaaaccgtgagcgcctggaagcggcagcctgtgcgcgtgctgagcctgtttcggaatatcgataaagtcctgaaaagcctgggattcctggagagcggctctggctccggcggtggcaccctgaagtacgtggaggatgtgacaaacgtggtcagacgggatgtggagaagtggggccccttcgatctggtgtacggcagcacccaacccctgggcagctcttgtgaccggtgccctggctggtacatgtttcagttccaccggatcctgcagtacgccctgccgagacaggagtcccagcggccattcttttggattttcatggacaacttgctgctgaccgaggatgaccaggaaactaccactcggttcctgcagaccgaagccgtgaccctgcaggacgtgagaggccgggactaccagaacgccatgcgggtgtggtccaacatccctggactgaaaagcaagcacgcacctctgacccctaaagaagaggagtacctgcaggcccaggtgcggagcagaagcaagctggacgcccctaaggtggatctgctggtgaagaattgcctcctgcccctgagagagtacttcaagtatttcagccagaatagtctgcccctgggaggcagcggcggcggcgccctggtgacatttgaggacgtcgccgtgcggttcacccaggaggaatgggctctgctggatccttctcagaaaatcctgtaccgggacgtgatgagagagacataccggaatctgacctccgtgggcatcaactgggaatgttgggaccttgaagcctgcttcagaagcctgggaagaaacctgagagtgcaggtggtgaagagaaagtgcgagctgaccaacagcggcccctgcgccgagggcggcccaagcagcggcgcccctcctcccagcggcggcagcccagccggctccccaacctctaccgaggagggcacctctgagtccgccacccccgagagcggccctggcacctccaccgagcccagcgagggcagcgcacccggcagccctgccggcagccccacctccacagaggagggaaccagcaccgagcccagcgaaggcagcgccccaggcaccagcaccgagcctagtgagcaggagattaaacggatcaacaagatcagaagaagacttgtgaaagacagcaacaccaagaaggccggcaagacaggccccatgaaaaccctgctggttagagtgatgacacccgatctgagagagcggctggaaaacctgagaaagaagcctgaaaatatcccccagcccatcagcaatacatctagagccaacctgaataagctgctgaccgattacaccgaaatgaagaaggcgatcctgcatgtgtactgggaagagttccagaaggaccctgtgggcctgatgagccgggtggcccagcctgccagcaagaagatcgatcagaacaagctgaaacctgagatggacgagaagggcaacctgaccaccgccggctttgcctgctctcagtgtggccagcccctgttcgtgtacaagctggagcaggtgtctgagaagggcaaggcttacaccaactacttcggacggtgcaatgtggccgagcacgaaaagctgatcctgctggcccagctgaagcccgagaaggatagcgacgaagccgtgacatatagcctgggaaagtttgggcagagggccctggatttctacagcattcatgtgaccaaggagtccacccaccccgtgaagcccctggcccagatcgccggaaacagatacgcctccggacctgtgggaaaggccctgagcgacgcatgtatgggcacaatcgcctccttcctgtctaagtaccaggacatcatcatcgaacaccagaaggtggtgaagggcaaccagaagagactggagagcctgcgggagctggccggcaaggaaaacctggaataccctagcgtgaccctgccacctcagcctcacaccaaggagggcgttgatgcctacaacgaagtgatcgcccgggtgcgaatgtgggtgaacctgaacctgtggcagaagctgaagctaagcagagatgatgccaagcctctgctgagactgaagggattcccttcctttcctctggtcgagagacaggccaacgaagtggactggtgggacatggtgtgtaacgtgaagaagctgatcaacgagaaaaaggaggatggcaaggtgttttggcagaatctggctggctacaagagacaggaagccctgagaccatacctgagcagcgaggaagatcggaagaagggaaagaaattcgctcggtaccagctgggcgacctgctgctgcacctggaaaagaagcacggcgaggactggggaaaggtgtacgacgaggcctgggagcggattgacaagaaagtggaaggcctgagcaagcacatcaagctggaagaggaacggagaagcgaggacgcccagagcaaggccgccctgaccgactggctgcgggctaaggccagcttcgtgatcgagggcctgaaggaggccgacaaggacgagttctgcagatgcgagctgaagctgcagaagtggtacggggacctgcggggaaagcccttcgccatcgaagccgagaacagcatcctggacatcagcggcttcagcaagcagtacaactgtgccttcatctggcagaaggacggcgtgaagaagctgaacctgtacctgatcatcaactacttcaagggcggcaagctgcggttcaagaagatcaaacctgaagccttcgaagccaacagattctacaccgtgatcaacaaaaagagcggcgagatcgtgcccatggaggtgaacttcaacttcgacgaccccaacctgatcatcctgcctctggcctttggcaagagacagggcagagaattcatctggaacgacctgctgtccctggaaaccggcagcctgaagctggccaacggaagagtgatcgagaagacactgtacaacagaagaacccggcaggatgagcctgccctgttcgtggccctgaccttcgagcggcgggaggtcctggactcctccaatatcaaaccaatgaacctgatcggcgtggcaagaggcgaaaacatccccgccgtgatcgccctgaccgaccccgagggctgcccactgagccggtttaaggatagcctgggaaacccaacccacatcctgagaatcggcgagagctataaggagaagcagcggaccatccaggccaagaaggaggtggagcagcggagagccggcggctacagccggaagtacgccagcaaagccaagaatctggcagacgatatggtgagaaacaccgctagagatctgctgtactacgccgtgacccaggatgccatgctgatcttcgccaacctgagccggggcttcggccggcagggcaagcggaccttcatggccgagagacagtacacacggatggaggactggctgaccgccaagctggcctacgagggcctgagcaagacctacctgtccaagacactggcccagtacacctccaagacatgcagcaactgtgggtttaccatcaccagcgccgactacgacagggtgctggagaagctgaagaagacagcaacaggctggatgaccacaattaacggcaaggagctgaaggtggagggccagattacctactacaacagatacaagagacagaacgtagtcaaggacctgtccgtcgagctggatagactgagcgaagaatctgtgaacaacgacatctcctcctggacaaagggcagaagcggagaagctctgagcctcctgaagaaaagattctcccatagacccgtgcaggagaagttcgtgtgcctgaactgcggcttcgagacacacgcagccgagcaagccgccctgaacatcgccagatcctggctgttcctgcggagccaggagtacaagaaataccagacaaacaagacaaccggcaacaccgataagagagccttcgtcgagacctggcagtccttttaccggaagaagcttaaggaggtgtggaaacctgccgtgcggtctggcggatctggcggaggctccgcccaccacctggtgatgttcagggacgtggccgtggacttcagccaggaggagtgggagtgcctgaacccctaccagaggaacctgtacagggacgtgatcctggagaactacagcaacctggtgagcgtggccggctgcagcatcagcaagcccgacgtgatcaccctgctggagcagggcaaggagccctggatggtggtgagggacgagaggaggaggagcctggacctggagagcaggggcggcccaagcagcggcgcccctcctcccagcggcggcagcccagccggctccccaacctctaccgaggagggcacctctgagtccgccacccccgagagcggccctggcacctccaccgagcccagcgagggcagcgcacccggcagccctgccggcagccccacctccacagaggagggaaccagcaccgagcccagcgaaggcagcgccccaggcaccagcaccgagcctagtgagcaggagattaaacggatcaacaagatcagaagaagacttgtgaaagacagcaacaccaagaaggccggcaagacaggccccatgaaaaccctgctggttagagtgatgacacccgatctgagagagcggctggaaaacctgagaaagaagcctgaaaatatcccccagcccatcagcaatacatctagagccaacctgaataagctgctgaccgattacaccgaaatgaagaaggcgatcctgcatgtgtactgggaagagttccagaaggaccctgtgggcctgatgagccgggtggcccagcctgccagcaagaagatcgatcagaacaagctgaaacctgagatggacgagaagggcaacctgaccaccgccggctttgcctgctctcagtgtggccagcccctgttcgtgtacaagctggagcaggtgtctgagaagggcaaggcttacaccaactacttcggacggtgcaatgtggccgagcacgaaaagctgatcctgctggcccagctgaagcccgagaaggatagcgacgaagccgtgacatatagcctgggaaagtttgggcagagggccctggatttctacagcattcatgtgaccaaggagtccacccaccccgtgaagcccctggcccagatcgccggaaacagatacgcctccggacctgtgggaaaggccctgagcgacgcatgtatgggcacaatcgcctccttcctgtctaagtaccaggacatcatcatcgaacaccagaaggtggtgaagggcaaccagaagagactggagagcctgcgggagctggccggcaaggaaaacctggaataccctagcgtgaccctgccacctcagcctcacaccaaggagggcgttgatgcctacaacgaagtgatcgcccgggtgcgaatgtgggtgaacctgaacctgtggcagaagctgaagctaagcagagatgatgccaagcctctgctgagactgaagggattcccttcctttcctctggtcgagagacaggccaacgaagtggactggtgggacatggtgtgtaacgtgaagaagctgatcaacgagaaaaaggaggatggcaaggtgttttggcagaatctggctggctacaagagacaggaagccctgagaccatacctgagcagcgaggaagatcggaagaagggaaagaaattcgctcggtaccagctgggcgacctgctgctgcacctggaaaagaagcacggcgaggactggggaaaggtgtacgacgaggcctgggagcggattgacaagaaagtggaaggcctgagcaagcacatcaagctggaagaggaacggagaagcgaggacgcccagagcaaggccgccctgaccgactggctgcgggctaaggccagcttcgtgatcgagggcctgaaggaggccgacaaggacgagttctgcagatgcgagctgaagctgcagaagtggtacggggacctgcggggaaagcccttcgccatcgaagccgagaacagcatcctggacatcagcggcttcagcaagcagtacaactgtgccttcatctggcagaaggacggcgtgaagaagctgaacctgtacctgatcatcaactacttcaagggcggcaagctgcggttcaagaagatcaaacctgaagccttcgaagccaacagattctacaccgtgatcaacaaaaagagcggcgagatcgtgcccatggaggtgaacttcaacttcgacgaccccaacctgatcatcctgcctctggcctttggcaagagacagggcagagaattcatctggaacgacctgctgtccctggaaaccggcagcctgaagctggccaacggaagagtgatcgagaagacactgtacaacagaagaacccggcaggatgagcctgccctgttcgtggccctgaccttcgagcggcgggaggtcctggactcctccaatatcaaaccaatgaacctgatcggcgtggcaagaggcgaaaacatccccgccgtgatcgccctgaccgaccccgagggctgcccactgagccggtttaaggatagcctgggaaacccaacccacatcctgagaatcggcgagagctataaggagaagcagcggaccatccaggccaagaaggaggtggagcagcggagagccggcggctacagccggaagtacgccagcaaagccaagaatctggcagacgatatggtgagaaacaccgctagagatctgctgtactacgccgtgacccaggatgccatgctgatcttcgccaacctgagccggggcttcggccggcagggcaagcggaccttcatggccgagagacagtacacacggatggaggactggctgaccgccaagctggcctacgagggcctgagcaagacctacctgtccaagacactggcccagtacacctccaagacatgcagcaactgtgggtttaccatcaccagcgccgactacgacagggtgctggagaagctgaagaagacagcaacaggctggatgaccacaattaacggcaaggagctgaaggtggagggccagattacctactacaacagatacaagagacagaacgtagtcaaggacctgtccgtcgagctggatagactgagcgaagaatctgtgaacaacgacatctcctcctggacaaagggcagaagcggagaagctctgagcctcctgaagaaaagattctcccatagacccgtgcaggagaagttcgtgtgcctgaactgcggcttcgagacacacgcagccgagcaagccgccctgaacatcgccagatcctggctgttcctgcggagccaggagtacaagaaataccagacaaacaagacaaccggcaacaccgataagagagccttcgtcgagacctggcagtccttttaccggaagaagcttaaggaggtgtggaaacctgccgtgcggtctggcggatctggcggaggctcctgcccaccacctggtgatgttcagggacgtggccgtggacttcagccaggaggagtgggagtgcctgaacccctaccagaggaacctgtacagggacgtgatcctggagaactacagcaacctggtgagcgtggccggctgcagcatcagcaagcccgacgtgatcaccctgctggagcagggcaaggagccctggatggtggtgagggacgagaggaggaggagcctggacctggagagcaggggatctggctccggcagcggccccaagaaaaagagaaaagtctaagctgccttctgcggggcttgccttctggccatgcccttcttctctcccttgcacctgtacctcttggtctttgaataaagcctgagtaggaaggctagcaaaaaaaaaaaaaaaaaaaaaaaaaaaaaaaaaaaaaaaaaaaaaaaaaaaaaaaaaaaaaaaaaaaaaaaaaaaaaaaa

SEQ ID NO: 15467 - RNA, 9485 nt, synthetic construct
  source 1..9485: mol_type = other RNA
aggaaataagagagaaaagaagagtaagaagaaatataagagccaccatggcccctaagaagaagcgtaaagtgagccggatggaacgcctcgtctacgaggtgcggcagaagtgcagaaacatcgaggacatctgcatctcctgcggatctctgaacgtgaccctggagcacccactgttcatcggcggcatgtgccagaactgtaaaaactgttttctggagtgtgcctatcaatacgacgatgacggctaccagagctactgcaccatctgttgcggcggaagagaggtgctgatgtgtggaaataacaactgctgccggtgcttctgcgtggaatgcgtggacctgctggtgggccccggcgccgcccaggccgctattaaggaagatccttggaactgctacatgtgcggccacaagggcacatacggcctgctgagacggagagaggactggcctagcagactgcagatgttcttcgccaataaccacgaccaggagttcgacccccctaaggtgtaccctcccgtccccgccgagaagagaaagcccatccgggtcctgagcctgttcgatggcatcgccaccggtctgctggtgctgaaggacctgggcatccaggtggataggtacattgcctccgaggtgtgcgaggactccatcaccgtgggaatggtgcgtcatcagggcaagatcatgtacgtgggcgacgtgcggagcgtgacacagaagcatatccaggagtggggccctttcgacctggtgatcggcggcagcccttgcaatgacctgagcatcgtgaacccagcccggaagggcctgtacgagggaaccggcagactgttcttcgagttttacagactgctgcacgacgcccggcctaaggaaggcgacgaccggcccttcttttggctgttcgagaatgtggtggccatgggagtcagcgacaagcgggatattagccggttcctggagagcaaccccgtgatgatcgatgccaaggaagtgagcgccgcccaccgggccagatacttctggggcaatctgcctggcatgaacagacccctggccagcaccgtgaacgacaagctggagctgcaggagtgcctggagcacggccggatcgccaagttcagcaaggtgagaaccatcaccacccgaagcaacagcatcaaacaaggcaaggaccagcactttcctgtgttcatgaacgagaaggaggacatcctgtggtgtaccgagatggagagagtgttcgggttcccagtccactacacagatgtcagcaacatgtctagactggccagacagagactgctgggaagaagctggtccgtccctgtgatcagacacctgttcgcccctctgaaggagtacttcgcctgcgtgagcagcggcaacagcaacgccaacagccggggccccagcttctctagcggcctggtgccactgtccctgagagggagccacatgggccccatggagatctacaaaaccgtgagcgcctggaagcggcagcctgtgcgcgtgctgagcctgtttcggaatatcgataaagtcctgaaaagcctgggattcctggagagcggctctggctccggcggtggcaccctgaagtacgtggaggatgtgacaaacgtggtcagacgggatgtggagaagtggggccccttcgatctggtgtacggcagcacccaacccctgggcagctcttgtgaccggtgccctggctggtacatgtttcagttccaccggatcctgcagtacgccctgccgagacaggagtcccagcggccattcttttggattttcatggacaacttgctgctgaccgaggatgaccaggaaactaccactcggttcctgcagaccgaagccgtgaccctgcaggacgtgagaggccgggactaccagaacgccatgcgggtgtggtccaacatccctggactgaaaagcaagcacgcacctctgacccctaaagaagaggagtacctgcaggcccaggtgcggagcagaagcaagctggacgcccctaaggtggatctgctggtgaagaattgcctcctgcccctgagagagtacttcaagtatttcagccagaatagtctgcccctgggaggcagcggcggcggcgccctggtgacatttgaggacgtcgccgtgcggttcacccaggaggaatgggctctgctggatccttctcagaaaatcctgtaccgggacgtgatgagagagacataccggaatctgacctccgtgggcatcaactgggaatgttgggaccttgaagcctgcttcagaagcctgggaagaaacctgagagtgcaggtggtgaagagaaagtgcgagctgaccaacagcggcccctgcgccgagggcggcccaagcagcggcgcccctcctcccagcggcggcagcccagccggctccccaacctctaccgaggagggcacctctgagtccgccacccccgagagcggccctggcacctccaccgagcccagcgagggcagcgcacccggcagccctgccggcagccccacctccacagaggagggaaccagcaccgagcccagcgaaggcagcgccccaggcaccagcaccgagcctagtgagcaggagattaaacggatcaacaagatcagaagaagacttgtgaaagacagcaacaccaagaaggccggcaagacaggccccatgaaaaccctgctggttagagtgatgacacccgatctgagagagcggctggaaaacctgagaaagaagcctgaaaatatcccccagcccatcagcaatacatctagagccaacctgaataagctgctgaccgattacaccgaaatgaagaaggcgatcctgcatgtgtactgggaagagttccagaaggaccctgtgggcctgatgagccgggtggcccagcctgccagcaagaagatcgatcagaacaagctgaaacctgagatggacgagaagggcaacctgaccaccgccggctttgcctgctctcagtgtggccagcccctgttcgtgtacaagctggagcaggtgtctgagaagggcaaggcttacaccaactacttcggacggtgcaatgtggccgagcacgaaaagctgatcctgctggcccagctgaagcccgagaaggatagcgacgaagccgtgacatatagcctgggaaagtttgggcagagggccctggatttctacagcattcatgtgaccaaggagtccacccaccccgtgaagcccctggcccagatcgccggaaacagatacgcctccggacctgtgggaaaggccctgagcgacgcatgtatgggcacaatcgcctccttcctgtctaagtaccaggacatcatcatcgaacaccagaaggtggtgaagggcaaccagaagagactggagagcctgcgggagctggccggcaaggaaaacctggaataccctagcgtgaccctgccacctcagcctcacaccaaggagggcgttgatgcctacaacgaagtgatcgcccgggtgcgaatgtgggtgaacctgaacctgtggcagaagctgaagctaagcagagatgatgccaagcctctgctgagactgaagggattcccttcctttcctctggtcgagagacaggccaacgaagtggactggtgggacatggtgtgtaacgtgaagaagctgatcaacgagaaaaaggaggatggcaaggtgttttggcagaatctggctggctacaagagacaggaagccctgagaccatacctgagcagcgaggaagatcggaagaagggaaagaaattcgctcggtaccagctgggcgacctgctgctgcacctggaaaagaagcacggcgaggactggggaaaggtgtacgacgaggcctgggagcggattgacaagaaagtggaaggcctgagcaagcacatcaagctggaagaggaacggagaagcgaggacgcccagagcaaggccgccctgaccgactggctgcgggctaaggccagcttcgtgatcgagggcctgaaggaggccgacaaggacgagttctgcagatgcgagctgaagctgcagaagtggtacggggacctgcggggaaagcccttcgccatcgaagccgagaacagcatcctggacatcagcggcttcagcaagcagtacaactgtgccttcatctggcagaaggacggcgtgaagaagctgaacctgtacctgatcatcaactacttcaagggcggcaagctgcggttcaagaagatcaaacctgaagccttcgaagccaacagattctacaccgtgatcaacaaaaagagcggcgagatcgtgcccatggaggtgaacttcaacttcgacgaccccaacctgatcatcctgcctctggcctttggcaagagacagggcagagaattcatctggaacgacctgctgtccctggaaaccggcagcctgaagctggccaacggaagagtgatcgagaagacactgtacaacagaagaacccggcaggatgagcctgccctgttcgtggccctgaccttcgagcggcgggaggtcctggactcctccaatatcaaaccaatgaacctgatcggcgtggcaagaggcgaaaacatccccgccgtgatcgccctgaccgaccccgagggctgcccactgagccggtttaaggatagcctgggaaacccaacccacatcctgagaatcggcgagagctataaggagaagcagcggaccatccaggccaagaaggaggtggagcagcggagagccggcggctacagccggaagtacgccagcaaagccaagaatctggcagacgatatggtgagaaacaccgctagagatctgctgtactacgccgtgacccaggatgccatgctgatcttcgccaacctgagccggggcttcggccggcagggcaagcggaccttcatggccgagagacagtacacacggatggaggactggctgaccgccaagctggcctacgagggcctgagcaagacctacctgtccaagacactggcccagtacacctccaagacatgcagcaactgtgggtttaccatcaccagcgccgactacgacagggtgctggagaagctgaagaagacagcaacaggctggatgaccacaattaacggcaaggagctgaaggtggagggccagattacctactacaacagatacaagagacagaacgtagtcaaggacctgtccgtcgagctggatagactgagcgaagaatctgtgaacaacgacatctcctcctggacaaagggcagaagcggagaagctctgagcctcctgaagaaaagattctcccatagacccgtgcaggagaagttcgtgtgcctgaactgcggcttcgagacacacgcagccgagcaagccgccctgaacatcgccagatcctggctgttcctgcggagccaggagtacaagaaataccagacaaacaagacaaccggcaacaccgataagagagccttcgtcgagacctggcagtccttttaccggaagaagcttaaggaggtgtggaaacctgccgtgcggtctggcggatctggcggaggctccgcccacggcagcgtgatgttcagcgacgtgagcatcgacttcagccaggaggagtgggactacctggacctggagcagagggacctgtacagggacgtgatgctggagaactacagcaacctggtgagcctgggctgcttcgtgagcaagcccgacgtgatcagcctgctggagcagggcaaggagccctggaaggtggtgaggaagggcaggaggaggtaccccgacctggagaccaactacggcggcccaagcagcggcgcccctcctcccagcggcggcagcccagccggctccccaacctctaccgaggagggcacctctgagtccgccacccccgagagcggccctggcacctccaccgagcccagcgagggcagcgcacccggcagccctgccggcagccccacctccacagaggagggaaccagcaccgagcccagcgaaggcagcgccccaggcaccagcaccgagcctagtgagcaggagattaaacggatcaacaagatcagaagaagacttgtgaaagacagcaacaccaagaaggccggcaagacaggccccatgaaaaccctgctggttagagtgatgacacccgatctgagagagcggctggaaaacctgagaaagaagcctgaaaatatcccccagcccatcagcaatacatctagagccaacctgaataagctgctgaccgattacaccgaaatgaagaaggcgatcctgcatgtgtactgggaagagttccagaaggaccctgtgggcctgatgagccgggtggcccagcctgccagcaagaagatcgatcagaacaagctgaaacctgagatggacgagaagggcaacctgaccaccgccggctttgcctgctctcagtgtggccagcccctgttcgtgtacaagctggagcaggtgtctgagaagggcaaggcttacaccaactacttcggacggtgcaatgtggccgagcacgaaaagctgatcctgctggcccagctgaagcccgagaaggatagcgacgaagccgtgacatatagcctgggaaagtttgggcagagggccctggatttctacagcattcatgtgaccaaggagtccacccaccccgtgaagcccctggcccagatcgccggaaacagatacgcctccggacctgtgggaaaggccctgagcgacgcatgtatgggcacaatcgcctccttcctgtctaagtaccaggacatcatcatcgaacaccagaaggtggtgaagggcaaccagaagagactggagagcctgcgggagctggccggcaaggaaaacctggaataccctagcgtgaccctgccacctcagcctcacaccaaggagggcgttgatgcctacaacgaagtgatcgcccgggtgcgaatgtgggtgaacctgaacctgtggcagaagctgaagctaagcagagatgatgccaagcctctgctgagactgaagggattcccttcctttcctctggtcgagagacaggccaacgaagtggactggtgggacatggtgtgtaacgtgaagaagctgatcaacgagaaaaaggaggatggcaaggtgttttggcagaatctggctggctacaagagacaggaagccctgagaccatacctgagcagcgaggaagatcggaagaagggaaagaaattcgctcggtaccagctgggcgacctgctgctgcacctggaaaagaagcacggcgaggactggggaaaggtgtacgacgaggcctgggagcggattgacaagaaagtggaaggcctgagcaagcacatcaagctggaagaggaacggagaagcgaggacgcccagagcaaggccgccctgaccgactggctgcgggctaaggccagcttcgtgatcgagggcctgaaggaggccgacaaggacgagttctgcagatgcgagctgaagctgcagaagtggtacggggacctgcggggaaagcccttcgccatcgaagccgagaacagcatcctggacatcagcggcttcagcaagcagtacaactgtgccttcatctggcagaaggacggcgtgaagaagctgaacctgtacctgatcatcaactacttcaagggcggcaagctgcggttcaagaagatcaaacctgaagccttcgaagccaacagattctacaccgtgatcaacaaaaagagcggcgagatcgtgcccatggaggtgaacttcaacttcgacgaccccaacctgatcatcctgcctctggcctttggcaagagacagggcagagaattcatctggaacgacctgctgtccctggaaaccggcagcctgaagctggccaacggaagagtgatcgagaagacactgtacaacagaagaacccggcaggatgagcctgccctgttcgtggccctgaccttcgagcggcgggaggtcctggactcctccaatatcaaaccaatgaacctgatcggcgtggcaagaggcgaaaacatccccgccgtgatcgccctgaccgaccccgagggctgcccactgagccggtttaaggatagcctgggaaacccaacccacatcctgagaatcggcgagagctataaggagaagcagcggaccatccaggccaagaaggaggtggagcagcggagagccggcggctacagccggaagtacgccagcaaagccaagaatctggcagacgatatggtgagaaacaccgctagagatctgctgtactacgccgtgacccaggatgccatgctgatcttcgccaacctgagccggggcttcggccggcagggcaagcggaccttcatggccgagagacagtacacacggatggaggactggctgaccgccaagctggcctacgagggcctgagcaagacctacctgtccaagacactggcccagtacacctccaagacatgcagcaactgtgggtttaccatcaccagcgccgactacgacagggtgctggagaagctgaagaagacagcaacaggctggatgaccacaattaacggcaaggagctgaaggtggagggccagattacctactacaacagatacaagagacagaacgtagtcaaggacctgtccgtcgagctggatagactgagcgaagaatctgtgaacaacgacatctcctcctggacaaagggcagaagcggagaagctctgagcctcctgaagaaaagattctcccatagacccgtgcaggagaagttcgtgtgcctgaactgcggcttcgagacacacgcagccgagcaagccgccctgaacatcgccagatcctggctgttcctgcggagccaggagtacaagaaataccagacaaacaagacaaccggcaacaccgataagagagccttcgtcgagacctggcagtccttttaccggaagaagcttaaggaggtgtggaaacctgccgtgcggtctggcggatctggcggaggctcctgcccacggcagcgtgatgttcagcgacgtgagcatcgacttcagccaggaggagtgggactacctggacctggagcagagggacctgtacagggacgtgatgctggagaactacagcaacctggtgagcctgggctgcttcgtgagcaagcccgacgtgatcagcctgctggagcagggcaaggagccctggaaggtggtgaggaagggcaggaggaggtaccccgacctggagaccaactacggatctggctccggcagcggccccaagaaaaagagaaaagtctaagctgccttctgcggggcttgccttctggccatgcccttcttctctcccttgcacctgtacctcttggtctttgaataaagcctgagtaggaaggctagcaaaaaaaaaaaaaaaaaaaaaaaaaaaaaaaaaaaaaaaaaaaaaaaaaaaaaaaaaaaaaaaaaaaaaaaaaaaaaaaa

SEQ ID NO: 15468 - RNA, 9485 nt, synthetic construct
  source 1..9485: mol_type = other RNA
aggaaataagagagaaaagaagagtaagaagaaatataagagccaccatggcccctaagaagaagcgtaaagtgagccggatggaacgcctcgtctacgaggtgcggcagaagtgcagaaacatcgaggacatctgcatctcctgcggatctctgaacgtgaccctggagcacccactgttcatcggcggcatgtgccagaactgtaaaaactgttttctggagtgtgcctatcaatacgacgatgacggctaccagagctactgcaccatctgttgcggcggaagagaggtgctgatgtgtggaaataacaactgctgccggtgcttctgcgtggaatgcgtggacctgctggtgggccccggcgccgcccaggccgctattaaggaagatccttggaactgctacatgtgcggccacaagggcacatacggcctgctgagacggagagaggactggcctagcagactgcagatgttcttcgccaataaccacgaccaggagttcgacccccctaaggtgtaccctcccgtccccgccgagaagagaaagcccatccgggtcctgagcctgttcgatggcatcgccaccggtctgctggtgctgaaggacctgggcatccaggtggataggtacattgcctccgaggtgtgcgaggactccatcaccgtgggaatggtgcgtcatcagggcaagatcatgtacgtgggcgacgtgcggagcgtgacacagaagcatatccaggagtggggccctttcgacctggtgatcggcggcagcccttgcaatgacctgagcatcgtgaacccagcccggaagggcctgtacgagggaaccggcagactgttcttcgagttttacagactgctgcacgacgcccggcctaaggaaggcgacgaccggcccttcttttggctgttcgagaatgtggtggccatgggagtcagcgacaagcgggatattagccggttcctggagagcaaccccgtgatgatcgatgccaaggaagtgagcgccgcccaccgggccagatacttctggggcaatctgcctggcatgaacagacccctggccagcaccgtgaacgacaagctggagctgcaggagtgcctggagcacggccggatcgccaagttcagcaaggtgagaaccatcaccacccgaagcaacagcatcaaacaaggcaaggaccagcactttcctgtgttcatgaacgagaaggaggacatcctgtggtgtaccgagatggagagagtgttcgggttcccagtccactacacagatgtcagcaacatgtctagactggccagacagagactgctgggaagaagctggtccgtccctgtgatcagacacctgttcgcccctctgaaggagtacttcgcctgcgtgagcagcggcaacagcaacgccaacagccggggccccagcttctctagcggcctggtgccactgtccctgagagggagccacatgggccccatggagatctacaaaaccgtgagcgcctggaagcggcagcctgtgcgcgtgctgagcctgtttcggaatatcgataaagtcctgaaaagcctgggattcctggagagcggctctggctccggcggtggcaccctgaagtacgtggaggatgtgacaaacgtggtcagacgggatgtggagaagtggggccccttcgatctggtgtacggcagcacccaacccctgggcagctcttgtgaccggtgccctggctggtacatgtttcagttccaccggatcctgcagtacgccctgccgagacaggagtcccagcggccattcttttggattttcatggacaacttgctgctgaccgaggatgaccaggaaactaccactcggttcctgcagaccgaagccgtgaccctgcaggacgtgagaggccgggactaccagaacgccatgcgggtgtggtccaacatccctggactgaaaagcaagcacgcacctctgacccctaaagaagaggagtacctgcaggcccaggtgcggagcagaagcaagctggacgcccctaaggtggatctgctggtgaagaattgcctcctgcccctgagagagtacttcaagtatttcagccagaatagtctgcccctgggaggcagcggcggcggcgccctggtgacatttgaggacgtcgccgtgcggttcacccaggaggaatgggctctgctggatccttctcagaaaatcctgtaccgggacgtgatgagagagacataccggaatctgacctccgtgggcatcaactgggaatgttgggaccttgaagcctgcttcagaagcctgggaagaaacctgagagtgcaggtggtgaagagaaagtgcgagctgaccaacagcggcccctgcgccgagggcggcccaagcagcggcgcccctcctcccagcggcggcagcccagccggctccccaacctctaccgaggagggcacctctgagtccgccacccccgagagcggccctggcacctccaccgagcccagcgagggcagcgcacccggcagccctgccggcagccccacctccacagaggagggaaccagcaccgagcccagcgaaggcagcgccccaggcaccagcaccgagcctagtgagcaggagattaaacggatcaacaagatcagaagaagacttgtgaaagacagcaacaccaagaaggccggcaagacaggccccatgaaaaccctgctggttagagtgatgacacccgatctgagagagcggctggaaaacctgagaaagaagcctgaaaatatcccccagcccatcagcaatacatctagagccaacctgaataagctgctgaccgattacaccgaaatgaagaaggcgatcctgcatgtgtactgggaagagttccagaaggaccctgtgggcctgatgagccgggtggcccagcctgccagcaagaagatcgatcagaacaagctgaaacctgagatggacgagaagggcaacctgaccaccgccggctttgcctgctctcagtgtggccagcccctgttcgtgtacaagctggagcaggtgtctgagaagggcaaggcttacaccaactacttcggacggtgcaatgtggccgagcacgaaaagctgatcctgctggcccagctgaagcccgagaaggatagcgacgaagccgtgacatatagcctgggaaagtttgggcagagggccctggatttctacagcattcatgtgaccaaggagtccacccaccccgtgaagcccctggcccagatcgccggaaacagatacgcctccggacctgtgggaaaggccctgagcgacgcatgtatgggcacaatcgcctccttcctgtctaagtaccaggacatcatcatcgaacaccagaaggtggtgaagggcaaccagaagagactggagagcctgcgggagctggccggcaaggaaaacctggaataccctagcgtgaccctgccacctcagcctcacaccaaggagggcgttgatgcctacaacgaagtgatcgcccgggtgcgaatgtgggtgaacctgaacctgtggcagaagctgaagctaagcagagatgatgccaagcctctgctgagactgaagggattcccttcctttcctctggtcgagagacaggccaacgaagtggactggtgggacatggtgtgtaacgtgaagaagctgatcaacgagaaaaaggaggatggcaaggtgttttggcagaatctggctggctacaagagacaggaagccctgagaccatacctgagcagcgaggaagatcggaagaagggaaagaaattcgctcggtaccagctgggcgacctgctgctgcacctggaaaagaagcacggcgaggactggggaaaggtgtacgacgaggcctgggagcggattgacaagaaagtggaaggcctgagcaagcacatcaagctggaagaggaacggagaagcgaggacgcccagagcaaggccgccctgaccgactggctgcgggctaaggccagcttcgtgatcgagggcctgaaggaggccgacaaggacgagttctgcagatgcgagctgaagctgcagaagtggtacggggacctgcggggaaagcccttcgccatcgaagccgagaacagcatcctggacatcagcggcttcagcaagcagtacaactgtgccttcatctggcagaaggacggcgtgaagaagctgaacctgtacctgatcatcaactacttcaagggcggcaagctgcggttcaagaagatcaaacctgaagccttcgaagccaacagattctacaccgtgatcaacaaaaagagcggcgagatcgtgcccatggaggtgaacttcaacttcgacgaccccaacctgatcatcctgcctctggcctttggcaagagacagggcagagaattcatctggaacgacctgctgtccctggaaaccggcagcctgaagctggccaacggaagagtgatcgagaagacactgtacaacagaagaacccggcaggatgagcctgccctgttcgtggccctgaccttcgagcggcgggaggtcctggactcctccaatatcaaaccaatgaacctgatcggcgtggcaagaggcgaaaacatccccgccgtgatcgccctgaccgaccccgagggctgcccactgagccggtttaaggatagcctgggaaacccaacccacatcctgagaatcggcgagagctataaggagaagcagcggaccatccaggccaagaaggaggtggagcagcggagagccggcggctacagccggaagtacgccagcaaagccaagaatctggcagacgatatggtgagaaacaccgctagagatctgctgtactacgccgtgacccaggatgccatgctgatcttcgccaacctgagccggggcttcggccggcagggcaagcggaccttcatggccgagagacagtacacacggatggaggactggctgaccgccaagctggcctacgagggcctgagcaagacctacctgtccaagacactggcccagtacacctccaagacatgcagcaactgtgggtttaccatcaccagcgccgactacgacagggtgctggagaagctgaagaagacagcaacaggctggatgaccacaattaacggcaaggagctgaaggtggagggccagattacctactacaacagatacaagagacagaacgtagtcaaggacctgtccgtcgagctggatagactgagcgaagaatctgtgaacaacgacatctcctcctggacaaagggcagaagcggagaagctctgagcctcctgaagaaaagattctcccatagacccgtgcaggagaagttcgtgtgcctgaactgcggcttcgagacacacgcagccgagcaagccgccctgaacatcgccagatcctggctgttcctgcggagccaggagtacaagaaataccagacaaacaagacaaccggcaacaccgataagagagccttcgtcgagacctggcagtccttttaccggaagaagcttaaggaggtgtggaaacctgccgtgcggtctggcggatctggcggaggctccttccaggtgagcgtgaccttccaggacgtggccgtggacttcagcagggacgagtggaagaggctggacgacgcccagaaggccctgtacagggacgtgatgctggagaactacgagaacctggtgagcctgggcctgcccgtgagcaagctggacgtgatcagcctgctggagaggagggaggcccccaggagggccaaggagagggtgcccagggacctgccccccgacagcatcagccagggcggcccaagcagcggcgcccctcctcccagcggcggcagcccagccggctccccaacctctaccgaggagggcacctctgagtccgccacccccgagagcggccctggcacctccaccgagcccagcgagggcagcgcacccggcagccctgccggcagccccacctccacagaggagggaaccagcaccgagcccagcgaaggcagcgccccaggcaccagcaccgagcctagtgagcaggagattaaacggatcaacaagatcagaagaagacttgtgaaagacagcaacaccaagaaggccggcaagacaggccccatgaaaaccctgctggttagagtgatgacacccgatctgagagagcggctggaaaacctgagaaagaagcctgaaaatatcccccagcccatcagcaatacatctagagccaacctgaataagctgctgaccgattacaccgaaatgaagaaggcgatcctgcatgtgtactgggaagagttccagaaggaccctgtgggcctgatgagccgggtggcccagcctgccagcaagaagatcgatcagaacaagctgaaacctgagatggacgagaagggcaacctgaccaccgccggctttgcctgctctcagtgtggccagcccctgttcgtgtacaagctggagcaggtgtctgagaagggcaaggcttacaccaactacttcggacggtgcaatgtggccgagcacgaaaagctgatcctgctggcccagctgaagcccgagaaggatagcgacgaagccgtgacatatagcctgggaaagtttgggcagagggccctggatttctacagcattcatgtgaccaaggagtccacccaccccgtgaagcccctggcccagatcgccggaaacagatacgcctccggacctgtgggaaaggccctgagcgacgcatgtatgggcacaatcgcctccttcctgtctaagtaccaggacatcatcatcgaacaccagaaggtggtgaagggcaaccagaagagactggagagcctgcgggagctggccggcaaggaaaacctggaataccctagcgtgaccctgccacctcagcctcacaccaaggagggcgttgatgcctacaacgaagtgatcgcccgggtgcgaatgtgggtgaacctgaacctgtggcagaagctgaagctaagcagagatgatgccaagcctctgctgagactgaagggattcccttcctttcctctggtcgagagacaggccaacgaagtggactggtgggacatggtgtgtaacgtgaagaagctgatcaacgagaaaaaggaggatggcaaggtgttttggcagaatctggctggctacaagagacaggaagccctgagaccatacctgagcagcgaggaagatcggaagaagggaaagaaattcgctcggtaccagctgggcgacctgctgctgcacctggaaaagaagcacggcgaggactggggaaaggtgtacgacgaggcctgggagcggattgacaagaaagtggaaggcctgagcaagcacatcaagctggaagaggaacggagaagcgaggacgcccagagcaaggccgccctgaccgactggctgcgggctaaggccagcttcgtgatcgagggcctgaaggaggccgacaaggacgagttctgcagatgcgagctgaagctgcagaagtggtacggggacctgcggggaaagcccttcgccatcgaagccgagaacagcatcctggacatcagcggcttcagcaagcagtacaactgtgccttcatctggcagaaggacggcgtgaagaagctgaacctgtacctgatcatcaactacttcaagggcggcaagctgcggttcaagaagatcaaacctgaagccttcgaagccaacagattctacaccgtgatcaacaaaaagagcggcgagatcgtgcccatggaggtgaacttcaacttcgacgaccccaacctgatcatcctgcctctggcctttggcaagagacagggcagagaattcatctggaacgacctgctgtccctggaaaccggcagcctgaagctggccaacggaagagtgatcgagaagacactgtacaacagaagaacccggcaggatgagcctgccctgttcgtggccctgaccttcgagcggcgggaggtcctggactcctccaatatcaaaccaatgaacctgatcggcgtggcaagaggcgaaaacatccccgccgtgatcgccctgaccgaccccgagggctgcccactgagccggtttaaggatagcctgggaaacccaacccacatcctgagaatcggcgagagctataaggagaagcagcggaccatccaggccaagaaggaggtggagcagcggagagccggcggctacagccggaagtacgccagcaaagccaagaatctggcagacgatatggtgagaaacaccgctagagatctgctgtactacgccgtgacccaggatgccatgctgatcttcgccaacctgagccggggcttcggccggcagggcaagcggaccttcatggccgagagacagtacacacggatggaggactggctgaccgccaagctggcctacgagggcctgagcaagacctacctgtccaagacactggcccagtacacctccaagacatgcagcaactgtgggtttaccatcaccagcgccgactacgacagggtgctggagaagctgaagaagacagcaacaggctggatgaccacaattaacggcaaggagctgaaggtggagggccagattacctactacaacagatacaagagacagaacgtagtcaaggacctgtccgtcgagctggatagactgagcgaagaatctgtgaacaacgacatctcctcctggacaaagggcagaagcggagaagctctgagcctcctgaagaaaagattctcccatagacccgtgcaggagaagttcgtgtgcctgaactgcggcttcgagacacacgcagccgagcaagccgccctgaacatcgccagatcctggctgttcctgcggagccaggagtacaagaaataccagacaaacaagacaaccggcaacaccgataagagagccttcgtcgagacctggcagtccttttaccggaagaagcttaaggaggtgtggaaacctgccgtgcggtctggcggatctggcggaggctcctttccaggtgagcgtgaccttccaggacgtggccgtggacttcagcagggacgagtggaagaggctggacgacgcccagaaggccctgtacagggacgtgatgctggagaactacgagaacctggtgagcctgggcctgcccgtgagcaagctggacgtgatcagcctgctggagaggagggaggcccccaggagggccaaggagagggtgcccagggacctgccccccgacagcatcagccagggatctggctccggcagcggccccaagaaaaagagaaaagtctaagctgccttctgcggggcttgccttctggccatgcccttcttctctcccttgcacctgtacctcttggtctttgaataaagcctgagtaggaaggctagcaaaaaaaaaaaaaaaaaaaaaaaaaaaaaaaaaaaaaaaaaaaaaaaaaaaaaaaaaaaaaaaaaaaaaaaaaaaaaaaa

SEQ ID NO: 15469 - RNA, 9485 nt, synthetic construct
  source 1..9485: mol_type = other RNA
aggaaataagagagaaaagaagagtaagaagaaatataagagccaccatggcccctaagaagaagcgtaaagtgagccggatggaacgcctcgtctacgaggtgcggcagaagtgcagaaacatcgaggacatctgcatctcctgcggatctctgaacgtgaccctggagcacccactgttcatcggcggcatgtgccagaactgtaaaaactgttttctggagtgtgcctatcaatacgacgatgacggctaccagagctactgcaccatctgttgcggcggaagagaggtgctgatgtgtggaaataacaactgctgccggtgcttctgcgtggaatgcgtggacctgctggtgggccccggcgccgcccaggccgctattaaggaagatccttggaactgctacatgtgcggccacaagggcacatacggcctgctgagacggagagaggactggcctagcagactgcagatgttcttcgccaataaccacgaccaggagttcgacccccctaaggtgtaccctcccgtccccgccgagaagagaaagcccatccgggtcctgagcctgttcgatggcatcgccaccggtctgctggtgctgaaggacctgggcatccaggtggataggtacattgcctccgaggtgtgcgaggactccatcaccgtgggaatggtgcgtcatcagggcaagatcatgtacgtgggcgacgtgcggagcgtgacacagaagcatatccaggagtggggccctttcgacctggtgatcggcggcagcccttgcaatgacctgagcatcgtgaacccagcccggaagggcctgtacgagggaaccggcagactgttcttcgagttttacagactgctgcacgacgcccggcctaaggaaggcgacgaccggcccttcttttggctgttcgagaatgtggtggccatgggagtcagcgacaagcgggatattagccggttcctggagagcaaccccgtgatgatcgatgccaaggaagtgagcgccgcccaccgggccagatacttctggggcaatctgcctggcatgaacagacccctggccagcaccgtgaacgacaagctggagctgcaggagtgcctggagcacggccggatcgccaagttcagcaaggtgagaaccatcaccacccgaagcaacagcatcaaacaaggcaaggaccagcactttcctgtgttcatgaacgagaaggaggacatcctgtggtgtaccgagatggagagagtgttcgggttcccagtccactacacagatgtcagcaacatgtctagactggccagacagagactgctgggaagaagctggtccgtccctgtgatcagacacctgttcgcccctctgaaggagtacttcgcctgcgtgagcagcggcaacagcaacgccaacagccggggccccagcttctctagcggcctggtgccactgtccctgagagggagccacatgggccccatggagatctacaaaaccgtgagcgcctggaagcggcagcctgtgcgcgtgctgagcctgtttcggaatatcgataaagtcctgaaaagcctgggattcctggagagcggctctggctccggcggtggcaccctgaagtacgtggaggatgtgacaaacgtggtcagacgggatgtggagaagtggggccccttcgatctggtgtacggcagcacccaacccctgggcagctcttgtgaccggtgccctggctggtacatgtttcagttccaccggatcctgcagtacgccctgccgagacaggagtcccagcggccattcttttggattttcatggacaacttgctgctgaccgaggatgaccaggaaactaccactcggttcctgcagaccgaagccgtgaccctgcaggacgtgagaggccgggactaccagaacgccatgcgggtgtggtccaacatccctggactgaaaagcaagcacgcacctctgacccctaaagaagaggagtacctgcaggcccaggtgcggagcagaagcaagctggacgcccctaaggtggatctgctggtgaagaattgcctcctgcccctgagagagtacttcaagtatttcagccagaatagtctgcccctgggaggcagcggcggcggcgccctggtgacatttgaggacgtcgccgtgcggttcacccaggaggaatgggctctgctggatccttctcagaaaatcctgtaccgggacgtgatgagagagacataccggaatctgacctccgtgggcatcaactgggaatgttgggaccttgaagcctgcttcagaagcctgggaagaaacctgagagtgcaggtggtgaagagaaagtgcgagctgaccaacagcggcccctgcgccgagggcggcccaagcagcggcgcccctcctcccagcggcggcagcccagccggctccccaacctctaccgaggagggcacctctgagtccgccacccccgagagcggccctggcacctccaccgagcccagcgagggcagcgcacccggcagccctgccggcagccccacctccacagaggagggaaccagcaccgagcccagcgaaggcagcgccccaggcaccagcaccgagcctagtgagcaggagattaaacggatcaacaagatcagaagaagacttgtgaaagacagcaacaccaagaaggccggcaagacaggccccatgaaaaccctgctggttagagtgatgacacccgatctgagagagcggctggaaaacctgagaaagaagcctgaaaatatcccccagcccatcagcaatacatctagagccaacctgaataagctgctgaccgattacaccgaaatgaagaaggcgatcctgcatgtgtactgggaagagttccagaaggaccctgtgggcctgatgagccgggtggcccagcctgccagcaagaagatcgatcagaacaagctgaaacctgagatggacgagaagggcaacctgaccaccgccggctttgcctgctctcagtgtggccagcccctgttcgtgtacaagctggagcaggtgtctgagaagggcaaggcttacaccaactacttcggacggtgcaatgtggccgagcacgaaaagctgatcctgctggcccagctgaagcccgagaaggatagcgacgaagccgtgacatatagcctgggaaagtttgggcagagggccctggatttctacagcattcatgtgaccaaggagtccacccaccccgtgaagcccctggcccagatcgccggaaacagatacgcctccggacctgtgggaaaggccctgagcgacgcatgtatgggcacaatcgcctccttcctgtctaagtaccaggacatcatcatcgaacaccagaaggtggtgaagggcaaccagaagagactggagagcctgcgggagctggccggcaaggaaaacctggaataccctagcgtgaccctgccacctcagcctcacaccaaggagggcgttgatgcctacaacgaagtgatcgcccgggtgcgaatgtgggtgaacctgaacctgtggcagaagctgaagctaagcagagatgatgccaagcctctgctgagactgaagggattcccttcctttcctctggtcgagagacaggccaacgaagtggactggtgggacatggtgtgtaacgtgaagaagctgatcaacgagaaaaaggaggatggcaaggtgttttggcagaatctggctggctacaagagacaggaagccctgagaccatacctgagcagcgaggaagatcggaagaagggaaagaaattcgctcggtaccagctgggcgacctgctgctgcacctggaaaagaagcacggcgaggactggggaaaggtgtacgacgaggcctgggagcggattgacaagaaagtggaaggcctgagcaagcacatcaagctggaagaggaacggagaagcgaggacgcccagagcaaggccgccctgaccgactggctgcgggctaaggccagcttcgtgatcgagggcctgaaggaggccgacaaggacgagttctgcagatgcgagctgaagctgcagaagtggtacggggacctgcggggaaagcccttcgccatcgaagccgagaacagcatcctggacatcagcggcttcagcaagcagtacaactgtgccttcatctggcagaaggacggcgtgaagaagctgaacctgtacctgatcatcaactacttcaagggcggcaagctgcggttcaagaagatcaaacctgaagccttcgaagccaacagattctacaccgtgatcaacaaaaagagcggcgagatcgtgcccatggaggtgaacttcaacttcgacgaccccaacctgatcatcctgcctctggcctttggcaagagacagggcagagaattcatctggaacgacctgctgtccctggaaaccggcagcctgaagctggccaacggaagagtgatcgagaagacactgtacaacagaagaacccggcaggatgagcctgccctgttcgtggccctgaccttcgagcggcgggaggtcctggactcctccaatatcaaaccaatgaacctgatcggcgtggcaagaggcgaaaacatccccgccgtgatcgccctgaccgaccccgagggctgcccactgagccggtttaaggatagcctgggaaacccaacccacatcctgagaatcggcgagagctataaggagaagcagcggaccatccaggccaagaaggaggtggagcagcggagagccggcggctacagccggaagtacgccagcaaagccaagaatctggcagacgatatggtgagaaacaccgctagagatctgctgtactacgccgtgacccaggatgccatgctgatcttcgccaacctgagccggggcttcggccggcagggcaagcggaccttcatggccgagagacagtacacacggatggaggactggctgaccgccaagctggcctacgagggcctgagcaagacctacctgtccaagacactggcccagtacacctccaagacatgcagcaactgtgggtttaccatcaccagcgccgactacgacagggtgctggagaagctgaagaagacagcaacaggctggatgaccacaattaacggcaaggagctgaaggtggagggccagattacctactacaacagatacaagagacagaacgtagtcaaggacctgtccgtcgagctggatagactgagcgaagaatctgtgaacaacgacatctcctcctggacaaagggcagaagcggagaagctctgagcctcctgaagaaaagattctcccatagacccgtgcaggagaagttcgtgtgcctgaactgcggcttcgagacacacgcagccgagcaagccgccctgaacatcgccagatcctggctgttcctgcggagccaggagtacaagaaataccagacaaacaagacaaccggcaacaccgataagagagccttcgtcgagacctggcagtccttttaccggaagaagcttaaggaggtgtggaaacctgccgtgcggtctggcggatctggcggaggctcccaggccgaggtgaccttcgaggacgtggccgtgctgttcagcagggaggagtggggcaggctgagccccgcccagaggggcctgtacagggacgtgatgctggagacctacaggaacctggtgagcctgggcgccggccccgccggccccaagcccggcgtgatcacccagctggagaggggcgacgagccctgggtgctggacgcccagggcgccaagggcaaggagaggctgagggtgagcggcggcccaagcagcggcgcccctcctcccagcggcggcagcccagccggctccccaacctctaccgaggagggcacctctgagtccgccacccccgagagcggccctggcacctccaccgagcccagcgagggcagcgcacccggcagccctgccggcagccccacctccacagaggagggaaccagcaccgagcccagcgaaggcagcgccccaggcaccagcaccgagcctagtgagcaggagattaaacggatcaacaagatcagaagaagacttgtgaaagacagcaacaccaagaaggccggcaagacaggccccatgaaaaccctgctggttagagtgatgacacccgatctgagagagcggctggaaaacctgagaaagaagcctgaaaatatcccccagcccatcagcaatacatctagagccaacctgaataagctgctgaccgattacaccgaaatgaagaaggcgatcctgcatgtgtactgggaagagttccagaaggaccctgtgggcctgatgagccgggtggcccagcctgccagcaagaagatcgatcagaacaagctgaaacctgagatggacgagaagggcaacctgaccaccgccggctttgcctgctctcagtgtggccagcccctgttcgtgtacaagctggagcaggtgtctgagaagggcaaggcttacaccaactacttcggacggtgcaatgtggccgagcacgaaaagctgatcctgctggcccagctgaagcccgagaaggatagcgacgaagccgtgacatatagcctgggaaagtttgggcagagggccctggatttctacagcattcatgtgaccaaggagtccacccaccccgtgaagcccctggcccagatcgccggaaacagatacgcctccggacctgtgggaaaggccctgagcgacgcatgtatgggcacaatcgcctccttcctgtctaagtaccaggacatcatcatcgaacaccagaaggtggtgaagggcaaccagaagagactggagagcctgcgggagctggccggcaaggaaaacctggaataccctagcgtgaccctgccacctcagcctcacaccaaggagggcgttgatgcctacaacgaagtgatcgcccgggtgcgaatgtgggtgaacctgaacctgtggcagaagctgaagctaagcagagatgatgccaagcctctgctgagactgaagggattcccttcctttcctctggtcgagagacaggccaacgaagtggactggtgggacatggtgtgtaacgtgaagaagctgatcaacgagaaaaaggaggatggcaaggtgttttggcagaatctggctggctacaagagacaggaagccctgagaccatacctgagcagcgaggaagatcggaagaagggaaagaaattcgctcggtaccagctgggcgacctgctgctgcacctggaaaagaagcacggcgaggactggggaaaggtgtacgacgaggcctgggagcggattgacaagaaagtggaaggcctgagcaagcacatcaagctggaagaggaacggagaagcgaggacgcccagagcaaggccgccctgaccgactggctgcgggctaaggccagcttcgtgatcgagggcctgaaggaggccgacaaggacgagttctgcagatgcgagctgaagctgcagaagtggtacggggacctgcggggaaagcccttcgccatcgaagccgagaacagcatcctggacatcagcggcttcagcaagcagtacaactgtgccttcatctggcagaaggacggcgtgaagaagctgaacctgtacctgatcatcaactacttcaagggcggcaagctgcggttcaagaagatcaaacctgaagccttcgaagccaacagattctacaccgtgatcaacaaaaagagcggcgagatcgtgcccatggaggtgaacttcaacttcgacgaccccaacctgatcatcctgcctctggcctttggcaagagacagggcagagaattcatctggaacgacctgctgtccctggaaaccggcagcctgaagctggccaacggaagagtgatcgagaagacactgtacaacagaagaacccggcaggatgagcctgccctgttcgtggccctgaccttcgagcggcgggaggtcctggactcctccaatatcaaaccaatgaacctgatcggcgtggcaagaggcgaaaacatccccgccgtgatcgccctgaccgaccccgagggctgcccactgagccggtttaaggatagcctgggaaacccaacccacatcctgagaatcggcgagagctataaggagaagcagcggaccatccaggccaagaaggaggtggagcagcggagagccggcggctacagccggaagtacgccagcaaagccaagaatctggcagacgatatggtgagaaacaccgctagagatctgctgtactacgccgtgacccaggatgccatgctgatcttcgccaacctgagccggggcttcggccggcagggcaagcggaccttcatggccgagagacagtacacacggatggaggactggctgaccgccaagctggcctacgagggcctgagcaagacctacctgtccaagacactggcccagtacacctccaagacatgcagcaactgtgggtttaccatcaccagcgccgactacgacagggtgctggagaagctgaagaagacagcaacaggctggatgaccacaattaacggcaaggagctgaaggtggagggccagattacctactacaacagatacaagagacagaacgtagtcaaggacctgtccgtcgagctggatagactgagcgaagaatctgtgaacaacgacatctcctcctggacaaagggcagaagcggagaagctctgagcctcctgaagaaaagattctcccatagacccgtgcaggagaagttcgtgtgcctgaactgcggcttcgagacacacgcagccgagcaagccgccctgaacatcgccagatcctggctgttcctgcggagccaggagtacaagaaataccagacaaacaagacaaccggcaacaccgataagagagccttcgtcgagacctggcagtccttttaccggaagaagcttaaggaggtgtggaaacctgccgtgcggtctggcggatctggcggaggctcctcaggccgaggtgaccttcgaggacgtggccgtgctgttcagcagggaggagtggggcaggctgagccccgcccagaggggcctgtacagggacgtgatgctggagacctacaggaacctggtgagcctgggcgccggccccgccggccccaagcccggcgtgatcacccagctggagaggggcgacgagccctgggtgctggacgcccagggcgccaagggcaaggagaggctgagggtgagcggatctggctccggcagcggccccaagaaaaagagaaaagtctaagctgccttctgcggggcttgccttctggccatgcccttcttctctcccttgcacctgtacctcttggtctttgaataaagcctgagtaggaaggctagcaaaaaaaaaaaaaaaaaaaaaaaaaaaaaaaaaaaaaaaaaaaaaaaaaaaaaaaaaaaaaaaaaaaaaaaaaaaaaaaa

SEQ ID NO: 15470 - RNA, 9485 nt, synthetic construct
  source 1..9485: mol_type = other RNA
aggaaataagagagaaaagaagagtaagaagaaatataagagccaccatggcccctaagaagaagcgtaaagtgagccggatggaacgcctcgtctacgaggtgcggcagaagtgcagaaacatcgaggacatctgcatctcctgcggatctctgaacgtgaccctggagcacccactgttcatcggcggcatgtgccagaactgtaaaaactgttttctggagtgtgcctatcaatacgacgatgacggctaccagagctactgcaccatctgttgcggcggaagagaggtgctgatgtgtggaaataacaactgctgccggtgcttctgcgtggaatgcgtggacctgctggtgggccccggcgccgcccaggccgctattaaggaagatccttggaactgctacatgtgcggccacaagggcacatacggcctgctgagacggagagaggactggcctagcagactgcagatgttcttcgccaataaccacgaccaggagttcgacccccctaaggtgtaccctcccgtccccgccgagaagagaaagcccatccgggtcctgagcctgttcgatggcatcgccaccggtctgctggtgctgaaggacctgggcatccaggtggataggtacattgcctccgaggtgtgcgaggactccatcaccgtgggaatggtgcgtcatcagggcaagatcatgtacgtgggcgacgtgcggagcgtgacacagaagcatatccaggagtggggccctttcgacctggtgatcggcggcagcccttgcaatgacctgagcatcgtgaacccagcccggaagggcctgtacgagggaaccggcagactgttcttcgagttttacagactgctgcacgacgcccggcctaaggaaggcgacgaccggcccttcttttggctgttcgagaatgtggtggccatgggagtcagcgacaagcgggatattagccggttcctggagagcaaccccgtgatgatcgatgccaaggaagtgagcgccgcccaccgggccagatacttctggggcaatctgcctggcatgaacagacccctggccagcaccgtgaacgacaagctggagctgcaggagtgcctggagcacggccggatcgccaagttcagcaaggtgagaaccatcaccacccgaagcaacagcatcaaacaaggcaaggaccagcactttcctgtgttcatgaacgagaaggaggacatcctgtggtgtaccgagatggagagagtgttcgggttcccagtccactacacagatgtcagcaacatgtctagactggccagacagagactgctgggaagaagctggtccgtccctgtgatcagacacctgttcgcccctctgaaggagtacttcgcctgcgtgagcagcggcaacagcaacgccaacagccggggccccagcttctctagcggcctggtgccactgtccctgagagggagccacatgggccccatggagatctacaaaaccgtgagcgcctggaagcggcagcctgtgcgcgtgctgagcctgtttcggaatatcgataaagtcctgaaaagcctgggattcctggagagcggctctggctccggcggtggcaccctgaagtacgtggaggatgtgacaaacgtggtcagacgggatgtggagaagtggggccccttcgatctggtgtacggcagcacccaacccctgggcagctcttgtgaccggtgccctggctggtacatgtttcagttccaccggatcctgcagtacgccctgccgagacaggagtcccagcggccattcttttggattttcatggacaacttgctgctgaccgaggatgaccaggaaactaccactcggttcctgcagaccgaagccgtgaccctgcaggacgtgagaggccgggactaccagaacgccatgcgggtgtggtccaacatccctggactgaaaagcaagcacgcacctctgacccctaaagaagaggagtacctgcaggcccaggtgcggagcagaagcaagctggacgcccctaaggtggatctgctggtgaagaattgcctcctgcccctgagagagtacttcaagtatttcagccagaatagtctgcccctgggaggcagcggcggcggcgccctggtgacatttgaggacgtcgccgtgcggttcacccaggaggaatgggctctgctggatccttctcagaaaatcctgtaccgggacgtgatgagagagacataccggaatctgacctccgtgggcatcaactgggaatgttgggaccttgaagcctgcttcagaagcctgggaagaaacctgagagtgcaggtggtgaagagaaagtgcgagctgaccaacagcggcccctgcgccgagggcggcccaagcagcggcgcccctcctcccagcggcggcagcccagccggctccccaacctctaccgaggagggcacctctgagtccgccacccccgagagcggccctggcacctccaccgagcccagcgagggcagcgcacccggcagccctgccggcagccccacctccacagaggagggaaccagcaccgagcccagcgaaggcagcgccccaggcaccagcaccgagcctagtgagcaggagattaaacggatcaacaagatcagaagaagacttgtgaaagacagcaacaccaagaaggccggcaagacaggccccatgaaaaccctgctggttagagtgatgacacccgatctgagagagcggctggaaaacctgagaaagaagcctgaaaatatcccccagcccatcagcaatacatctagagccaacctgaataagctgctgaccgattacaccgaaatgaagaaggcgatcctgcatgtgtactgggaagagttccagaaggaccctgtgggcctgatgagccgggtggcccagcctgccagcaagaagatcgatcagaacaagctgaaacctgagatggacgagaagggcaacctgaccaccgccggctttgcctgctctcagtgtggccagcccctgttcgtgtacaagctggagcaggtgtctgagaagggcaaggcttacaccaactacttcggacggtgcaatgtggccgagcacgaaaagctgatcctgctggcccagctgaagcccgagaaggatagcgacgaagccgtgacatatagcctgggaaagtttgggcagagggccctggatttctacagcattcatgtgaccaaggagtccacccaccccgtgaagcccctggcccagatcgccggaaacagatacgcctccggacctgtgggaaaggccctgagcgacgcatgtatgggcacaatcgcctccttcctgtctaagtaccaggacatcatcatcgaacaccagaaggtggtgaagggcaaccagaagagactggagagcctgcgggagctggccggcaaggaaaacctggaataccctagcgtgaccctgccacctcagcctcacaccaaggagggcgttgatgcctacaacgaagtgatcgcccgggtgcgaatgtgggtgaacctgaacctgtggcagaagctgaagctaagcagagatgatgccaagcctctgctgagactgaagggattcccttcctttcctctggtcgagagacaggccaacgaagtggactggtgggacatggtgtgtaacgtgaagaagctgatcaacgagaaaaaggaggatggcaaggtgttttggcagaatctggctggctacaagagacaggaagccctgagaccatacctgagcagcgaggaagatcggaagaagggaaagaaattcgctcggtaccagctgggcgacctgctgctgcacctggaaaagaagcacggcgaggactggggaaaggtgtacgacgaggcctgggagcggattgacaagaaagtggaaggcctgagcaagcacatcaagctggaagaggaacggagaagcgaggacgcccagagcaaggccgccctgaccgactggctgcgggctaaggccagcttcgtgatcgagggcctgaaggaggccgacaaggacgagttctgcagatgcgagctgaagctgcagaagtggtacggggacctgcggggaaagcccttcgccatcgaagccgagaacagcatcctggacatcagcggcttcagcaagcagtacaactgtgccttcatctggcagaaggacggcgtgaagaagctgaacctgtacctgatcatcaactacttcaagggcggcaagctgcggttcaagaagatcaaacctgaagccttcgaagccaacagattctacaccgtgatcaacaaaaagagcggcgagatcgtgcccatggaggtgaacttcaacttcgacgaccccaacctgatcatcctgcctctggcctttggcaagagacagggcagagaattcatctggaacgacctgctgtccctggaaaccggcagcctgaagctggccaacggaagagtgatcgagaagacactgtacaacagaagaacccggcaggatgagcctgccctgttcgtggccctgaccttcgagcggcgggaggtcctggactcctccaatatcaaaccaatgaacctgatcggcgtggcaagaggcgaaaacatccccgccgtgatcgccctgaccgaccccgagggctgcccactgagccggtttaaggatagcctgggaaacccaacccacatcctgagaatcggcgagagctataaggagaagcagcggaccatccaggccaagaaggaggtggagcagcggagagccggcggctacagccggaagtacgccagcaaagccaagaatctggcagacgatatggtgagaaacaccgctagagatctgctgtactacgccgtgacccaggatgccatgctgatcttcgccaacctgagccggggcttcggccggcagggcaagcggaccttcatggccgagagacagtacacacggatggaggactggctgaccgccaagctggcctacgagggcctgagcaagacctacctgtccaagacactggcccagtacacctccaagacatgcagcaactgtgggtttaccatcaccagcgccgactacgacagggtgctggagaagctgaagaagacagcaacaggctggatgaccacaattaacggcaaggagctgaaggtggagggccagattacctactacaacagatacaagagacagaacgtagtcaaggacctgtccgtcgagctggatagactgagcgaagaatctgtgaacaacgacatctcctcctggacaaagggcagaagcggagaagctctgagcctcctgaagaaaagattctcccatagacccgtgcaggagaagttcgtgtgcctgaactgcggcttcgagacacacgcagccgagcaagccgccctgaacatcgccagatcctggctgttcctgcggagccaggagtacaagaaataccagacaaacaagacaaccggcaacaccgataagagagccttcgtcgagacctggcagtccttttaccggaagaagcttaaggaggtgtggaaacctgccgtgcggtctggcggatctggcggaggctccggcaagatgagcgtgaccttcgaggacgtggccctgtacttcagccccgaggagtgggccaagctgagcggctgccagaggcagctgtaccaggaggtgatgctggagaactaccagatggtggccagcctgggctgggccaacgtgaagcccgagatcatctgcaagatggagagggaggagaccccctgcgtgcccgacgtgcccggcaagcagcagaggcaccagagccccgtgcccgtgggcggcccaagcagcggcgcccctcctcccagcggcggcagcccagccggctccccaacctctaccgaggagggcacctctgagtccgccacccccgagagcggccctggcacctccaccgagcccagcgagggcagcgcacccggcagccctgccggcagccccacctccacagaggagggaaccagcaccgagcccagcgaaggcagcgccccaggcaccagcaccgagcctagtgagcaggagattaaacggatcaacaagatcagaagaagacttgtgaaagacagcaacaccaagaaggccggcaagacaggccccatgaaaaccctgctggttagagtgatgacacccgatctgagagagcggctggaaaacctgagaaagaagcctgaaaatatcccccagcccatcagcaatacatctagagccaacctgaataagctgctgaccgattacaccgaaatgaagaaggcgatcctgcatgtgtactgggaagagttccagaaggaccctgtgggcctgatgagccgggtggcccagcctgccagcaagaagatcgatcagaacaagctgaaacctgagatggacgagaagggcaacctgaccaccgccggctttgcctgctctcagtgtggccagcccctgttcgtgtacaagctggagcaggtgtctgagaagggcaaggcttacaccaactacttcggacggtgcaatgtggccgagcacgaaaagctgatcctgctggcccagctgaagcccgagaaggatagcgacgaagccgtgacatatagcctgggaaagtttgggcagagggccctggatttctacagcattcatgtgaccaaggagtccacccaccccgtgaagcccctggcccagatcgccggaaacagatacgcctccggacctgtgggaaaggccctgagcgacgcatgtatgggcacaatcgcctccttcctgtctaagtaccaggacatcatcatcgaacaccagaaggtggtgaagggcaaccagaagagactggagagcctgcgggagctggccggcaaggaaaacctggaataccctagcgtgaccctgccacctcagcctcacaccaaggagggcgttgatgcctacaacgaagtgatcgcccgggtgcgaatgtgggtgaacctgaacctgtggcagaagctgaagctaagcagagatgatgccaagcctctgctgagactgaagggattcccttcctttcctctggtcgagagacaggccaacgaagtggactggtgggacatggtgtgtaacgtgaagaagctgatcaacgagaaaaaggaggatggcaaggtgttttggcagaatctggctggctacaagagacaggaagccctgagaccatacctgagcagcgaggaagatcggaagaagggaaagaaattcgctcggtaccagctgggcgacctgctgctgcacctggaaaagaagcacggcgaggactggggaaaggtgtacgacgaggcctgggagcggattgacaagaaagtggaaggcctgagcaagcacatcaagctggaagaggaacggagaagcgaggacgcccagagcaaggccgccctgaccgactggctgcgggctaaggccagcttcgtgatcgagggcctgaaggaggccgacaaggacgagttctgcagatgcgagctgaagctgcagaagtggtacggggacctgcggggaaagcccttcgccatcgaagccgagaacagcatcctggacatcagcggcttcagcaagcagtacaactgtgccttcatctggcagaaggacggcgtgaagaagctgaacctgtacctgatcatcaactacttcaagggcggcaagctgcggttcaagaagatcaaacctgaagccttcgaagccaacagattctacaccgtgatcaacaaaaagagcggcgagatcgtgcccatggaggtgaacttcaacttcgacgaccccaacctgatcatcctgcctctggcctttggcaagagacagggcagagaattcatctggaacgacctgctgtccctggaaaccggcagcctgaagctggccaacggaagagtgatcgagaagacactgtacaacagaagaacccggcaggatgagcctgccctgttcgtggccctgaccttcgagcggcgggaggtcctggactcctccaatatcaaaccaatgaacctgatcggcgtggcaagaggcgaaaacatccccgccgtgatcgccctgaccgaccccgagggctgcccactgagccggtttaaggatagcctgggaaacccaacccacatcctgagaatcggcgagagctataaggagaagcagcggaccatccaggccaagaaggaggtggagcagcggagagccggcggctacagccggaagtacgccagcaaagccaagaatctggcagacgatatggtgagaaacaccgctagagatctgctgtactacgccgtgacccaggatgccatgctgatcttcgccaacctgagccggggcttcggccggcagggcaagcggaccttcatggccgagagacagtacacacggatggaggactggctgaccgccaagctggcctacgagggcctgagcaagacctacctgtccaagacactggcccagtacacctccaagacatgcagcaactgtgggtttaccatcaccagcgccgactacgacagggtgctggagaagctgaagaagacagcaacaggctggatgaccacaattaacggcaaggagctgaaggtggagggccagattacctactacaacagatacaagagacagaacgtagtcaaggacctgtccgtcgagctggatagactgagcgaagaatctgtgaacaacgacatctcctcctggacaaagggcagaagcggagaagctctgagcctcctgaagaaaagattctcccatagacccgtgcaggagaagttcgtgtgcctgaactgcggcttcgagacacacgcagccgagcaagccgccctgaacatcgccagatcctggctgttcctgcggagccaggagtacaagaaataccagacaaacaagacaaccggcaacaccgataagagagccttcgtcgagacctggcagtccttttaccggaagaagcttaaggaggtgtggaaacctgccgtgcggtctggcggatctggcggaggctcctggcaagatgagcgtgaccttcgaggacgtggccctgtacttcagccccgaggagtgggccaagctgagcggctgccagaggcagctgtaccaggaggtgatgctggagaactaccagatggtggccagcctgggctgggccaacgtgaagcccgagatcatctgcaagatggagagggaggagaccccctgcgtgcccgacgtgcccggcaagcagcagaggcaccagagccccgtgcccgtgggatctggctccggcagcggccccaagaaaaagagaaaagtctaagctgccttctgcggggcttgccttctggccatgcccttcttctctcccttgcacctgtacctcttggtctttgaataaagcctgagtaggaaggctagcaaaaaaaaaaaaaaaaaaaaaaaaaaaaaaaaaaaaaaaaaaaaaaaaaaaaaaaaaaaaaaaaaaaaaaaaaaaaaaaa

SEQ ID NO: 15471 - RNA, 9479 nt, synthetic construct
  source 1..9479: mol_type = other RNA
aggaaataagagagaaaagaagagtaagaagaaatataagagccaccatggcccctaagaagaagcgtaaagtgagccggatggaacgcctcgtctacgaggtgcggcagaagtgcagaaacatcgaggacatctgcatctcctgcggatctctgaacgtgaccctggagcacccactgttcatcggcggcatgtgccagaactgtaaaaactgttttctggagtgtgcctatcaatacgacgatgacggctaccagagctactgcaccatctgttgcggcggaagagaggtgctgatgtgtggaaataacaactgctgccggtgcttctgcgtggaatgcgtggacctgctggtgggccccggcgccgcccaggccgctattaaggaagatccttggaactgctacatgtgcggccacaagggcacatacggcctgctgagacggagagaggactggcctagcagactgcagatgttcttcgccaataaccacgaccaggagttcgacccccctaaggtgtaccctcccgtccccgccgagaagagaaagcccatccgggtcctgagcctgttcgatggcatcgccaccggtctgctggtgctgaaggacctgggcatccaggtggataggtacattgcctccgaggtgtgcgaggactccatcaccgtgggaatggtgcgtcatcagggcaagatcatgtacgtgggcgacgtgcggagcgtgacacagaagcatatccaggagtggggccctttcgacctggtgatcggcggcagcccttgcaatgacctgagcatcgtgaacccagcccggaagggcctgtacgagggaaccggcagactgttcttcgagttttacagactgctgcacgacgcccggcctaaggaaggcgacgaccggcccttcttttggctgttcgagaatgtggtggccatgggagtcagcgacaagcgggatattagccggttcctggagagcaaccccgtgatgatcgatgccaaggaagtgagcgccgcccaccgggccagatacttctggggcaatctgcctggcatgaacagacccctggccagcaccgtgaacgacaagctggagctgcaggagtgcctggagcacggccggatcgccaagttcagcaaggtgagaaccatcaccacccgaagcaacagcatcaaacaaggcaaggaccagcactttcctgtgttcatgaacgagaaggaggacatcctgtggtgtaccgagatggagagagtgttcgggttcccagtccactacacagatgtcagcaacatgtctagactggccagacagagactgctgggaagaagctggtccgtccctgtgatcagacacctgttcgcccctctgaaggagtacttcgcctgcgtgagcagcggcaacagcaacgccaacagccggggccccagcttctctagcggcctggtgccactgtccctgagagggagccacatgggccccatggagatctacaaaaccgtgagcgcctggaagcggcagcctgtgcgcgtgctgagcctgtttcggaatatcgataaagtcctgaaaagcctgggattcctggagagcggctctggctccggcggtggcaccctgaagtacgtggaggatgtgacaaacgtggtcagacgggatgtggagaagtggggccccttcgatctggtgtacggcagcacccaacccctgggcagctcttgtgaccggtgccctggctggtacatgtttcagttccaccggatcctgcagtacgccctgccgagacaggagtcccagcggccattcttttggattttcatggacaacttgctgctgaccgaggatgaccaggaaactaccactcggttcctgcagaccgaagccgtgaccctgcaggacgtgagaggccgggactaccagaacgccatgcgggtgtggtccaacatccctggactgaaaagcaagcacgcacctctgacccctaaagaagaggagtacctgcaggcccaggtgcggagcagaagcaagctggacgcccctaaggtggatctgctggtgaagaattgcctcctgcccctgagagagtacttcaagtatttcagccagaatagtctgcccctgggaggcagcggcggcggcgccctggtgacatttgaggacgtcgccgtgcggttcacccaggaggaatgggctctgctggatccttctcagaaaatcctgtaccgggacgtgatgagagagacataccggaatctgacctccgtgggcatcaactgggaatgttgggaccttgaagcctgcttcagaagcctgggaagaaacctgagagtgcaggtggtgaagagaaagtgcgagctgaccaacagcggcccctgcgccgagggcggcccaagcagcggcgcccctcctcccagcggcggcagcccagccggctccccaacctctaccgaggagggcacctctgagtccgccacccccgagagcggccctggcacctccaccgagcccagcgagggcagcgcacccggcagccctgccggcagccccacctccacagaggagggaaccagcaccgagcccagcgaaggcagcgccccaggcaccagcaccgagcctagtgagcaggagattaaacggatcaacaagatcagaagaagacttgtgaaagacagcaacaccaagaaggccggcaagacaggccccatgaaaaccctgctggttagagtgatgacacccgatctgagagagcggctggaaaacctgagaaagaagcctgaaaatatcccccagcccatcagcaatacatctagagccaacctgaataagctgctgaccgattacaccgaaatgaagaaggcgatcctgcatgtgtactgggaagagttccagaaggaccctgtgggcctgatgagccgggtggcccagcctgccagcaagaagatcgatcagaacaagctgaaacctgagatggacgagaagggcaacctgaccaccgccggctttgcctgctctcagtgtggccagcccctgttcgtgtacaagctggagcaggtgtctgagaagggcaaggcttacaccaactacttcggacggtgcaatgtggccgagcacgaaaagctgatcctgctggcccagctgaagcccgagaaggatagcgacgaagccgtgacatatagcctgggaaagtttgggcagagggccctggatttctacagcattcatgtgaccaaggagtccacccaccccgtgaagcccctggcccagatcgccggaaacagatacgcctccggacctgtgggaaaggccctgagcgacgcatgtatgggcacaatcgcctccttcctgtctaagtaccaggacatcatcatcgaacaccagaaggtggtgaagggcaaccagaagagactggagagcctgcgggagctggccggcaaggaaaacctggaataccctagcgtgaccctgccacctcagcctcacaccaaggagggcgttgatgcctacaacgaagtgatcgcccgggtgcgaatgtgggtgaacctgaacctgtggcagaagctgaagctaagcagagatgatgccaagcctctgctgagactgaagggattcccttcctttcctctggtcgagagacaggccaacgaagtggactggtgggacatggtgtgtaacgtgaagaagctgatcaacgagaaaaaggaggatggcaaggtgttttggcagaatctggctggctacaagagacaggaagccctgagaccatacctgagcagcgaggaagatcggaagaagggaaagaaattcgctcggtaccagctgggcgacctgctgctgcacctggaaaagaagcacggcgaggactggggaaaggtgtacgacgaggcctgggagcggattgacaagaaagtggaaggcctgagcaagcacatcaagctggaagaggaacggagaagcgaggacgcccagagcaaggccgccctgaccgactggctgcgggctaaggccagcttcgtgatcgagggcctgaaggaggccgacaaggacgagttctgcagatgcgagctgaagctgcagaagtggtacggggacctgcggggaaagcccttcgccatcgaagccgagaacagcatcctggacatcagcggcttcagcaagcagtacaactgtgccttcatctggcagaaggacggcgtgaagaagctgaacctgtacctgatcatcaactacttcaagggcggcaagctgcggttcaagaagatcaaacctgaagccttcgaagccaacagattctacaccgtgatcaacaaaaagagcggcgagatcgtgcccatggaggtgaacttcaacttcgacgaccccaacctgatcatcctgcctctggcctttggcaagagacagggcagagaattcatctggaacgacctgctgtccctggaaaccggcagcctgaagctggccaacggaagagtgatcgagaagacactgtacaacagaagaacccggcaggatgagcctgccctgttcgtggccctgaccttcgagcggcgggaggtcctggactcctccaatatcaaaccaatgaacctgatcggcgtggcaagaggcgaaaacatccccgccgtgatcgccctgaccgaccccgagggctgcccactgagccggtttaaggatagcctgggaaacccaacccacatcctgagaatcggcgagagctataaggagaagcagcggaccatccaggccaagaaggaggtggagcagcggagagccggcggctacagccggaagtacgccagcaaagccaagaatctggcagacgatatggtgagaaacaccgctagagatctgctgtactacgccgtgacccaggatgccatgctgatcttcgccaacctgagccggggcttcggccggcagggcaagcggaccttcatggccgagagacagtacacacggatggaggactggctgaccgccaagctggcctacgagggcctgagcaagacctacctgtccaagacactggcccagtacacctccaagacatgcagcaactgtgggtttaccatcaccagcgccgactacgacagggtgctggagaagctgaagaagacagcaacaggctggatgaccacaattaacggcaaggagctgaaggtggagggccagattacctactacaacagatacaagagacagaacgtagtcaaggacctgtccgtcgagctggatagactgagcgaagaatctgtgaacaacgacatctcctcctggacaaagggcagaagcggagaagctctgagcctcctgaagaaaagattctcccatagacccgtgcaggagaagttcgtgtgcctgaactgcggcttcgagacacacgcagccgagcaagccgccctgaacatcgccagatcctggctgttcctgcggagccaggagtacaagaaataccagacaaacaagacaaccggcaacaccgataagagagccttcgtcgagacctggcagtccttttaccggaagaagcttaaggaggtgtggaaacctgccgtgcggtctggcggatctggcggaggctccagagagagcctggaggacgaggtgacccccggcctgcccaccgccgagagccaggagctgctgaccttcaaggacatcagcatcgacttcacccaggaggagtggggccagctggcccccgcccaccagaacctgtacagagaggtgatgctggagaactacagcaacctggtgagcgtgggctaccagctgagcaagcccagcgtgatcagccagctggagaagggcgaggagccctggggcggcccaagcagcggcgcccctcctcccagcggcggcagcccagccggctccccaacctctaccgaggagggcacctctgagtccgccacccccgagagcggccctggcacctccaccgagcccagcgagggcagcgcacccggcagccctgccggcagccccacctccacagaggagggaaccagcaccgagcccagcgaaggcagcgccccaggcaccagcaccgagcctagtgagcaggagattaaacggatcaacaagatcagaagaagacttgtgaaagacagcaacaccaagaaggccggcaagacaggccccatgaaaaccctgctggttagagtgatgacacccgatctgagagagcggctggaaaacctgagaaagaagcctgaaaatatcccccagcccatcagcaatacatctagagccaacctgaataagctgctgaccgattacaccgaaatgaagaaggcgatcctgcatgtgtactgggaagagttccagaaggaccctgtgggcctgatgagccgggtggcccagcctgccagcaagaagatcgatcagaacaagctgaaacctgagatggacgagaagggcaacctgaccaccgccggctttgcctgctctcagtgtggccagcccctgttcgtgtacaagctggagcaggtgtctgagaagggcaaggcttacaccaactacttcggacggtgcaatgtggccgagcacgaaaagctgatcctgctggcccagctgaagcccgagaaggatagcgacgaagccgtgacatatagcctgggaaagtttgggcagagggccctggatttctacagcattcatgtgaccaaggagtccacccaccccgtgaagcccctggcccagatcgccggaaacagatacgcctccggacctgtgggaaaggccctgagcgacgcatgtatgggcacaatcgcctccttcctgtctaagtaccaggacatcatcatcgaacaccagaaggtggtgaagggcaaccagaagagactggagagcctgcgggagctggccggcaaggaaaacctggaataccctagcgtgaccctgccacctcagcctcacaccaaggagggcgttgatgcctacaacgaagtgatcgcccgggtgcgaatgtgggtgaacctgaacctgtggcagaagctgaagctaagcagagatgatgccaagcctctgctgagactgaagggattcccttcctttcctctggtcgagagacaggccaacgaagtggactggtgggacatggtgtgtaacgtgaagaagctgatcaacgagaaaaaggaggatggcaaggtgttttggcagaatctggctggctacaagagacaggaagccctgagaccatacctgagcagcgaggaagatcggaagaagggaaagaaattcgctcggtaccagctgggcgacctgctgctgcacctggaaaagaagcacggcgaggactggggaaaggtgtacgacgaggcctgggagcggattgacaagaaagtggaaggcctgagcaagcacatcaagctggaagaggaacggagaagcgaggacgcccagagcaaggccgccctgaccgactggctgcgggctaaggccagcttcgtgatcgagggcctgaaggaggccgacaaggacgagttctgcagatgcgagctgaagctgcagaagtggtacggggacctgcggggaaagcccttcgccatcgaagccgagaacagcatcctggacatcagcggcttcagcaagcagtacaactgtgccttcatctggcagaaggacggcgtgaagaagctgaacctgtacctgatcatcaactacttcaagggcggcaagctgcggttcaagaagatcaaacctgaagccttcgaagccaacagattctacaccgtgatcaacaaaaagagcggcgagatcgtgcccatggaggtgaacttcaacttcgacgaccccaacctgatcatcctgcctctggcctttggcaagagacagggcagagaattcatctggaacgacctgctgtccctggaaaccggcagcctgaagctggccaacggaagagtgatcgagaagacactgtacaacagaagaacccggcaggatgagcctgccctgttcgtggccctgaccttcgagcggcgggaggtcctggactcctccaatatcaaaccaatgaacctgatcggcgtggcaagaggcgaaaacatccccgccgtgatcgccctgaccgaccccgagggctgcccactgagccggtttaaggatagcctgggaaacccaacccacatcctgagaatcggcgagagctataaggagaagcagcggaccatccaggccaagaaggaggtggagcagcggagagccggcggctacagccggaagtacgccagcaaagccaagaatctggcagacgatatggtgagaaacaccgctagagatctgctgtactacgccgtgacccaggatgccatgctgatcttcgccaacctgagccggggcttcggccggcagggcaagcggaccttcatggccgagagacagtacacacggatggaggactggctgaccgccaagctggcctacgagggcctgagcaagacctacctgtccaagacactggcccagtacacctccaagacatgcagcaactgtgggtttaccatcaccagcgccgactacgacagggtgctggagaagctgaagaagacagcaacaggctggatgaccacaattaacggcaaggagctgaaggtggagggccagattacctactacaacagatacaagagacagaacgtagtcaaggacctgtccgtcgagctggatagactgagcgaagaatctgtgaacaacgacatctcctcctggacaaagggcagaagcggagaagctctgagcctcctgaagaaaagattctcccatagacccgtgcaggagaagttcgtgtgcctgaactgcggcttcgagacacacgcagccgagcaagccgccctgaacatcgccagatcctggctgttcctgcggagccaggagtacaagaaataccagacaaacaagacaaccggcaacaccgataagagagccttcgtcgagacctggcagtccttttaccggaagaagcttaaggaggtgtggaaacctgccgtgcggtctggcggatctggcggaggctcctagagagagcctggaggacgaggtgacccccggcctgcccaccgccgagagccaggagctgctgaccttcaaggacatcagcatcgacttcacccaggaggagtggggccagctggcccccgcccaccagaacctgtacagagaggtgatgctggagaactacagcaacctggtgagcgtgggctaccagctgagcaagcccagcgtgatcagccagctggagaagggcgaggagccctggggatctggctccggcagcggccccaagaaaaagagaaaagtctaagctgccttctgcggggcttgccttctggccatgcccttcttctctcccttgcacctgtacctcttggtctttgaataaagcctgagtaggaaggctagcaaaaaaaaaaaaaaaaaaaaaaaaaaaaaaaaaaaaaaaaaaaaaaaaaaaaaaaaaaaaaaaaaaaaaaaaaaaaaaaa

SEQ ID NO: 15472 - RNA, 9485 nt, synthetic construct
  source 1..9485: mol_type = other RNA
aggaaataagagagaaaagaagagtaagaagaaatataagagccaccatggcccctaagaagaagcgtaaagtgagccggatggaacgcctcgtctacgaggtgcggcagaagtgcagaaacatcgaggacatctgcatctcctgcggatctctgaacgtgaccctggagcacccactgttcatcggcggcatgtgccagaactgtaaaaactgttttctggagtgtgcctatcaatacgacgatgacggctaccagagctactgcaccatctgttgcggcggaagagaggtgctgatgtgtggaaataacaactgctgccggtgcttctgcgtggaatgcgtggacctgctggtgggccccggcgccgcccaggccgctattaaggaagatccttggaactgctacatgtgcggccacaagggcacatacggcctgctgagacggagagaggactggcctagcagactgcagatgttcttcgccaataaccacgaccaggagttcgacccccctaaggtgtaccctcccgtccccgccgagaagagaaagcccatccgggtcctgagcctgttcgatggcatcgccaccggtctgctggtgctgaaggacctgggcatccaggtggataggtacattgcctccgaggtgtgcgaggactccatcaccgtgggaatggtgcgtcatcagggcaagatcatgtacgtgggcgacgtgcggagcgtgacacagaagcatatccaggagtggggccctttcgacctggtgatcggcggcagcccttgcaatgacctgagcatcgtgaacccagcccggaagggcctgtacgagggaaccggcagactgttcttcgagttttacagactgctgcacgacgcccggcctaaggaaggcgacgaccggcccttcttttggctgttcgagaatgtggtggccatgggagtcagcgacaagcgggatattagccggttcctggagagcaaccccgtgatgatcgatgccaaggaagtgagcgccgcccaccgggccagatacttctggggcaatctgcctggcatgaacagacccctggccagcaccgtgaacgacaagctggagctgcaggagtgcctggagcacggccggatcgccaagttcagcaaggtgagaaccatcaccacccgaagcaacagcatcaaacaaggcaaggaccagcactttcctgtgttcatgaacgagaaggaggacatcctgtggtgtaccgagatggagagagtgttcgggttcccagtccactacacagatgtcagcaacatgtctagactggccagacagagactgctgggaagaagctggtccgtccctgtgatcagacacctgttcgcccctctgaaggagtacttcgcctgcgtgagcagcggcaacagcaacgccaacagccggggccccagcttctctagcggcctggtgccactgtccctgagagggagccacatgggccccatggagatctacaaaaccgtgagcgcctggaagcggcagcctgtgcgcgtgctgagcctgtttcggaatatcgataaagtcctgaaaagcctgggattcctggagagcggctctggctccggcggtggcaccctgaagtacgtggaggatgtgacaaacgtggtcagacgggatgtggagaagtggggccccttcgatctggtgtacggcagcacccaacccctgggcagctcttgtgaccggtgccctggctggtacatgtttcagttccaccggatcctgcagtacgccctgccgagacaggagtcccagcggccattcttttggattttcatggacaacttgctgctgaccgaggatgaccaggaaactaccactcggttcctgcagaccgaagccgtgaccctgcaggacgtgagaggccgggactaccagaacgccatgcgggtgtggtccaacatccctggactgaaaagcaagcacgcacctctgacccctaaagaagaggagtacctgcaggcccaggtgcggagcagaagcaagctggacgcccctaaggtggatctgctggtgaagaattgcctcctgcccctgagagagtacttcaagtatttcagccagaatagtctgcccctgggaggcagcggcggcggcgccctggtgacatttgaggacgtcgccgtgcggttcacccaggaggaatgggctctgctggatccttctcagaaaatcctgtaccgggacgtgatgagagagacataccggaatctgacctccgtgggcatcaactgggaatgttgggaccttgaagcctgcttcagaagcctgggaagaaacctgagagtgcaggtggtgaagagaaagtgcgagctgaccaacagcggcccctgcgccgagggcggcccaagcagcggcgcccctcctcccagcggcggcagcccagccggctccccaacctctaccgaggagggcacctctgagtccgccacccccgagagcggccctggcacctccaccgagcccagcgagggcagcgcacccggcagccctgccggcagccccacctccacagaggagggaaccagcaccgagcccagcgaaggcagcgccccaggcaccagcaccgagcctagtgagcaggagattaaacggatcaacaagatcagaagaagacttgtgaaagacagcaacaccaagaaggccggcaagacaggccccatgaaaaccctgctggttagagtgatgacacccgatctgagagagcggctggaaaacctgagaaagaagcctgaaaatatcccccagcccatcagcaatacatctagagccaacctgaataagctgctgaccgattacaccgaaatgaagaaggcgatcctgcatgtgtactgggaagagttccagaaggaccctgtgggcctgatgagccgggtggcccagcctgccagcaagaagatcgatcagaacaagctgaaacctgagatggacgagaagggcaacctgaccaccgccggctttgcctgctctcagtgtggccagcccctgttcgtgtacaagctggagcaggtgtctgagaagggcaaggcttacaccaactacttcggacggtgcaatgtggccgagcacgaaaagctgatcctgctggcccagctgaagcccgagaaggatagcgacgaagccgtgacatatagcctgggaaagtttgggcagagggccctggatttctacagcattcatgtgaccaaggagtccacccaccccgtgaagcccctggcccagatcgccggaaacagatacgcctccggacctgtgggaaaggccctgagcgacgcatgtatgggcacaatcgcctccttcctgtctaagtaccaggacatcatcatcgaacaccagaaggtggtgaagggcaaccagaagagactggagagcctgcgggagctggccggcaaggaaaacctggaataccctagcgtgaccctgccacctcagcctcacaccaaggagggcgttgatgcctacaacgaagtgatcgcccgggtgcgaatgtgggtgaacctgaacctgtggcagaagctgaagctaagcagagatgatgccaagcctctgctgagactgaagggattcccttcctttcctctggtcgagagacaggccaacgaagtggactggtgggacatggtgtgtaacgtgaagaagctgatcaacgagaaaaaggaggatggcaaggtgttttggcagaatctggctggctacaagagacaggaagccctgagaccatacctgagcagcgaggaagatcggaagaagggaaagaaattcgctcggtaccagctgggcgacctgctgctgcacctggaaaagaagcacggcgaggactggggaaaggtgtacgacgaggcctgggagcggattgacaagaaagtggaaggcctgagcaagcacatcaagctggaagaggaacggagaagcgaggacgcccagagcaaggccgccctgaccgactggctgcgggctaaggccagcttcgtgatcgagggcctgaaggaggccgacaaggacgagttctgcagatgcgagctgaagctgcagaagtggtacggggacctgcggggaaagcccttcgccatcgaagccgagaacagcatcctggacatcagcggcttcagcaagcagtacaactgtgccttcatctggcagaaggacggcgtgaagaagctgaacctgtacctgatcatcaactacttcaagggcggcaagctgcggttcaagaagatcaaacctgaagccttcgaagccaacagattctacaccgtgatcaacaaaaagagcggcgagatcgtgcccatggaggtgaacttcaacttcgacgaccccaacctgatcatcctgcctctggcctttggcaagagacagggcagagaattcatctggaacgacctgctgtccctggaaaccggcagcctgaagctggccaacggaagagtgatcgagaagacactgtacaacagaagaacccggcaggatgagcctgccctgttcgtggccctgaccttcgagcggcgggaggtcctggactcctccaatatcaaaccaatgaacctgatcggcgtggcaagaggcgaaaacatccccgccgtgatcgccctgaccgaccccgagggctgcccactgagccggtttaaggatagcctgggaaacccaacccacatcctgagaatcggcgagagctataaggagaagcagcggaccatccaggccaagaaggaggtggagcagcggagagccggcggctacagccggaagtacgccagcaaagccaagaatctggcagacgatatggtgagaaacaccgctagagatctgctgtactacgccgtgacccaggatgccatgctgatcttcgccaacctgagccggggcttcggccggcagggcaagcggaccttcatggccgagagacagtacacacggatggaggactggctgaccgccaagctggcctacgagggcctgagcaagacctacctgtccaagacactggcccagtacacctccaagacatgcagcaactgtgggtttaccatcaccagcgccgactacgacagggtgctggagaagctgaagaagacagcaacaggctggatgaccacaattaacggcaaggagctgaaggtggagggccagattacctactacaacagatacaagagacagaacgtagtcaaggacctgtccgtcgagctggatagactgagcgaagaatctgtgaacaacgacatctcctcctggacaaagggcagaagcggagaagctctgagcctcctgaagaaaagattctcccatagacccgtgcaggagaagttcgtgtgcctgaactgcggcttcgagacacacgcagccgagcaagccgccctgaacatcgccagatcctggctgttcctgcggagccaggagtacaagaaataccagacaaacaagacaaccggcaacaccgataagagagccttcgtcgagacctggcagtccttttaccggaagaagcttaaggaggtgtggaaacctgccgtgcggtctggcggatctggcggaggctccgcccaccacctggtgatgttcagggacgtggccgtggacttcagcaaggaggagtgggagtgcctgaacagctaccagaggaacctgtacagggacgtgatcctggagaactacagcaacctggtgagcgtgggctgcagcatcagcaagcccgacgtgatcaccctgctggagcagggcaaggagccctggatggtggtgagggacgagaggaggaggaggagcctggacctggagagcaggggcggcccaagcagcggcgcccctcctcccagcggcggcagcccagccggctccccaacctctaccgaggagggcacctctgagtccgccacccccgagagcggccctggcacctccaccgagcccagcgagggcagcgcacccggcagccctgccggcagccccacctccacagaggagggaaccagcaccgagcccagcgaaggcagcgccccaggcaccagcaccgagcctagtgagcaggagattaaacggatcaacaagatcagaagaagacttgtgaaagacagcaacaccaagaaggccggcaagacaggccccatgaaaaccctgctggttagagtgatgacacccgatctgagagagcggctggaaaacctgagaaagaagcctgaaaatatcccccagcccatcagcaatacatctagagccaacctgaataagctgctgaccgattacaccgaaatgaagaaggcgatcctgcatgtgtactgggaagagttccagaaggaccctgtgggcctgatgagccgggtggcccagcctgccagcaagaagatcgatcagaacaagctgaaacctgagatggacgagaagggcaacctgaccaccgccggctttgcctgctctcagtgtggccagcccctgttcgtgtacaagctggagcaggtgtctgagaagggcaaggcttacaccaactacttcggacggtgcaatgtggccgagcacgaaaagctgatcctgctggcccagctgaagcccgagaaggatagcgacgaagccgtgacatatagcctgggaaagtttgggcagagggccctggatttctacagcattcatgtgaccaaggagtccacccaccccgtgaagcccctggcccagatcgccggaaacagatacgcctccggacctgtgggaaaggccctgagcgacgcatgtatgggcacaatcgcctccttcctgtctaagtaccaggacatcatcatcgaacaccagaaggtggtgaagggcaaccagaagagactggagagcctgcgggagctggccggcaaggaaaacctggaataccctagcgtgaccctgccacctcagcctcacaccaaggagggcgttgatgcctacaacgaagtgatcgcccgggtgcgaatgtgggtgaacctgaacctgtggcagaagctgaagctaagcagagatgatgccaagcctctgctgagactgaagggattcccttcctttcctctggtcgagagacaggccaacgaagtggactggtgggacatggtgtgtaacgtgaagaagctgatcaacgagaaaaaggaggatggcaaggtgttttggcagaatctggctggctacaagagacaggaagccctgagaccatacctgagcagcgaggaagatcggaagaagggaaagaaattcgctcggtaccagctgggcgacctgctgctgcacctggaaaagaagcacggcgaggactggggaaaggtgtacgacgaggcctgggagcggattgacaagaaagtggaaggcctgagcaagcacatcaagctggaagaggaacggagaagcgaggacgcccagagcaaggccgccctgaccgactggctgcgggctaaggccagcttcgtgatcgagggcctgaaggaggccgacaaggacgagttctgcagatgcgagctgaagctgcagaagtggtacggggacctgcggggaaagcccttcgccatcgaagccgagaacagcatcctggacatcagcggcttcagcaagcagtacaactgtgccttcatctggcagaaggacggcgtgaagaagctgaacctgtacctgatcatcaactacttcaagggcggcaagctgcggttcaagaagatcaaacctgaagccttcgaagccaacagattctacaccgtgatcaacaaaaagagcggcgagatcgtgcccatggaggtgaacttcaacttcgacgaccccaacctgatcatcctgcctctggcctttggcaagagacagggcagagaattcatctggaacgacctgctgtccctggaaaccggcagcctgaagctggccaacggaagagtgatcgagaagacactgtacaacagaagaacccggcaggatgagcctgccctgttcgtggccctgaccttcgagcggcgggaggtcctggactcctccaatatcaaaccaatgaacctgatcggcgtggcaagaggcgaaaacatccccgccgtgatcgccctgaccgaccccgagggctgcccactgagccggtttaaggatagcctgggaaacccaacccacatcctgagaatcggcgagagctataaggagaagcagcggaccatccaggccaagaaggaggtggagcagcggagagccggcggctacagccggaagtacgccagcaaagccaagaatctggcagacgatatggtgagaaacaccgctagagatctgctgtactacgccgtgacccaggatgccatgctgatcttcgccaacctgagccggggcttcggccggcagggcaagcggaccttcatggccgagagacagtacacacggatggaggactggctgaccgccaagctggcctacgagggcctgagcaagacctacctgtccaagacactggcccagtacacctccaagacatgcagcaactgtgggtttaccatcaccagcgccgactacgacagggtgctggagaagctgaagaagacagcaacaggctggatgaccacaattaacggcaaggagctgaaggtggagggccagattacctactacaacagatacaagagacagaacgtagtcaaggacctgtccgtcgagctggatagactgagcgaagaatctgtgaacaacgacatctcctcctggacaaagggcagaagcggagaagctctgagcctcctgaagaaaagattctcccatagacccgtgcaggagaagttcgtgtgcctgaactgcggcttcgagacacacgcagccgagcaagccgccctgaacatcgccagatcctggctgttcctgcggagccaggagtacaagaaataccagacaaacaagacaaccggcaacaccgataagagagccttcgtcgagacctggcagtccttttaccggaagaagcttaaggaggtgtggaaacctgccgtgcggtctggcggatctggcggaggctcctgcccaccacctggtgatgttcagggacgtggccgtggacttcagcaaggaggagtgggagtgcctgaacagctaccagaggaacctgtacagggacgtgatcctggagaactacagcaacctggtgagcgtgggctgcagcatcagcaagcccgacgtgatcaccctgctggagcagggcaaggagccctggatggtggtgagggacgagaggaggaggaggagcctggacctggagagcaggggatctggctccggcagcggccccaagaaaaagagaaaagtctaagctgccttctgcggggcttgccttctggccatgcccttcttctctcccttgcacctgtacctcttggtctttgaataaagcctgagtaggaaggctagcaaaaaaaaaaaaaaaaaaaaaaaaaaaaaaaaaaaaaaaaaaaaaaaaaaaaaaaaaaaaaaaaaaaaaaaaaaaaaaaa

SEQ ID NO: 15473 - RNA, 9485 nt, synthetic construct
  source 1..9485: mol_type = other RNA
aggaaataagagagaaaagaagagtaagaagaaatataagagccaccatggcccctaagaagaagcgtaaagtgagccggatggaacgcctcgtctacgaggtgcggcagaagtgcagaaacatcgaggacatctgcatctcctgcggatctctgaacgtgaccctggagcacccactgttcatcggcggcatgtgccagaactgtaaaaactgttttctggagtgtgcctatcaatacgacgatgacggctaccagagctactgcaccatctgttgcggcggaagagaggtgctgatgtgtggaaataacaactgctgccggtgcttctgcgtggaatgcgtggacctgctggtgggccccggcgccgcccaggccgctattaaggaagatccttggaactgctacatgtgcggccacaagggcacatacggcctgctgagacggagagaggactggcctagcagactgcagatgttcttcgccaataaccacgaccaggagttcgacccccctaaggtgtaccctcccgtccccgccgagaagagaaagcccatccgggtcctgagcctgttcgatggcatcgccaccggtctgctggtgctgaaggacctgggcatccaggtggataggtacattgcctccgaggtgtgcgaggactccatcaccgtgggaatggtgcgtcatcagggcaagatcatgtacgtgggcgacgtgcggagcgtgacacagaagcatatccaggagtggggccctttcgacctggtgatcggcggcagcccttgcaatgacctgagcatcgtgaacccagcccggaagggcctgtacgagggaaccggcagactgttcttcgagttttacagactgctgcacgacgcccggcctaaggaaggcgacgaccggcccttcttttggctgttcgagaatgtggtggccatgggagtcagcgacaagcgggatattagccggttcctggagagcaaccccgtgatgatcgatgccaaggaagtgagcgccgcccaccgggccagatacttctggggcaatctgcctggcatgaacagacccctggccagcaccgtgaacgacaagctggagctgcaggagtgcctggagcacggccggatcgccaagttcagcaaggtgagaaccatcaccacccgaagcaacagcatcaaacaaggcaaggaccagcactttcctgtgttcatgaacgagaaggaggacatcctgtggtgtaccgagatggagagagtgttcgggttcccagtccactacacagatgtcagcaacatgtctagactggccagacagagactgctgggaagaagctggtccgtccctgtgatcagacacctgttcgcccctctgaaggagtacttcgcctgcgtgagcagcggcaacagcaacgccaacagccggggccccagcttctctagcggcctggtgccactgtccctgagagggagccacatgggccccatggagatctacaaaaccgtgagcgcctggaagcggcagcctgtgcgcgtgctgagcctgtttcggaatatcgataaagtcctgaaaagcctgggattcctggagagcggctctggctccggcggtggcaccctgaagtacgtggaggatgtgacaaacgtggtcagacgggatgtggagaagtggggccccttcgatctggtgtacggcagcacccaacccctgggcagctcttgtgaccggtgccctggctggtacatgtttcagttccaccggatcctgcagtacgccctgccgagacaggagtcccagcggccattcttttggattttcatggacaacttgctgctgaccgaggatgaccaggaaactaccactcggttcctgcagaccgaagccgtgaccctgcaggacgtgagaggccgggactaccagaacgccatgcgggtgtggtccaacatccctggactgaaaagcaagcacgcacctctgacccctaaagaagaggagtacctgcaggcccaggtgcggagcagaagcaagctggacgcccctaaggtggatctgctggtgaagaattgcctcctgcccctgagagagtacttcaagtatttcagccagaatagtctgcccctgggaggcagcggcggcggcgccctggtgacatttgaggacgtcgccgtgcggttcacccaggaggaatgggctctgctggatccttctcagaaaatcctgtaccgggacgtgatgagagagacataccggaatctgacctccgtgggcatcaactgggaatgttgggaccttgaagcctgcttcagaagcctgggaagaaacctgagagtgcaggtggtgaagagaaagtgcgagctgaccaacagcggcccctgcgccgagggcggcccaagcagcggcgcccctcctcccagcggcggcagcccagccggctccccaacctctaccgaggagggcacctctgagtccgccacccccgagagcggccctggcacctccaccgagcccagcgagggcagcgcacccggcagccctgccggcagccccacctccacagaggagggaaccagcaccgagcccagcgaaggcagcgccccaggcaccagcaccgagcctagtgagcaggagattaaacggatcaacaagatcagaagaagacttgtgaaagacagcaacaccaagaaggccggcaagacaggccccatgaaaaccctgctggttagagtgatgacacccgatctgagagagcggctggaaaacctgagaaagaagcctgaaaatatcccccagcccatcagcaatacatctagagccaacctgaataagctgctgaccgattacaccgaaatgaagaaggcgatcctgcatgtgtactgggaagagttccagaaggaccctgtgggcctgatgagccgggtggcccagcctgccagcaagaagatcgatcagaacaagctgaaacctgagatggacgagaagggcaacctgaccaccgccggctttgcctgctctcagtgtggccagcccctgttcgtgtacaagctggagcaggtgtctgagaagggcaaggcttacaccaactacttcggacggtgcaatgtggccgagcacgaaaagctgatcctgctggcccagctgaagcccgagaaggatagcgacgaagccgtgacatatagcctgggaaagtttgggcagagggccctggatttctacagcattcatgtgaccaaggagtccacccaccccgtgaagcccctggcccagatcgccggaaacagatacgcctccggacctgtgggaaaggccctgagcgacgcatgtatgggcacaatcgcctccttcctgtctaagtaccaggacatcatcatcgaacaccagaaggtggtgaagggcaaccagaagagactggagagcctgcgggagctggccggcaaggaaaacctggaataccctagcgtgaccctgccacctcagcctcacaccaaggagggcgttgatgcctacaacgaagtgatcgcccgggtgcgaatgtgggtgaacctgaacctgtggcagaagctgaagctaagcagagatgatgccaagcctctgctgagactgaagggattcccttcctttcctctggtcgagagacaggccaacgaagtggactggtgggacatggtgtgtaacgtgaagaagctgatcaacgagaaaaaggaggatggcaaggtgttttggcagaatctggctggctacaagagacaggaagccctgagaccatacctgagcagcgaggaagatcggaagaagggaaagaaattcgctcggtaccagctgggcgacctgctgctgcacctggaaaagaagcacggcgaggactggggaaaggtgtacgacgaggcctgggagcggattgacaagaaagtggaaggcctgagcaagcacatcaagctggaagaggaacggagaagcgaggacgcccagagcaaggccgccctgaccgactggctgcgggctaaggccagcttcgtgatcgagggcctgaaggaggccgacaaggacgagttctgcagatgcgagctgaagctgcagaagtggtacggggacctgcggggaaagcccttcgccatcgaagccgagaacagcatcctggacatcagcggcttcagcaagcagtacaactgtgccttcatctggcagaaggacggcgtgaagaagctgaacctgtacctgatcatcaactacttcaagggcggcaagctgcggttcaagaagatcaaacctgaagccttcgaagccaacagattctacaccgtgatcaacaaaaagagcggcgagatcgtgcccatggaggtgaacttcaacttcgacgaccccaacctgatcatcctgcctctggcctttggcaagagacagggcagagaattcatctggaacgacctgctgtccctggaaaccggcagcctgaagctggccaacggaagagtgatcgagaagacactgtacaacagaagaacccggcaggatgagcctgccctgttcgtggccctgaccttcgagcggcgggaggtcctggactcctccaatatcaaaccaatgaacctgatcggcgtggcaagaggcgaaaacatccccgccgtgatcgccctgaccgaccccgagggctgcccactgagccggtttaaggatagcctgggaaacccaacccacatcctgagaatcggcgagagctataaggagaagcagcggaccatccaggccaagaaggaggtggagcagcggagagccggcggctacagccggaagtacgccagcaaagccaagaatctggcagacgatatggtgagaaacaccgctagagatctgctgtactacgccgtgacccaggatgccatgctgatcttcgccaacctgagccggggcttcggccggcagggcaagcggaccttcatggccgagagacagtacacacggatggaggactggctgaccgccaagctggcctacgagggcctgagcaagacctacctgtccaagacactggcccagtacacctccaagacatgcagcaactgtgggtttaccatcaccagcgccgactacgacagggtgctggagaagctgaagaagacagcaacaggctggatgaccacaattaacggcaaggagctgaaggtggagggccagattacctactacaacagatacaagagacagaacgtagtcaaggacctgtccgtcgagctggatagactgagcgaagaatctgtgaacaacgacatctcctcctggacaaagggcagaagcggagaagctctgagcctcctgaagaaaagattctcccatagacccgtgcaggagaagttcgtgtgcctgaactgcggcttcgagacacacgcagccgagcaagccgccctgaacatcgccagatcctggctgttcctgcggagccaggagtacaagaaataccagacaaacaagacaaccggcaacaccgataagagagccttcgtcgagacctggcagtccttttaccggaagaagcttaaggaggtgtggaaacctgccgtgcggtctggcggatctggcggaggctccagccaggagcccgtgaccttcgaggacgtggccgtgtacttcacccagaaccagtgggccagcctggaccccatgcagagggccctgtacctggaggtgatgctggagaactacgccaacatcaccagcctggccgccctgcccttccccaagcccgacctgatcctgcagctggagcagggcgaggccccctgggacctggacccctggacccccctggagggcgaggccctggagggcgtgggcggcccaagcagcggcgcccctcctcccagcggcggcagcccagccggctccccaacctctaccgaggagggcacctctgagtccgccacccccgagagcggccctggcacctccaccgagcccagcgagggcagcgcacccggcagccctgccggcagccccacctccacagaggagggaaccagcaccgagcccagcgaaggcagcgccccaggcaccagcaccgagcctagtgagcaggagattaaacggatcaacaagatcagaagaagacttgtgaaagacagcaacaccaagaaggccggcaagacaggccccatgaaaaccctgctggttagagtgatgacacccgatctgagagagcggctggaaaacctgagaaagaagcctgaaaatatcccccagcccatcagcaatacatctagagccaacctgaataagctgctgaccgattacaccgaaatgaagaaggcgatcctgcatgtgtactgggaagagttccagaaggaccctgtgggcctgatgagccgggtggcccagcctgccagcaagaagatcgatcagaacaagctgaaacctgagatggacgagaagggcaacctgaccaccgccggctttgcctgctctcagtgtggccagcccctgttcgtgtacaagctggagcaggtgtctgagaagggcaaggcttacaccaactacttcggacggtgcaatgtggccgagcacgaaaagctgatcctgctggcccagctgaagcccgagaaggatagcgacgaagccgtgacatatagcctgggaaagtttgggcagagggccctggatttctacagcattcatgtgaccaaggagtccacccaccccgtgaagcccctggcccagatcgccggaaacagatacgcctccggacctgtgggaaaggccctgagcgacgcatgtatgggcacaatcgcctccttcctgtctaagtaccaggacatcatcatcgaacaccagaaggtggtgaagggcaaccagaagagactggagagcctgcgggagctggccggcaaggaaaacctggaataccctagcgtgaccctgccacctcagcctcacaccaaggagggcgttgatgcctacaacgaagtgatcgcccgggtgcgaatgtgggtgaacctgaacctgtggcagaagctgaagctaagcagagatgatgccaagcctctgctgagactgaagggattcccttcctttcctctggtcgagagacaggccaacgaagtggactggtgggacatggtgtgtaacgtgaagaagctgatcaacgagaaaaaggaggatggcaaggtgttttggcagaatctggctggctacaagagacaggaagccctgagaccatacctgagcagcgaggaagatcggaagaagggaaagaaattcgctcggtaccagctgggcgacctgctgctgcacctggaaaagaagcacggcgaggactggggaaaggtgtacgacgaggcctgggagcggattgacaagaaagtggaaggcctgagcaagcacatcaagctggaagaggaacggagaagcgaggacgcccagagcaaggccgccctgaccgactggctgcgggctaaggccagcttcgtgatcgagggcctgaaggaggccgacaaggacgagttctgcagatgcgagctgaagctgcagaagtggtacggggacctgcggggaaagcccttcgccatcgaagccgagaacagcatcctggacatcagcggcttcagcaagcagtacaactgtgccttcatctggcagaaggacggcgtgaagaagctgaacctgtacctgatcatcaactacttcaagggcggcaagctgcggttcaagaagatcaaacctgaagccttcgaagccaacagattctacaccgtgatcaacaaaaagagcggcgagatcgtgcccatggaggtgaacttcaacttcgacgaccccaacctgatcatcctgcctctggcctttggcaagagacagggcagagaattcatctggaacgacctgctgtccctggaaaccggcagcctgaagctggccaacggaagagtgatcgagaagacactgtacaacagaagaacccggcaggatgagcctgccctgttcgtggccctgaccttcgagcggcgggaggtcctggactcctccaatatcaaaccaatgaacctgatcggcgtggcaagaggcgaaaacatccccgccgtgatcgccctgaccgaccccgagggctgcccactgagccggtttaaggatagcctgggaaacccaacccacatcctgagaatcggcgagagctataaggagaagcagcggaccatccaggccaagaaggaggtggagcagcggagagccggcggctacagccggaagtacgccagcaaagccaagaatctggcagacgatatggtgagaaacaccgctagagatctgctgtactacgccgtgacccaggatgccatgctgatcttcgccaacctgagccggggcttcggccggcagggcaagcggaccttcatggccgagagacagtacacacggatggaggactggctgaccgccaagctggcctacgagggcctgagcaagacctacctgtccaagacactggcccagtacacctccaagacatgcagcaactgtgggtttaccatcaccagcgccgactacgacagggtgctggagaagctgaagaagacagcaacaggctggatgaccacaattaacggcaaggagctgaaggtggagggccagattacctactacaacagatacaagagacagaacgtagtcaaggacctgtccgtcgagctggatagactgagcgaagaatctgtgaacaacgacatctcctcctggacaaagggcagaagcggagaagctctgagcctcctgaagaaaagattctcccatagacccgtgcaggagaagttcgtgtgcctgaactgcggcttcgagacacacgcagccgagcaagccgccctgaacatcgccagatcctggctgttcctgcggagccaggagtacaagaaataccagacaaacaagacaaccggcaacaccgataagagagccttcgtcgagacctggcagtccttttaccggaagaagcttaaggaggtgtggaaacctgccgtgcggtctggcggatctggcggaggctcctagccaggagcccgtgaccttcgaggacgtggccgtgtacttcacccagaaccagtgggccagcctggaccccatgcagagggccctgtacctggaggtgatgctggagaactacgccaacatcaccagcctggccgccctgcccttccccaagcccgacctgatcctgcagctggagcagggcgaggccccctgggacctggacccctggacccccctggagggcgaggccctggagggcgtgggatctggctccggcagcggccccaagaaaaagagaaaagtctaagctgccttctgcggggcttgccttctggccatgcccttcttctctcccttgcacctgtacctcttggtctttgaataaagcctgagtaggaaggctagcaaaaaaaaaaaaaaaaaaaaaaaaaaaaaaaaaaaaaaaaaaaaaaaaaaaaaaaaaaaaaaaaaaaaaaaaaaaaaaaa

SEQ ID NO: 15474 - RNA, 9485 nt, synthetic construct
  source 1..9485: mol_type = other RNA
aggaaataagagagaaaagaagagtaagaagaaatataagagccaccatggcccctaagaagaagcgtaaagtgagccggatggaacgcctcgtctacgaggtgcggcagaagtgcagaaacatcgaggacatctgcatctcctgcggatctctgaacgtgaccctggagcacccactgttcatcggcggcatgtgccagaactgtaaaaactgttttctggagtgtgcctatcaatacgacgatgacggctaccagagctactgcaccatctgttgcggcggaagagaggtgctgatgtgtggaaataacaactgctgccggtgcttctgcgtggaatgcgtggacctgctggtgggccccggcgccgcccaggccgctattaaggaagatccttggaactgctacatgtgcggccacaagggcacatacggcctgctgagacggagagaggactggcctagcagactgcagatgttcttcgccaataaccacgaccaggagttcgacccccctaaggtgtaccctcccgtccccgccgagaagagaaagcccatccgggtcctgagcctgttcgatggcatcgccaccggtctgctggtgctgaaggacctgggcatccaggtggataggtacattgcctccgaggtgtgcgaggactccatcaccgtgggaatggtgcgtcatcagggcaagatcatgtacgtgggcgacgtgcggagcgtgacacagaagcatatccaggagtggggccctttcgacctggtgatcggcggcagcccttgcaatgacctgagcatcgtgaacccagcccggaagggcctgtacgagggaaccggcagactgttcttcgagttttacagactgctgcacgacgcccggcctaaggaaggcgacgaccggcccttcttttggctgttcgagaatgtggtggccatgggagtcagcgacaagcgggatattagccggttcctggagagcaaccccgtgatgatcgatgccaaggaagtgagcgccgcccaccgggccagatacttctggggcaatctgcctggcatgaacagacccctggccagcaccgtgaacgacaagctggagctgcaggagtgcctggagcacggccggatcgccaagttcagcaaggtgagaaccatcaccacccgaagcaacagcatcaaacaaggcaaggaccagcactttcctgtgttcatgaacgagaaggaggacatcctgtggtgtaccgagatggagagagtgttcgggttcccagtccactacacagatgtcagcaacatgtctagactggccagacagagactgctgggaagaagctggtccgtccctgtgatcagacacctgttcgcccctctgaaggagtacttcgcctgcgtgagcagcggcaacagcaacgccaacagccggggccccagcttctctagcggcctggtgccactgtccctgagagggagccacatgggccccatggagatctacaaaaccgtgagcgcctggaagcggcagcctgtgcgcgtgctgagcctgtttcggaatatcgataaagtcctgaaaagcctgggattcctggagagcggctctggctccggcggtggcaccctgaagtacgtggaggatgtgacaaacgtggtcagacgggatgtggagaagtggggccccttcgatctggtgtacggcagcacccaacccctgggcagctcttgtgaccggtgccctggctggtacatgtttcagttccaccggatcctgcagtacgccctgccgagacaggagtcccagcggccattcttttggattttcatggacaacttgctgctgaccgaggatgaccaggaaactaccactcggttcctgcagaccgaagccgtgaccctgcaggacgtgagaggccgggactaccagaacgccatgcgggtgtggtccaacatccctggactgaaaagcaagcacgcacctctgacccctaaagaagaggagtacctgcaggcccaggtgcggagcagaagcaagctggacgcccctaaggtggatctgctggtgaagaattgcctcctgcccctgagagagtacttcaagtatttcagccagaatagtctgcccctgggaggcagcggcggcggcgccctggtgacatttgaggacgtcgccgtgcggttcacccaggaggaatgggctctgctggatccttctcagaaaatcctgtaccgggacgtgatgagagagacataccggaatctgacctccgtgggcatcaactgggaatgttgggaccttgaagcctgcttcagaagcctgggaagaaacctgagagtgcaggtggtgaagagaaagtgcgagctgaccaacagcggcccctgcgccgagggcggcccaagcagcggcgcccctcctcccagcggcggcagcccagccggctccccaacctctaccgaggagggcacctctgagtccgccacccccgagagcggccctggcacctccaccgagcccagcgagggcagcgcacccggcagccctgccggcagccccacctccacagaggagggaaccagcaccgagcccagcgaaggcagcgccccaggcaccagcaccgagcctagtgagcaggagattaaacggatcaacaagatcagaagaagacttgtgaaagacagcaacaccaagaaggccggcaagacaggccccatgaaaaccctgctggttagagtgatgacacccgatctgagagagcggctggaaaacctgagaaagaagcctgaaaatatcccccagcccatcagcaatacatctagagccaacctgaataagctgctgaccgattacaccgaaatgaagaaggcgatcctgcatgtgtactgggaagagttccagaaggaccctgtgggcctgatgagccgggtggcccagcctgccagcaagaagatcgatcagaacaagctgaaacctgagatggacgagaagggcaacctgaccaccgccggctttgcctgctctcagtgtggccagcccctgttcgtgtacaagctggagcaggtgtctgagaagggcaaggcttacaccaactacttcggacggtgcaatgtggccgagcacgaaaagctgatcctgctggcccagctgaagcccgagaaggatagcgacgaagccgtgacatatagcctgggaaagtttgggcagagggccctggatttctacagcattcatgtgaccaaggagtccacccaccccgtgaagcccctggcccagatcgccggaaacagatacgcctccggacctgtgggaaaggccctgagcgacgcatgtatgggcacaatcgcctccttcctgtctaagtaccaggacatcatcatcgaacaccagaaggtggtgaagggcaaccagaagagactggagagcctgcgggagctggccggcaaggaaaacctggaataccctagcgtgaccctgccacctcagcctcacaccaaggagggcgttgatgcctacaacgaagtgatcgcccgggtgcgaatgtgggtgaacctgaacctgtggcagaagctgaagctaagcagagatgatgccaagcctctgctgagactgaagggattcccttcctttcctctggtcgagagacaggccaacgaagtggactggtgggacatggtgtgtaacgtgaagaagctgatcaacgagaaaaaggaggatggcaaggtgttttggcagaatctggctggctacaagagacaggaagccctgagaccatacctgagcagcgaggaagatcggaagaagggaaagaaattcgctcggtaccagctgggcgacctgctgctgcacctggaaaagaagcacggcgaggactggggaaaggtgtacgacgaggcctgggagcggattgacaagaaagtggaaggcctgagcaagcacatcaagctggaagaggaacggagaagcgaggacgcccagagcaaggccgccctgaccgactggctgcgggctaaggccagcttcgtgatcgagggcctgaaggaggccgacaaggacgagttctgcagatgcgagctgaagctgcagaagtggtacggggacctgcggggaaagcccttcgccatcgaagccgagaacagcatcctggacatcagcggcttcagcaagcagtacaactgtgccttcatctggcagaaggacggcgtgaagaagctgaacctgtacctgatcatcaactacttcaagggcggcaagctgcggttcaagaagatcaaacctgaagccttcgaagccaacagattctacaccgtgatcaacaaaaagagcggcgagatcgtgcccatggaggtgaacttcaacttcgacgaccccaacctgatcatcctgcctctggcctttggcaagagacagggcagagaattcatctggaacgacctgctgtccctggaaaccggcagcctgaagctggccaacggaagagtgatcgagaagacactgtacaacagaagaacccggcaggatgagcctgccctgttcgtggccctgaccttcgagcggcgggaggtcctggactcctccaatatcaaaccaatgaacctgatcggcgtggcaagaggcgaaaacatccccgccgtgatcgccctgaccgaccccgagggctgcccactgagccggtttaaggatagcctgggaaacccaacccacatcctgagaatcggcgagagctataaggagaagcagcggaccatccaggccaagaaggaggtggagcagcggagagccggcggctacagccggaagtacgccagcaaagccaagaatctggcagacgatatggtgagaaacaccgctagagatctgctgtactacgccgtgacccaggatgccatgctgatcttcgccaacctgagccggggcttcggccggcagggcaagcggaccttcatggccgagagacagtacacacggatggaggactggctgaccgccaagctggcctacgagggcctgagcaagacctacctgtccaagacactggcccagtacacctccaagacatgcagcaactgtgggtttaccatcaccagcgccgactacgacagggtgctggagaagctgaagaagacagcaacaggctggatgaccacaattaacggcaaggagctgaaggtggagggccagattacctactacaacagatacaagagacagaacgtagtcaaggacctgtccgtcgagctggatagactgagcgaagaatctgtgaacaacgacatctcctcctggacaaagggcagaagcggagaagctctgagcctcctgaagaaaagattctcccatagacccgtgcaggagaagttcgtgtgcctgaactgcggcttcgagacacacgcagccgagcaagccgccctgaacatcgccagatcctggctgttcctgcggagccaggagtacaagaaataccagacaaacaagacaaccggcaacaccgataagagagccttcgtcgagacctggcagtccttttaccggaagaagcttaaggaggtgtggaaacctgccgtgcggtctggcggatctggcggaggctccctgcccggcctgatggccttcgaggacgtggccgtgtacttcagccaggaggagtggggcctgctggacgccgtgcagagggccctgtacaggcacgtgatgctggagaacttcgccctggtggccagcctgggcctgagcgccagccccccccacgtggtgatccagctgcagaggggcgaggagccctgggtgcccagcggcctggacatgaccagcgccaggaacggccacaggaggcccggcggcccaagcagcggcgcccctcctcccagcggcggcagcccagccggctccccaacctctaccgaggagggcacctctgagtccgccacccccgagagcggccctggcacctccaccgagcccagcgagggcagcgcacccggcagccctgccggcagccccacctccacagaggagggaaccagcaccgagcccagcgaaggcagcgccccaggcaccagcaccgagcctagtgagcaggagattaaacggatcaacaagatcagaagaagacttgtgaaagacagcaacaccaagaaggccggcaagacaggccccatgaaaaccctgctggttagagtgatgacacccgatctgagagagcggctggaaaacctgagaaagaagcctgaaaatatcccccagcccatcagcaatacatctagagccaacctgaataagctgctgaccgattacaccgaaatgaagaaggcgatcctgcatgtgtactgggaagagttccagaaggaccctgtgggcctgatgagccgggtggcccagcctgccagcaagaagatcgatcagaacaagctgaaacctgagatggacgagaagggcaacctgaccaccgccggctttgcctgctctcagtgtggccagcccctgttcgtgtacaagctggagcaggtgtctgagaagggcaaggcttacaccaactacttcggacggtgcaatgtggccgagcacgaaaagctgatcctgctggcccagctgaagcccgagaaggatagcgacgaagccgtgacatatagcctgggaaagtttgggcagagggccctggatttctacagcattcatgtgaccaaggagtccacccaccccgtgaagcccctggcccagatcgccggaaacagatacgcctccggacctgtgggaaaggccctgagcgacgcatgtatgggcacaatcgcctccttcctgtctaagtaccaggacatcatcatcgaacaccagaaggtggtgaagggcaaccagaagagactggagagcctgcgggagctggccggcaaggaaaacctggaataccctagcgtgaccctgccacctcagcctcacaccaaggagggcgttgatgcctacaacgaagtgatcgcccgggtgcgaatgtgggtgaacctgaacctgtggcagaagctgaagctaagcagagatgatgccaagcctctgctgagactgaagggattcccttcctttcctctggtcgagagacaggccaacgaagtggactggtgggacatggtgtgtaacgtgaagaagctgatcaacgagaaaaaggaggatggcaaggtgttttggcagaatctggctggctacaagagacaggaagccctgagaccatacctgagcagcgaggaagatcggaagaagggaaagaaattcgctcggtaccagctgggcgacctgctgctgcacctggaaaagaagcacggcgaggactggggaaaggtgtacgacgaggcctgggagcggattgacaagaaagtggaaggcctgagcaagcacatcaagctggaagaggaacggagaagcgaggacgcccagagcaaggccgccctgaccgactggctgcgggctaaggccagcttcgtgatcgagggcctgaaggaggccgacaaggacgagttctgcagatgcgagctgaagctgcagaagtggtacggggacctgcggggaaagcccttcgccatcgaagccgagaacagcatcctggacatcagcggcttcagcaagcagtacaactgtgccttcatctggcagaaggacggcgtgaagaagctgaacctgtacctgatcatcaactacttcaagggcggcaagctgcggttcaagaagatcaaacctgaagccttcgaagccaacagattctacaccgtgatcaacaaaaagagcggcgagatcgtgcccatggaggtgaacttcaacttcgacgaccccaacctgatcatcctgcctctggcctttggcaagagacagggcagagaattcatctggaacgacctgctgtccctggaaaccggcagcctgaagctggccaacggaagagtgatcgagaagacactgtacaacagaagaacccggcaggatgagcctgccctgttcgtggccctgaccttcgagcggcgggaggtcctggactcctccaatatcaaaccaatgaacctgatcggcgtggcaagaggcgaaaacatccccgccgtgatcgccctgaccgaccccgagggctgcccactgagccggtttaaggatagcctgggaaacccaacccacatcctgagaatcggcgagagctataaggagaagcagcggaccatccaggccaagaaggaggtggagcagcggagagccggcggctacagccggaagtacgccagcaaagccaagaatctggcagacgatatggtgagaaacaccgctagagatctgctgtactacgccgtgacccaggatgccatgctgatcttcgccaacctgagccggggcttcggccggcagggcaagcggaccttcatggccgagagacagtacacacggatggaggactggctgaccgccaagctggcctacgagggcctgagcaagacctacctgtccaagacactggcccagtacacctccaagacatgcagcaactgtgggtttaccatcaccagcgccgactacgacagggtgctggagaagctgaagaagacagcaacaggctggatgaccacaattaacggcaaggagctgaaggtggagggccagattacctactacaacagatacaagagacagaacgtagtcaaggacctgtccgtcgagctggatagactgagcgaagaatctgtgaacaacgacatctcctcctggacaaagggcagaagcggagaagctctgagcctcctgaagaaaagattctcccatagacccgtgcaggagaagttcgtgtgcctgaactgcggcttcgagacacacgcagccgagcaagccgccctgaacatcgccagatcctggctgttcctgcggagccaggagtacaagaaataccagacaaacaagacaaccggcaacaccgataagagagccttcgtcgagacctggcagtccttttaccggaagaagcttaaggaggtgtggaaacctgccgtgcggtctggcggatctggcggaggctcctctgcccggcctgatggccttcgaggacgtggccgtgtacttcagccaggaggagtggggcctgctggacgccgtgcagagggccctgtacaggcacgtgatgctggagaacttcgccctggtggccagcctgggcctgagcgccagccccccccacgtggtgatccagctgcagaggggcgaggagccctgggtgcccagcggcctggacatgaccagcgccaggaacggccacaggaggcccggatctggctccggcagcggccccaagaaaaagagaaaagtctaagctgccttctgcggggcttgccttctggccatgcccttcttctctcccttgcacctgtacctcttggtctttgaataaagcctgagtaggaaggctagcaaaaaaaaaaaaaaaaaaaaaaaaaaaaaaaaaaaaaaaaaaaaaaaaaaaaaaaaaaaaaaaaaaaaaaaaaaaaaaaa

SEQ ID NO: 15475 - RNA, 9485 nt, synthetic construct
  source 1..9485: mol_type = other RNA
aggaaataagagagaaaagaagagtaagaagaaatataagagccaccatggcccctaagaagaagcgtaaagtgagccggatggaacgcctcgtctacgaggtgcggcagaagtgcagaaacatcgaggacatctgcatctcctgcggatctctgaacgtgaccctggagcacccactgttcatcggcggcatgtgccagaactgtaaaaactgttttctggagtgtgcctatcaatacgacgatgacggctaccagagctactgcaccatctgttgcggcggaagagaggtgctgatgtgtggaaataacaactgctgccggtgcttctgcgtggaatgcgtggacctgctggtgggccccggcgccgcccaggccgctattaaggaagatccttggaactgctacatgtgcggccacaagggcacatacggcctgctgagacggagagaggactggcctagcagactgcagatgttcttcgccaataaccacgaccaggagttcgacccccctaaggtgtaccctcccgtccccgccgagaagagaaagcccatccgggtcctgagcctgttcgatggcatcgccaccggtctgctggtgctgaaggacctgggcatccaggtggataggtacattgcctccgaggtgtgcgaggactccatcaccgtgggaatggtgcgtcatcagggcaagatcatgtacgtgggcgacgtgcggagcgtgacacagaagcatatccaggagtggggccctttcgacctggtgatcggcggcagcccttgcaatgacctgagcatcgtgaacccagcccggaagggcctgtacgagggaaccggcagactgttcttcgagttttacagactgctgcacgacgcccggcctaaggaaggcgacgaccggcccttcttttggctgttcgagaatgtggtggccatgggagtcagcgacaagcgggatattagccggttcctggagagcaaccccgtgatgatcgatgccaaggaagtgagcgccgcccaccgggccagatacttctggggcaatctgcctggcatgaacagacccctggccagcaccgtgaacgacaagctggagctgcaggagtgcctggagcacggccggatcgccaagttcagcaaggtgagaaccatcaccacccgaagcaacagcatcaaacaaggcaaggaccagcactttcctgtgttcatgaacgagaaggaggacatcctgtggtgtaccgagatggagagagtgttcgggttcccagtccactacacagatgtcagcaacatgtctagactggccagacagagactgctgggaagaagctggtccgtccctgtgatcagacacctgttcgcccctctgaaggagtacttcgcctgcgtgagcagcggcaacagcaacgccaacagccggggccccagcttctctagcggcctggtgccactgtccctgagagggagccacatgggccccatggagatctacaaaaccgtgagcgcctggaagcggcagcctgtgcgcgtgctgagcctgtttcggaatatcgataaagtcctgaaaagcctgggattcctggagagcggctctggctccggcggtggcaccctgaagtacgtggaggatgtgacaaacgtggtcagacgggatgtggagaagtggggccccttcgatctggtgtacggcagcacccaacccctgggcagctcttgtgaccggtgccctggctggtacatgtttcagttccaccggatcctgcagtacgccctgccgagacaggagtcccagcggccattcttttggattttcatggacaacttgctgctgaccgaggatgaccaggaaactaccactcggttcctgcagaccgaagccgtgaccctgcaggacgtgagaggccgggactaccagaacgccatgcgggtgtggtccaacatccctggactgaaaagcaagcacgcacctctgacccctaaagaagaggagtacctgcaggcccaggtgcggagcagaagcaagctggacgcccctaaggtggatctgctggtgaagaattgcctcctgcccctgagagagtacttcaagtatttcagccagaatagtctgcccctgggaggcagcggcggcggcgccctggtgacatttgaggacgtcgccgtgcggttcacccaggaggaatgggctctgctggatccttctcagaaaatcctgtaccgggacgtgatgagagagacataccggaatctgacctccgtgggcatcaactgggaatgttgggaccttgaagcctgcttcagaagcctgggaagaaacctgagagtgcaggtggtgaagagaaagtgcgagctgaccaacagcggcccctgcgccgagggcggcccaagcagcggcgcccctcctcccagcggcggcagcccagccggctccccaacctctaccgaggagggcacctctgagtccgccacccccgagagcggccctggcacctccaccgagcccagcgagggcagcgcacccggcagccctgccggcagccccacctccacagaggagggaaccagcaccgagcccagcgaaggcagcgccccaggcaccagcaccgagcctagtgagcaggagattaaacggatcaacaagatcagaagaagacttgtgaaagacagcaacaccaagaaggccggcaagacaggccccatgaaaaccctgctggttagagtgatgacacccgatctgagagagcggctggaaaacctgagaaagaagcctgaaaatatcccccagcccatcagcaatacatctagagccaacctgaataagctgctgaccgattacaccgaaatgaagaaggcgatcctgcatgtgtactgggaagagttccagaaggaccctgtgggcctgatgagccgggtggcccagcctgccagcaagaagatcgatcagaacaagctgaaacctgagatggacgagaagggcaacctgaccaccgccggctttgcctgctctcagtgtggccagcccctgttcgtgtacaagctggagcaggtgtctgagaagggcaaggcttacaccaactacttcggacggtgcaatgtggccgagcacgaaaagctgatcctgctggcccagctgaagcccgagaaggatagcgacgaagccgtgacatatagcctgggaaagtttgggcagagggccctggatttctacagcattcatgtgaccaaggagtccacccaccccgtgaagcccctggcccagatcgccggaaacagatacgcctccggacctgtgggaaaggccctgagcgacgcatgtatgggcacaatcgcctccttcctgtctaagtaccaggacatcatcatcgaacaccagaaggtggtgaagggcaaccagaagagactggagagcctgcgggagctggccggcaaggaaaacctggaataccctagcgtgaccctgccacctcagcctcacaccaaggagggcgttgatgcctacaacgaagtgatcgcccgggtgcgaatgtgggtgaacctgaacctgtggcagaagctgaagctaagcagagatgatgccaagcctctgctgagactgaagggattcccttcctttcctctggtcgagagacaggccaacgaagtggactggtgggacatggtgtgtaacgtgaagaagctgatcaacgagaaaaaggaggatggcaaggtgttttggcagaatctggctggctacaagagacaggaagccctgagaccatacctgagcagcgaggaagatcggaagaagggaaagaaattcgctcggtaccagctgggcgacctgctgctgcacctggaaaagaagcacggcgaggactggggaaaggtgtacgacgaggcctgggagcggattgacaagaaagtggaaggcctgagcaagcacatcaagctggaagaggaacggagaagcgaggacgcccagagcaaggccgccctgaccgactggctgcgggctaaggccagcttcgtgatcgagggcctgaaggaggccgacaaggacgagttctgcagatgcgagctgaagctgcagaagtggtacggggacctgcggggaaagcccttcgccatcgaagccgagaacagcatcctggacatcagcggcttcagcaagcagtacaactgtgccttcatctggcagaaggacggcgtgaagaagctgaacctgtacctgatcatcaactacttcaagggcggcaagctgcggttcaagaagatcaaacctgaagccttcgaagccaacagattctacaccgtgatcaacaaaaagagcggcgagatcgtgcccatggaggtgaacttcaacttcgacgaccccaacctgatcatcctgcctctggcctttggcaagagacagggcagagaattcatctggaacgacctgctgtccctggaaaccggcagcctgaagctggccaacggaagagtgatcgagaagacactgtacaacagaagaacccggcaggatgagcctgccctgttcgtggccctgaccttcgagcggcgggaggtcctggactcctccaatatcaaaccaatgaacctgatcggcgtggcaagaggcgaaaacatccccgccgtgatcgccctgaccgaccccgagggctgcccactgagccggtttaaggatagcctgggaaacccaacccacatcctgagaatcggcgagagctataaggagaagcagcggaccatccaggccaagaaggaggtggagcagcggagagccggcggctacagccggaagtacgccagcaaagccaagaatctggcagacgatatggtgagaaacaccgctagagatctgctgtactacgccgtgacccaggatgccatgctgatcttcgccaacctgagccggggcttcggccggcagggcaagcggaccttcatggccgagagacagtacacacggatggaggactggctgaccgccaagctggcctacgagggcctgagcaagacctacctgtccaagacactggcccagtacacctccaagacatgcagcaactgtgggtttaccatcaccagcgccgactacgacagggtgctggagaagctgaagaagacagcaacaggctggatgaccacaattaacggcaaggagctgaaggtggagggccagattacctactacaacagatacaagagacagaacgtagtcaaggacctgtccgtcgagctggatagactgagcgaagaatctgtgaacaacgacatctcctcctggacaaagggcagaagcggagaagctctgagcctcctgaagaaaagattctcccatagacccgtgcaggagaagttcgtgtgcctgaactgcggcttcgagacacacgcagccgagcaagccgccctgaacatcgccagatcctggctgttcctgcggagccaggagtacaagaaataccagacaaacaagacaaccggcaacaccgataagagagccttcgtcgagacctggcagtccttttaccggaagaagcttaaggaggtgtggaaacctgccgtgcggtctggcggatctggcggaggctcctgctaccaggacagcgtgaccttcgacgacgtggccgtggacttcacccaggaggagtggaccctgctggacagcacccagaggagcctgtacagcgacgtgatgctggagaactacaagaacctggccaccgtgggcggccagatcatcaagcccagcctgatcagctggctggagcaggaggagagcaggaccgtgcagggcggcgtgctgaggggcaggaagacccagtggaggggcaccggcggcccaagcagcggcgcccctcctcccagcggcggcagcccagccggctccccaacctctaccgaggagggcacctctgagtccgccacccccgagagcggccctggcacctccaccgagcccagcgagggcagcgcacccggcagccctgccggcagccccacctccacagaggagggaaccagcaccgagcccagcgaaggcagcgccccaggcaccagcaccgagcctagtgagcaggagattaaacggatcaacaagatcagaagaagacttgtgaaagacagcaacaccaagaaggccggcaagacaggccccatgaaaaccctgctggttagagtgatgacacccgatctgagagagcggctggaaaacctgagaaagaagcctgaaaatatcccccagcccatcagcaatacatctagagccaacctgaataagctgctgaccgattacaccgaaatgaagaaggcgatcctgcatgtgtactgggaagagttccagaaggaccctgtgggcctgatgagccgggtggcccagcctgccagcaagaagatcgatcagaacaagctgaaacctgagatggacgagaagggcaacctgaccaccgccggctttgcctgctctcagtgtggccagcccctgttcgtgtacaagctggagcaggtgtctgagaagggcaaggcttacaccaactacttcggacggtgcaatgtggccgagcacgaaaagctgatcctgctggcccagctgaagcccgagaaggatagcgacgaagccgtgacatatagcctgggaaagtttgggcagagggccctggatttctacagcattcatgtgaccaaggagtccacccaccccgtgaagcccctggcccagatcgccggaaacagatacgcctccggacctgtgggaaaggccctgagcgacgcatgtatgggcacaatcgcctccttcctgtctaagtaccaggacatcatcatcgaacaccagaaggtggtgaagggcaaccagaagagactggagagcctgcgggagctggccggcaaggaaaacctggaataccctagcgtgaccctgccacctcagcctcacaccaaggagggcgttgatgcctacaacgaagtgatcgcccgggtgcgaatgtgggtgaacctgaacctgtggcagaagctgaagctaagcagagatgatgccaagcctctgctgagactgaagggattcccttcctttcctctggtcgagagacaggccaacgaagtggactggtgggacatggtgtgtaacgtgaagaagctgatcaacgagaaaaaggaggatggcaaggtgttttggcagaatctggctggctacaagagacaggaagccctgagaccatacctgagcagcgaggaagatcggaagaagggaaagaaattcgctcggtaccagctgggcgacctgctgctgcacctggaaaagaagcacggcgaggactggggaaaggtgtacgacgaggcctgggagcggattgacaagaaagtggaaggcctgagcaagcacatcaagctggaagaggaacggagaagcgaggacgcccagagcaaggccgccctgaccgactggctgcgggctaaggccagcttcgtgatcgagggcctgaaggaggccgacaaggacgagttctgcagatgcgagctgaagctgcagaagtggtacggggacctgcggggaaagcccttcgccatcgaagccgagaacagcatcctggacatcagcggcttcagcaagcagtacaactgtgccttcatctggcagaaggacggcgtgaagaagctgaacctgtacctgatcatcaactacttcaagggcggcaagctgcggttcaagaagatcaaacctgaagccttcgaagccaacagattctacaccgtgatcaacaaaaagagcggcgagatcgtgcccatggaggtgaacttcaacttcgacgaccccaacctgatcatcctgcctctggcctttggcaagagacagggcagagaattcatctggaacgacctgctgtccctggaaaccggcagcctgaagctggccaacggaagagtgatcgagaagacactgtacaacagaagaacccggcaggatgagcctgccctgttcgtggccctgaccttcgagcggcgggaggtcctggactcctccaatatcaaaccaatgaacctgatcggcgtggcaagaggcgaaaacatccccgccgtgatcgccctgaccgaccccgagggctgcccactgagccggtttaaggatagcctgggaaacccaacccacatcctgagaatcggcgagagctataaggagaagcagcggaccatccaggccaagaaggaggtggagcagcggagagccggcggctacagccggaagtacgccagcaaagccaagaatctggcagacgatatggtgagaaacaccgctagagatctgctgtactacgccgtgacccaggatgccatgctgatcttcgccaacctgagccggggcttcggccggcagggcaagcggaccttcatggccgagagacagtacacacggatggaggactggctgaccgccaagctggcctacgagggcctgagcaagacctacctgtccaagacactggcccagtacacctccaagacatgcagcaactgtgggtttaccatcaccagcgccgactacgacagggtgctggagaagctgaagaagacagcaacaggctggatgaccacaattaacggcaaggagctgaaggtggagggccagattacctactacaacagatacaagagacagaacgtagtcaaggacctgtccgtcgagctggatagactgagcgaagaatctgtgaacaacgacatctcctcctggacaaagggcagaagcggagaagctctgagcctcctgaagaaaagattctcccatagacccgtgcaggagaagttcgtgtgcctgaactgcggcttcgagacacacgcagccgagcaagccgccctgaacatcgccagatcctggctgttcctgcggagccaggagtacaagaaataccagacaaacaagacaaccggcaacaccgataagagagccttcgtcgagacctggcagtccttttaccggaagaagcttaaggaggtgtggaaacctgccgtgcggtctggcggatctggcggaggctccttgctaccaggacagcgtgaccttcgacgacgtggccgtggacttcacccaggaggagtggaccctgctggacagcacccagaggagcctgtacagcgacgtgatgctggagaactacaagaacctggccaccgtgggcggccagatcatcaagcccagcctgatcagctggctggagcaggaggagagcaggaccgtgcagggcggcgtgctgaggggcaggaagacccagtggaggggcaccggatctggctccggcagcggccccaagaaaaagagaaaagtctaagctgccttctgcggggcttgccttctggccatgcccttcttctctcccttgcacctgtacctcttggtctttgaataaagcctgagtaggaaggctagcaaaaaaaaaaaaaaaaaaaaaaaaaaaaaaaaaaaaaaaaaaaaaaaaaaaaaaaaaaaaaaaaaaaaaaaaaaaaaaaa

SEQ ID NO: 15476 - RNA, 9485 nt, synthetic construct
  source 1..9485: mol_type = other RNA
aggaaataagagagaaaagaagagtaagaagaaatataagagccaccatggcccctaagaagaagcgtaaagtgagccggatggaacgcctcgtctacgaggtgcggcagaagtgcagaaacatcgaggacatctgcatctcctgcggatctctgaacgtgaccctggagcacccactgttcatcggcggcatgtgccagaactgtaaaaactgttttctggagtgtgcctatcaatacgacgatgacggctaccagagctactgcaccatctgttgcggcggaagagaggtgctgatgtgtggaaataacaactgctgccggtgcttctgcgtggaatgcgtggacctgctggtgggccccggcgccgcccaggccgctattaaggaagatccttggaactgctacatgtgcggccacaagggcacatacggcctgctgagacggagagaggactggcctagcagactgcagatgttcttcgccaataaccacgaccaggagttcgacccccctaaggtgtaccctcccgtccccgccgagaagagaaagcccatccgggtcctgagcctgttcgatggcatcgccaccggtctgctggtgctgaaggacctgggcatccaggtggataggtacattgcctccgaggtgtgcgaggactccatcaccgtgggaatggtgcgtcatcagggcaagatcatgtacgtgggcgacgtgcggagcgtgacacagaagcatatccaggagtggggccctttcgacctggtgatcggcggcagcccttgcaatgacctgagcatcgtgaacccagcccggaagggcctgtacgagggaaccggcagactgttcttcgagttttacagactgctgcacgacgcccggcctaaggaaggcgacgaccggcccttcttttggctgttcgagaatgtggtggccatgggagtcagcgacaagcgggatattagccggttcctggagagcaaccccgtgatgatcgatgccaaggaagtgagcgccgcccaccgggccagatacttctggggcaatctgcctggcatgaacagacccctggccagcaccgtgaacgacaagctggagctgcaggagtgcctggagcacggccggatcgccaagttcagcaaggtgagaaccatcaccacccgaagcaacagcatcaaacaaggcaaggaccagcactttcctgtgttcatgaacgagaaggaggacatcctgtggtgtaccgagatggagagagtgttcgggttcccagtccactacacagatgtcagcaacatgtctagactggccagacagagactgctgggaagaagctggtccgtccctgtgatcagacacctgttcgcccctctgaaggagtacttcgcctgcgtgagcagcggcaacagcaacgccaacagccggggccccagcttctctagcggcctggtgccactgtccctgagagggagccacatgggccccatggagatctacaaaaccgtgagcgcctggaagcggcagcctgtgcgcgtgctgagcctgtttcggaatatcgataaagtcctgaaaagcctgggattcctggagagcggctctggctccggcggtggcaccctgaagtacgtggaggatgtgacaaacgtggtcagacgggatgtggagaagtggggccccttcgatctggtgtacggcagcacccaacccctgggcagctcttgtgaccggtgccctggctggtacatgtttcagttccaccggatcctgcagtacgccctgccgagacaggagtcccagcggccattcttttggattttcatggacaacttgctgctgaccgaggatgaccaggaaactaccactcggttcctgcagaccgaagccgtgaccctgcaggacgtgagaggccgggactaccagaacgccatgcgggtgtggtccaacatccctggactgaaaagcaagcacgcacctctgacccctaaagaagaggagtacctgcaggcccaggtgcggagcagaagcaagctggacgcccctaaggtggatctgctggtgaagaattgcctcctgcccctgagagagtacttcaagtatttcagccagaatagtctgcccctgggaggcagcggcggcggcgccctggtgacatttgaggacgtcgccgtgcggttcacccaggaggaatgggctctgctggatccttctcagaaaatcctgtaccgggacgtgatgagagagacataccggaatctgacctccgtgggcatcaactgggaatgttgggaccttgaagcctgcttcagaagcctgggaagaaacctgagagtgcaggtggtgaagagaaagtgcgagctgaccaacagcggcccctgcgccgagggcggcccaagcagcggcgcccctcctcccagcggcggcagcccagccggctccccaacctctaccgaggagggcacctctgagtccgccacccccgagagcggccctggcacctccaccgagcccagcgagggcagcgcacccggcagccctgccggcagccccacctccacagaggagggaaccagcaccgagcccagcgaaggcagcgccccaggcaccagcaccgagcctagtgagcaggagattaaacggatcaacaagatcagaagaagacttgtgaaagacagcaacaccaagaaggccggcaagacaggccccatgaaaaccctgctggttagagtgatgacacccgatctgagagagcggctggaaaacctgagaaagaagcctgaaaatatcccccagcccatcagcaatacatctagagccaacctgaataagctgctgaccgattacaccgaaatgaagaaggcgatcctgcatgtgtactgggaagagttccagaaggaccctgtgggcctgatgagccgggtggcccagcctgccagcaagaagatcgatcagaacaagctgaaacctgagatggacgagaagggcaacctgaccaccgccggctttgcctgctctcagtgtggccagcccctgttcgtgtacaagctggagcaggtgtctgagaagggcaaggcttacaccaactacttcggacggtgcaatgtggccgagcacgaaaagctgatcctgctggcccagctgaagcccgagaaggatagcgacgaagccgtgacatatagcctgggaaagtttgggcagagggccctggatttctacagcattcatgtgaccaaggagtccacccaccccgtgaagcccctggcccagatcgccggaaacagatacgcctccggacctgtgggaaaggccctgagcgacgcatgtatgggcacaatcgcctccttcctgtctaagtaccaggacatcatcatcgaacaccagaaggtggtgaagggcaaccagaagagactggagagcctgcgggagctggccggcaaggaaaacctggaataccctagcgtgaccctgccacctcagcctcacaccaaggagggcgttgatgcctacaacgaagtgatcgcccgggtgcgaatgtgggtgaacctgaacctgtggcagaagctgaagctaagcagagatgatgccaagcctctgctgagactgaagggattcccttcctttcctctggtcgagagacaggccaacgaagtggactggtgggacatggtgtgtaacgtgaagaagctgatcaacgagaaaaaggaggatggcaaggtgttttggcagaatctggctggctacaagagacaggaagccctgagaccatacctgagcagcgaggaagatcggaagaagggaaagaaattcgctcggtaccagctgggcgacctgctgctgcacctggaaaagaagcacggcgaggactggggaaaggtgtacgacgaggcctgggagcggattgacaagaaagtggaaggcctgagcaagcacatcaagctggaagaggaacggagaagcgaggacgcccagagcaaggccgccctgaccgactggctgcgggctaaggccagcttcgtgatcgagggcctgaaggaggccgacaaggacgagttctgcagatgcgagctgaagctgcagaagtggtacggggacctgcggggaaagcccttcgccatcgaagccgagaacagcatcctggacatcagcggcttcagcaagcagtacaactgtgccttcatctggcagaaggacggcgtgaagaagctgaacctgtacctgatcatcaactacttcaagggcggcaagctgcggttcaagaagatcaaacctgaagccttcgaagccaacagattctacaccgtgatcaacaaaaagagcggcgagatcgtgcccatggaggtgaacttcaacttcgacgaccccaacctgatcatcctgcctctggcctttggcaagagacagggcagagaattcatctggaacgacctgctgtccctggaaaccggcagcctgaagctggccaacggaagagtgatcgagaagacactgtacaacagaagaacccggcaggatgagcctgccctgttcgtggccctgaccttcgagcggcgggaggtcctggactcctccaatatcaaaccaatgaacctgatcggcgtggcaagaggcgaaaacatccccgccgtgatcgccctgaccgaccccgagggctgcccactgagccggtttaaggatagcctgggaaacccaacccacatcctgagaatcggcgagagctataaggagaagcagcggaccatccaggccaagaaggaggtggagcagcggagagccggcggctacagccggaagtacgccagcaaagccaagaatctggcagacgatatggtgagaaacaccgctagagatctgctgtactacgccgtgacccaggatgccatgctgatcttcgccaacctgagccggggcttcggccggcagggcaagcggaccttcatggccgagagacagtacacacggatggaggactggctgaccgccaagctggcctacgagggcctgagcaagacctacctgtccaagacactggcccagtacacctccaagacatgcagcaactgtgggtttaccatcaccagcgccgactacgacagggtgctggagaagctgaagaagacagcaacaggctggatgaccacaattaacggcaaggagctgaaggtggagggccagattacctactacaacagatacaagagacagaacgtagtcaaggacctgtccgtcgagctggatagactgagcgaagaatctgtgaacaacgacatctcctcctggacaaagggcagaagcggagaagctctgagcctcctgaagaaaagattctcccatagacccgtgcaggagaagttcgtgtgcctgaactgcggcttcgagacacacgcagccgagcaagccgccctgaacatcgccagatcctggctgttcctgcggagccaggagtacaagaaataccagacaaacaagacaaccggcaacaccgataagagagccttcgtcgagacctggcagtccttttaccggaagaagcttaaggaggtgtggaaacctgccgtgcggtctggcggatctggcggaggctcccaggagcccgtgaccttcgaggacgtggccgtgtacttcacccagaaccagtgggccagcctggacagcgcccagagggccctgtacagggaggtgatgctggagaactacgccaacgtggccagcctggtggtgagccccttccccaggcccgacctgatcagccagctggagaggggcgaggccccctgggaccccgacccctgggaggccgaggacctgaggggcatctgccccggcggcggcggcccaagcagcggcgcccctcctcccagcggcggcagcccagccggctccccaacctctaccgaggagggcacctctgagtccgccacccccgagagcggccctggcacctccaccgagcccagcgagggcagcgcacccggcagccctgccggcagccccacctccacagaggagggaaccagcaccgagcccagcgaaggcagcgccccaggcaccagcaccgagcctagtgagcaggagattaaacggatcaacaagatcagaagaagacttgtgaaagacagcaacaccaagaaggccggcaagacaggccccatgaaaaccctgctggttagagtgatgacacccgatctgagagagcggctggaaaacctgagaaagaagcctgaaaatatcccccagcccatcagcaatacatctagagccaacctgaataagctgctgaccgattacaccgaaatgaagaaggcgatcctgcatgtgtactgggaagagttccagaaggaccctgtgggcctgatgagccgggtggcccagcctgccagcaagaagatcgatcagaacaagctgaaacctgagatggacgagaagggcaacctgaccaccgccggctttgcctgctctcagtgtggccagcccctgttcgtgtacaagctggagcaggtgtctgagaagggcaaggcttacaccaactacttcggacggtgcaatgtggccgagcacgaaaagctgatcctgctggcccagctgaagcccgagaaggatagcgacgaagccgtgacatatagcctgggaaagtttgggcagagggccctggatttctacagcattcatgtgaccaaggagtccacccaccccgtgaagcccctggcccagatcgccggaaacagatacgcctccggacctgtgggaaaggccctgagcgacgcatgtatgggcacaatcgcctccttcctgtctaagtaccaggacatcatcatcgaacaccagaaggtggtgaagggcaaccagaagagactggagagcctgcgggagctggccggcaaggaaaacctggaataccctagcgtgaccctgccacctcagcctcacaccaaggagggcgttgatgcctacaacgaagtgatcgcccgggtgcgaatgtgggtgaacctgaacctgtggcagaagctgaagctaagcagagatgatgccaagcctctgctgagactgaagggattcccttcctttcctctggtcgagagacaggccaacgaagtggactggtgggacatggtgtgtaacgtgaagaagctgatcaacgagaaaaaggaggatggcaaggtgttttggcagaatctggctggctacaagagacaggaagccctgagaccatacctgagcagcgaggaagatcggaagaagggaaagaaattcgctcggtaccagctgggcgacctgctgctgcacctggaaaagaagcacggcgaggactggggaaaggtgtacgacgaggcctgggagcggattgacaagaaagtggaaggcctgagcaagcacatcaagctggaagaggaacggagaagcgaggacgcccagagcaaggccgccctgaccgactggctgcgggctaaggccagcttcgtgatcgagggcctgaaggaggccgacaaggacgagttctgcagatgcgagctgaagctgcagaagtggtacggggacctgcggggaaagcccttcgccatcgaagccgagaacagcatcctggacatcagcggcttcagcaagcagtacaactgtgccttcatctggcagaaggacggcgtgaagaagctgaacctgtacctgatcatcaactacttcaagggcggcaagctgcggttcaagaagatcaaacctgaagccttcgaagccaacagattctacaccgtgatcaacaaaaagagcggcgagatcgtgcccatggaggtgaacttcaacttcgacgaccccaacctgatcatcctgcctctggcctttggcaagagacagggcagagaattcatctggaacgacctgctgtccctggaaaccggcagcctgaagctggccaacggaagagtgatcgagaagacactgtacaacagaagaacccggcaggatgagcctgccctgttcgtggccctgaccttcgagcggcgggaggtcctggactcctccaatatcaaaccaatgaacctgatcggcgtggcaagaggcgaaaacatccccgccgtgatcgccctgaccgaccccgagggctgcccactgagccggtttaaggatagcctgggaaacccaacccacatcctgagaatcggcgagagctataaggagaagcagcggaccatccaggccaagaaggaggtggagcagcggagagccggcggctacagccggaagtacgccagcaaagccaagaatctggcagacgatatggtgagaaacaccgctagagatctgctgtactacgccgtgacccaggatgccatgctgatcttcgccaacctgagccggggcttcggccggcagggcaagcggaccttcatggccgagagacagtacacacggatggaggactggctgaccgccaagctggcctacgagggcctgagcaagacctacctgtccaagacactggcccagtacacctccaagacatgcagcaactgtgggtttaccatcaccagcgccgactacgacagggtgctggagaagctgaagaagacagcaacaggctggatgaccacaattaacggcaaggagctgaaggtggagggccagattacctactacaacagatacaagagacagaacgtagtcaaggacctgtccgtcgagctggatagactgagcgaagaatctgtgaacaacgacatctcctcctggacaaagggcagaagcggagaagctctgagcctcctgaagaaaagattctcccatagacccgtgcaggagaagttcgtgtgcctgaactgcggcttcgagacacacgcagccgagcaagccgccctgaacatcgccagatcctggctgttcctgcggagccaggagtacaagaaataccagacaaacaagacaaccggcaacaccgataagagagccttcgtcgagacctggcagtccttttaccggaagaagcttaaggaggtgtggaaacctgccgtgcggtctggcggatctggcggaggctcctcaggagcccgtgaccttcgaggacgtggccgtgtacttcacccagaaccagtgggccagcctggacagcgcccagagggccctgtacagggaggtgatgctggagaactacgccaacgtggccagcctggtggtgagccccttccccaggcccgacctgatcagccagctggagaggggcgaggccccctgggaccccgacccctgggaggccgaggacctgaggggcatctgccccggcggcggatctggctccggcagcggccccaagaaaaagagaaaagtctaagctgccttctgcggggcttgccttctggccatgcccttcttctctcccttgcacctgtacctcttggtctttgaataaagcctgagtaggaaggctagcaaaaaaaaaaaaaaaaaaaaaaaaaaaaaaaaaaaaaaaaaaaaaaaaaaaaaaaaaaaaaaaaaaaaaaaaaaaaaaaa

SEQ ID NO: 15477 - RNA, 9485 nt, synthetic construct
  source 1..9485: mol_type = other RNA
aggaaataagagagaaaagaagagtaagaagaaatataagagccaccatggcccctaagaagaagcgtaaagtgagccggatggaacgcctcgtctacgaggtgcggcagaagtgcagaaacatcgaggacatctgcatctcctgcggatctctgaacgtgaccctggagcacccactgttcatcggcggcatgtgccagaactgtaaaaactgttttctggagtgtgcctatcaatacgacgatgacggctaccagagctactgcaccatctgttgcggcggaagagaggtgctgatgtgtggaaataacaactgctgccggtgcttctgcgtggaatgcgtggacctgctggtgggccccggcgccgcccaggccgctattaaggaagatccttggaactgctacatgtgcggccacaagggcacatacggcctgctgagacggagagaggactggcctagcagactgcagatgttcttcgccaataaccacgaccaggagttcgacccccctaaggtgtaccctcccgtccccgccgagaagagaaagcccatccgggtcctgagcctgttcgatggcatcgccaccggtctgctggtgctgaaggacctgggcatccaggtggataggtacattgcctccgaggtgtgcgaggactccatcaccgtgggaatggtgcgtcatcagggcaagatcatgtacgtgggcgacgtgcggagcgtgacacagaagcatatccaggagtggggccctttcgacctggtgatcggcggcagcccttgcaatgacctgagcatcgtgaacccagcccggaagggcctgtacgagggaaccggcagactgttcttcgagttttacagactgctgcacgacgcccggcctaaggaaggcgacgaccggcccttcttttggctgttcgagaatgtggtggccatgggagtcagcgacaagcgggatattagccggttcctggagagcaaccccgtgatgatcgatgccaaggaagtgagcgccgcccaccgggccagatacttctggggcaatctgcctggcatgaacagacccctggccagcaccgtgaacgacaagctggagctgcaggagtgcctggagcacggccggatcgccaagttcagcaaggtgagaaccatcaccacccgaagcaacagcatcaaacaaggcaaggaccagcactttcctgtgttcatgaacgagaaggaggacatcctgtggtgtaccgagatggagagagtgttcgggttcccagtccactacacagatgtcagcaacatgtctagactggccagacagagactgctgggaagaagctggtccgtccctgtgatcagacacctgttcgcccctctgaaggagtacttcgcctgcgtgagcagcggcaacagcaacgccaacagccggggccccagcttctctagcggcctggtgccactgtccctgagagggagccacatgggccccatggagatctacaaaaccgtgagcgcctggaagcggcagcctgtgcgcgtgctgagcctgtttcggaatatcgataaagtcctgaaaagcctgggattcctggagagcggctctggctccggcggtggcaccctgaagtacgtggaggatgtgacaaacgtggtcagacgggatgtggagaagtggggccccttcgatctggtgtacggcagcacccaacccctgggcagctcttgtgaccggtgccctggctggtacatgtttcagttccaccggatcctgcagtacgccctgccgagacaggagtcccagcggccattcttttggattttcatggacaacttgctgctgaccgaggatgaccaggaaactaccactcggttcctgcagaccgaagccgtgaccctgcaggacgtgagaggccgggactaccagaacgccatgcgggtgtggtccaacatccctggactgaaaagcaagcacgcacctctgacccctaaagaagaggagtacctgcaggcccaggtgcggagcagaagcaagctggacgcccctaaggtggatctgctggtgaagaattgcctcctgcccctgagagagtacttcaagtatttcagccagaatagtctgcccctgggaggcagcggcggcggcgccctggtgacatttgaggacgtcgccgtgcggttcacccaggaggaatgggctctgctggatccttctcagaaaatcctgtaccgggacgtgatgagagagacataccggaatctgacctccgtgggcatcaactgggaatgttgggaccttgaagcctgcttcagaagcctgggaagaaacctgagagtgcaggtggtgaagagaaagtgcgagctgaccaacagcggcccctgcgccgagggcggcccaagcagcggcgcccctcctcccagcggcggcagcccagccggctccccaacctctaccgaggagggcacctctgagtccgccacccccgagagcggccctggcacctccaccgagcccagcgagggcagcgcacccggcagccctgccggcagccccacctccacagaggagggaaccagcaccgagcccagcgaaggcagcgccccaggcaccagcaccgagcctagtgagcaggagattaaacggatcaacaagatcagaagaagacttgtgaaagacagcaacaccaagaaggccggcaagacaggccccatgaaaaccctgctggttagagtgatgacacccgatctgagagagcggctggaaaacctgagaaagaagcctgaaaatatcccccagcccatcagcaatacatctagagccaacctgaataagctgctgaccgattacaccgaaatgaagaaggcgatcctgcatgtgtactgggaagagttccagaaggaccctgtgggcctgatgagccgggtggcccagcctgccagcaagaagatcgatcagaacaagctgaaacctgagatggacgagaagggcaacctgaccaccgccggctttgcctgctctcagtgtggccagcccctgttcgtgtacaagctggagcaggtgtctgagaagggcaaggcttacaccaactacttcggacggtgcaatgtggccgagcacgaaaagctgatcctgctggcccagctgaagcccgagaaggatagcgacgaagccgtgacatatagcctgggaaagtttgggcagagggccctggatttctacagcattcatgtgaccaaggagtccacccaccccgtgaagcccctggcccagatcgccggaaacagatacgcctccggacctgtgggaaaggccctgagcgacgcatgtatgggcacaatcgcctccttcctgtctaagtaccaggacatcatcatcgaacaccagaaggtggtgaagggcaaccagaagagactggagagcctgcgggagctggccggcaaggaaaacctggaataccctagcgtgaccctgccacctcagcctcacaccaaggagggcgttgatgcctacaacgaagtgatcgcccgggtgcgaatgtgggtgaacctgaacctgtggcagaagctgaagctaagcagagatgatgccaagcctctgctgagactgaagggattcccttcctttcctctggtcgagagacaggccaacgaagtggactggtgggacatggtgtgtaacgtgaagaagctgatcaacgagaaaaaggaggatggcaaggtgttttggcagaatctggctggctacaagagacaggaagccctgagaccatacctgagcagcgaggaagatcggaagaagggaaagaaattcgctcggtaccagctgggcgacctgctgctgcacctggaaaagaagcacggcgaggactggggaaaggtgtacgacgaggcctgggagcggattgacaagaaagtggaaggcctgagcaagcacatcaagctggaagaggaacggagaagcgaggacgcccagagcaaggccgccctgaccgactggctgcgggctaaggccagcttcgtgatcgagggcctgaaggaggccgacaaggacgagttctgcagatgcgagctgaagctgcagaagtggtacggggacctgcggggaaagcccttcgccatcgaagccgagaacagcatcctggacatcagcggcttcagcaagcagtacaactgtgccttcatctggcagaaggacggcgtgaagaagctgaacctgtacctgatcatcaactacttcaagggcggcaagctgcggttcaagaagatcaaacctgaagccttcgaagccaacagattctacaccgtgatcaacaaaaagagcggcgagatcgtgcccatggaggtgaacttcaacttcgacgaccccaacctgatcatcctgcctctggcctttggcaagagacagggcagagaattcatctggaacgacctgctgtccctggaaaccggcagcctgaagctggccaacggaagagtgatcgagaagacactgtacaacagaagaacccggcaggatgagcctgccctgttcgtggccctgaccttcgagcggcgggaggtcctggactcctccaatatcaaaccaatgaacctgatcggcgtggcaagaggcgaaaacatccccgccgtgatcgccctgaccgaccccgagggctgcccactgagccggtttaaggatagcctgggaaacccaacccacatcctgagaatcggcgagagctataaggagaagcagcggaccatccaggccaagaaggaggtggagcagcggagagccggcggctacagccggaagtacgccagcaaagccaagaatctggcagacgatatggtgagaaacaccgctagagatctgctgtactacgccgtgacccaggatgccatgctgatcttcgccaacctgagccggggcttcggccggcagggcaagcggaccttcatggccgagagacagtacacacggatggaggactggctgaccgccaagctggcctacgagggcctgagcaagacctacctgtccaagacactggcccagtacacctccaagacatgcagcaactgtgggtttaccatcaccagcgccgactacgacagggtgctggagaagctgaagaagacagcaacaggctggatgaccacaattaacggcaaggagctgaaggtggagggccagattacctactacaacagatacaagagacagaacgtagtcaaggacctgtccgtcgagctggatagactgagcgaagaatctgtgaacaacgacatctcctcctggacaaagggcagaagcggagaagctctgagcctcctgaagaaaagattctcccatagacccgtgcaggagaagttcgtgtgcctgaactgcggcttcgagacacacgcagccgagcaagccgccctgaacatcgccagatcctggctgttcctgcggagccaggagtacaagaaataccagacaaacaagacaaccggcaacaccgataagagagccttcgtcgagacctggcagtccttttaccggaagaagcttaaggaggtgtggaaacctgccgtgcggtctggcggatctggcggaggctccatgcccctgggcagcgagctgttcagggacgtggccatcgtgttcagccaggaggagtggcagtggctggcccccgcccagagggacctgtacagggacgtgatgctggagacctacagcaacctggtgagcctgggcctggccatcagcaagcccgacgtgatcagcttcctggagcagggcaaggagccctggatggtggagagggtggtggccggcggcctgtgccccgtgctggagagcggcggcccaagcagcggcgcccctcctcccagcggcggcagcccagccggctccccaacctctaccgaggagggcacctctgagtccgccacccccgagagcggccctggcacctccaccgagcccagcgagggcagcgcacccggcagccctgccggcagccccacctccacagaggagggaaccagcaccgagcccagcgaaggcagcgccccaggcaccagcaccgagcctagtgagcaggagattaaacggatcaacaagatcagaagaagacttgtgaaagacagcaacaccaagaaggccggcaagacaggccccatgaaaaccctgctggttagagtgatgacacccgatctgagagagcggctggaaaacctgagaaagaagcctgaaaatatcccccagcccatcagcaatacatctagagccaacctgaataagctgctgaccgattacaccgaaatgaagaaggcgatcctgcatgtgtactgggaagagttccagaaggaccctgtgggcctgatgagccgggtggcccagcctgccagcaagaagatcgatcagaacaagctgaaacctgagatggacgagaagggcaacctgaccaccgccggctttgcctgctctcagtgtggccagcccctgttcgtgtacaagctggagcaggtgtctgagaagggcaaggcttacaccaactacttcggacggtgcaatgtggccgagcacgaaaagctgatcctgctggcccagctgaagcccgagaaggatagcgacgaagccgtgacatatagcctgggaaagtttgggcagagggccctggatttctacagcattcatgtgaccaaggagtccacccaccccgtgaagcccctggcccagatcgccggaaacagatacgcctccggacctgtgggaaaggccctgagcgacgcatgtatgggcacaatcgcctccttcctgtctaagtaccaggacatcatcatcgaacaccagaaggtggtgaagggcaaccagaagagactggagagcctgcgggagctggccggcaaggaaaacctggaataccctagcgtgaccctgccacctcagcctcacaccaaggagggcgttgatgcctacaacgaagtgatcgcccgggtgcgaatgtgggtgaacctgaacctgtggcagaagctgaagctaagcagagatgatgccaagcctctgctgagactgaagggattcccttcctttcctctggtcgagagacaggccaacgaagtggactggtgggacatggtgtgtaacgtgaagaagctgatcaacgagaaaaaggaggatggcaaggtgttttggcagaatctggctggctacaagagacaggaagccctgagaccatacctgagcagcgaggaagatcggaagaagggaaagaaattcgctcggtaccagctgggcgacctgctgctgcacctggaaaagaagcacggcgaggactggggaaaggtgtacgacgaggcctgggagcggattgacaagaaagtggaaggcctgagcaagcacatcaagctggaagaggaacggagaagcgaggacgcccagagcaaggccgccctgaccgactggctgcgggctaaggccagcttcgtgatcgagggcctgaaggaggccgacaaggacgagttctgcagatgcgagctgaagctgcagaagtggtacggggacctgcggggaaagcccttcgccatcgaagccgagaacagcatcctggacatcagcggcttcagcaagcagtacaactgtgccttcatctggcagaaggacggcgtgaagaagctgaacctgtacctgatcatcaactacttcaagggcggcaagctgcggttcaagaagatcaaacctgaagccttcgaagccaacagattctacaccgtgatcaacaaaaagagcggcgagatcgtgcccatggaggtgaacttcaacttcgacgaccccaacctgatcatcctgcctctggcctttggcaagagacagggcagagaattcatctggaacgacctgctgtccctggaaaccggcagcctgaagctggccaacggaagagtgatcgagaagacactgtacaacagaagaacccggcaggatgagcctgccctgttcgtggccctgaccttcgagcggcgggaggtcctggactcctccaatatcaaaccaatgaacctgatcggcgtggcaagaggcgaaaacatccccgccgtgatcgccctgaccgaccccgagggctgcccactgagccggtttaaggatagcctgggaaacccaacccacatcctgagaatcggcgagagctataaggagaagcagcggaccatccaggccaagaaggaggtggagcagcggagagccggcggctacagccggaagtacgccagcaaagccaagaatctggcagacgatatggtgagaaacaccgctagagatctgctgtactacgccgtgacccaggatgccatgctgatcttcgccaacctgagccggggcttcggccggcagggcaagcggaccttcatggccgagagacagtacacacggatggaggactggctgaccgccaagctggcctacgagggcctgagcaagacctacctgtccaagacactggcccagtacacctccaagacatgcagcaactgtgggtttaccatcaccagcgccgactacgacagggtgctggagaagctgaagaagacagcaacaggctggatgaccacaattaacggcaaggagctgaaggtggagggccagattacctactacaacagatacaagagacagaacgtagtcaaggacctgtccgtcgagctggatagactgagcgaagaatctgtgaacaacgacatctcctcctggacaaagggcagaagcggagaagctctgagcctcctgaagaaaagattctcccatagacccgtgcaggagaagttcgtgtgcctgaactgcggcttcgagacacacgcagccgagcaagccgccctgaacatcgccagatcctggctgttcctgcggagccaggagtacaagaaataccagacaaacaagacaaccggcaacaccgataagagagccttcgtcgagacctggcagtccttttaccggaagaagcttaaggaggtgtggaaacctgccgtgcggtctggcggatctggcggaggctcctatgcccctgggcagcgagctgttcagggacgtggccatcgtgttcagccaggaggagtggcagtggctggcccccgcccagagggacctgtacagggacgtgatgctggagacctacagcaacctggtgagcctgggcctggccatcagcaagcccgacgtgatcagcttcctggagcagggcaaggagccctggatggtggagagggtggtggccggcggcctgtgccccgtgctggagagcggatctggctccggcagcggccccaagaaaaagagaaaagtctaagctgccttctgcggggcttgccttctggccatgcccttcttctctcccttgcacctgtacctcttggtctttgaataaagcctgagtaggaaggctagcaaaaaaaaaaaaaaaaaaaaaaaaaaaaaaaaaaaaaaaaaaaaaaaaaaaaaaaaaaaaaaaaaaaaaaaaaaaaaaaa

SEQ ID NO: 15478 - RNA, 9485 nt, synthetic construct
  source 1..9485: mol_type = other RNA
aggaaataagagagaaaagaagagtaagaagaaatataagagccaccatggcccctaagaagaagcgtaaagtgagccggatggaacgcctcgtctacgaggtgcggcagaagtgcagaaacatcgaggacatctgcatctcctgcggatctctgaacgtgaccctggagcacccactgttcatcggcggcatgtgccagaactgtaaaaactgttttctggagtgtgcctatcaatacgacgatgacggctaccagagctactgcaccatctgttgcggcggaagagaggtgctgatgtgtggaaataacaactgctgccggtgcttctgcgtggaatgcgtggacctgctggtgggccccggcgccgcccaggccgctattaaggaagatccttggaactgctacatgtgcggccacaagggcacatacggcctgctgagacggagagaggactggcctagcagactgcagatgttcttcgccaataaccacgaccaggagttcgacccccctaaggtgtaccctcccgtccccgccgagaagagaaagcccatccgggtcctgagcctgttcgatggcatcgccaccggtctgctggtgctgaaggacctgggcatccaggtggataggtacattgcctccgaggtgtgcgaggactccatcaccgtgggaatggtgcgtcatcagggcaagatcatgtacgtgggcgacgtgcggagcgtgacacagaagcatatccaggagtggggccctttcgacctggtgatcggcggcagcccttgcaatgacctgagcatcgtgaacccagcccggaagggcctgtacgagggaaccggcagactgttcttcgagttttacagactgctgcacgacgcccggcctaaggaaggcgacgaccggcccttcttttggctgttcgagaatgtggtggccatgggagtcagcgacaagcgggatattagccggttcctggagagcaaccccgtgatgatcgatgccaaggaagtgagcgccgcccaccgggccagatacttctggggcaatctgcctggcatgaacagacccctggccagcaccgtgaacgacaagctggagctgcaggagtgcctggagcacggccggatcgccaagttcagcaaggtgagaaccatcaccacccgaagcaacagcatcaaacaaggcaaggaccagcactttcctgtgttcatgaacgagaaggaggacatcctgtggtgtaccgagatggagagagtgttcgggttcccagtccactacacagatgtcagcaacatgtctagactggccagacagagactgctgggaagaagctggtccgtccctgtgatcagacacctgttcgcccctctgaaggagtacttcgcctgcgtgagcagcggcaacagcaacgccaacagccggggccccagcttctctagcggcctggtgccactgtccctgagagggagccacatgggccccatggagatctacaaaaccgtgagcgcctggaagcggcagcctgtgcgcgtgctgagcctgtttcggaatatcgataaagtcctgaaaagcctgggattcctggagagcggctctggctccggcggtggcaccctgaagtacgtggaggatgtgacaaacgtggtcagacgggatgtggagaagtggggccccttcgatctggtgtacggcagcacccaacccctgggcagctcttgtgaccggtgccctggctggtacatgtttcagttccaccggatcctgcagtacgccctgccgagacaggagtcccagcggccattcttttggattttcatggacaacttgctgctgaccgaggatgaccaggaaactaccactcggttcctgcagaccgaagccgtgaccctgcaggacgtgagaggccgggactaccagaacgccatgcgggtgtggtccaacatccctggactgaaaagcaagcacgcacctctgacccctaaagaagaggagtacctgcaggcccaggtgcggagcagaagcaagctggacgcccctaaggtggatctgctggtgaagaattgcctcctgcccctgagagagtacttcaagtatttcagccagaatagtctgcccctgggaggcagcggcggcggcgccctggtgacatttgaggacgtcgccgtgcggttcacccaggaggaatgggctctgctggatccttctcagaaaatcctgtaccgggacgtgatgagagagacataccggaatctgacctccgtgggcatcaactgggaatgttgggaccttgaagcctgcttcagaagcctgggaagaaacctgagagtgcaggtggtgaagagaaagtgcgagctgaccaacagcggcccctgcgccgagggcggcccaagcagcggcgcccctcctcccagcggcggcagcccagccggctccccaacctctaccgaggagggcacctctgagtccgccacccccgagagcggccctggcacctccaccgagcccagcgagggcagcgcacccggcagccctgccggcagccccacctccacagaggagggaaccagcaccgagcccagcgaaggcagcgccccaggcaccagcaccgagcctagtgagcaggagattaaacggatcaacaagatcagaagaagacttgtgaaagacagcaacaccaagaaggccggcaagacaggccccatgaaaaccctgctggttagagtgatgacacccgatctgagagagcggctggaaaacctgagaaagaagcctgaaaatatcccccagcccatcagcaatacatctagagccaacctgaataagctgctgaccgattacaccgaaatgaagaaggcgatcctgcatgtgtactgggaagagttccagaaggaccctgtgggcctgatgagccgggtggcccagcctgccagcaagaagatcgatcagaacaagctgaaacctgagatggacgagaagggcaacctgaccaccgccggctttgcctgctctcagtgtggccagcccctgttcgtgtacaagctggagcaggtgtctgagaagggcaaggcttacaccaactacttcggacggtgcaatgtggccgagcacgaaaagctgatcctgctggcccagctgaagcccgagaaggatagcgacgaagccgtgacatatagcctgggaaagtttgggcagagggccctggatttctacagcattcatgtgaccaaggagtccacccaccccgtgaagcccctggcccagatcgccggaaacagatacgcctccggacctgtgggaaaggccctgagcgacgcatgtatgggcacaatcgcctccttcctgtctaagtaccaggacatcatcatcgaacaccagaaggtggtgaagggcaaccagaagagactggagagcctgcgggagctggccggcaaggaaaacctggaataccctagcgtgaccctgccacctcagcctcacaccaaggagggcgttgatgcctacaacgaagtgatcgcccgggtgcgaatgtgggtgaacctgaacctgtggcagaagctgaagctaagcagagatgatgccaagcctctgctgagactgaagggattcccttcctttcctctggtcgagagacaggccaacgaagtggactggtgggacatggtgtgtaacgtgaagaagctgatcaacgagaaaaaggaggatggcaaggtgttttggcagaatctggctggctacaagagacaggaagccctgagaccatacctgagcagcgaggaagatcggaagaagggaaagaaattcgctcggtaccagctgggcgacctgctgctgcacctggaaaagaagcacggcgaggactggggaaaggtgtacgacgaggcctgggagcggattgacaagaaagtggaaggcctgagcaagcacatcaagctggaagaggaacggagaagcgaggacgcccagagcaaggccgccctgaccgactggctgcgggctaaggccagcttcgtgatcgagggcctgaaggaggccgacaaggacgagttctgcagatgcgagctgaagctgcagaagtggtacggggacctgcggggaaagcccttcgccatcgaagccgagaacagcatcctggacatcagcggcttcagcaagcagtacaactgtgccttcatctggcagaaggacggcgtgaagaagctgaacctgtacctgatcatcaactacttcaagggcggcaagctgcggttcaagaagatcaaacctgaagccttcgaagccaacagattctacaccgtgatcaacaaaaagagcggcgagatcgtgcccatggaggtgaacttcaacttcgacgaccccaacctgatcatcctgcctctggcctttggcaagagacagggcagagaattcatctggaacgacctgctgtccctggaaaccggcagcctgaagctggccaacggaagagtgatcgagaagacactgtacaacagaagaacccggcaggatgagcctgccctgttcgtggccctgaccttcgagcggcgggaggtcctggactcctccaatatcaaaccaatgaacctgatcggcgtggcaagaggcgaaaacatccccgccgtgatcgccctgaccgaccccgagggctgcccactgagccggtttaaggatagcctgggaaacccaacccacatcctgagaatcggcgagagctataaggagaagcagcggaccatccaggccaagaaggaggtggagcagcggagagccggcggctacagccggaagtacgccagcaaagccaagaatctggcagacgatatggtgagaaacaccgctagagatctgctgtactacgccgtgacccaggatgccatgctgatcttcgccaacctgagccggggcttcggccggcagggcaagcggaccttcatggccgagagacagtacacacggatggaggactggctgaccgccaagctggcctacgagggcctgagcaagacctacctgtccaagacactggcccagtacacctccaagacatgcagcaactgtgggtttaccatcaccagcgccgactacgacagggtgctggagaagctgaagaagacagcaacaggctggatgaccacaattaacggcaaggagctgaaggtggagggccagattacctactacaacagatacaagagacagaacgtagtcaaggacctgtccgtcgagctggatagactgagcgaagaatctgtgaacaacgacatctcctcctggacaaagggcagaagcggagaagctctgagcctcctgaagaaaagattctcccatagacccgtgcaggagaagttcgtgtgcctgaactgcggcttcgagacacacgcagccgagcaagccgccctgaacatcgccagatcctggctgttcctgcggagccaggagtacaagaaataccagacaaacaagacaaccggcaacaccgataagagagccttcgtcgagacctggcagtccttttaccggaagaagcttaaggaggtgtggaaacctgccgtgcggtctggcggatctggcggaggctccctggcccccgaggaccacggcagcagctacgagggcagcgtgagcttcagggacgtggccatcgacttcagcagggaggagtggaggcacctggacctgagccagaggaacctgtacagggacgtgatgctggagacctacagccacctgctgagcgtgggctaccaggtgcccgaggccgaggtggtgatgctggagcagggcaaggagccctgggccctgcagggcgagaggcccaggcacggcggcccaagcagcggcgcccctcctcccagcggcggcagcccagccggctccccaacctctaccgaggagggcacctctgagtccgccacccccgagagcggccctggcacctccaccgagcccagcgagggcagcgcacccggcagccctgccggcagccccacctccacagaggagggaaccagcaccgagcccagcgaaggcagcgccccaggcaccagcaccgagcctagtgagcaggagattaaacggatcaacaagatcagaagaagacttgtgaaagacagcaacaccaagaaggccggcaagacaggccccatgaaaaccctgctggttagagtgatgacacccgatctgagagagcggctggaaaacctgagaaagaagcctgaaaatatcccccagcccatcagcaatacatctagagccaacctgaataagctgctgaccgattacaccgaaatgaagaaggcgatcctgcatgtgtactgggaagagttccagaaggaccctgtgggcctgatgagccgggtggcccagcctgccagcaagaagatcgatcagaacaagctgaaacctgagatggacgagaagggcaacctgaccaccgccggctttgcctgctctcagtgtggccagcccctgttcgtgtacaagctggagcaggtgtctgagaagggcaaggcttacaccaactacttcggacggtgcaatgtggccgagcacgaaaagctgatcctgctggcccagctgaagcccgagaaggatagcgacgaagccgtgacatatagcctgggaaagtttgggcagagggccctggatttctacagcattcatgtgaccaaggagtccacccaccccgtgaagcccctggcccagatcgccggaaacagatacgcctccggacctgtgggaaaggccctgagcgacgcatgtatgggcacaatcgcctccttcctgtctaagtaccaggacatcatcatcgaacaccagaaggtggtgaagggcaaccagaagagactggagagcctgcgggagctggccggcaaggaaaacctggaataccctagcgtgaccctgccacctcagcctcacaccaaggagggcgttgatgcctacaacgaagtgatcgcccgggtgcgaatgtgggtgaacctgaacctgtggcagaagctgaagctaagcagagatgatgccaagcctctgctgagactgaagggattcccttcctttcctctggtcgagagacaggccaacgaagtggactggtgggacatggtgtgtaacgtgaagaagctgatcaacgagaaaaaggaggatggcaaggtgttttggcagaatctggctggctacaagagacaggaagccctgagaccatacctgagcagcgaggaagatcggaagaagggaaagaaattcgctcggtaccagctgggcgacctgctgctgcacctggaaaagaagcacggcgaggactggggaaaggtgtacgacgaggcctgggagcggattgacaagaaagtggaaggcctgagcaagcacatcaagctggaagaggaacggagaagcgaggacgcccagagcaaggccgccctgaccgactggctgcgggctaaggccagcttcgtgatcgagggcctgaaggaggccgacaaggacgagttctgcagatgcgagctgaagctgcagaagtggtacggggacctgcggggaaagcccttcgccatcgaagccgagaacagcatcctggacatcagcggcttcagcaagcagtacaactgtgccttcatctggcagaaggacggcgtgaagaagctgaacctgtacctgatcatcaactacttcaagggcggcaagctgcggttcaagaagatcaaacctgaagccttcgaagccaacagattctacaccgtgatcaacaaaaagagcggcgagatcgtgcccatggaggtgaacttcaacttcgacgaccccaacctgatcatcctgcctctggcctttggcaagagacagggcagagaattcatctggaacgacctgctgtccctggaaaccggcagcctgaagctggccaacggaagagtgatcgagaagacactgtacaacagaagaacccggcaggatgagcctgccctgttcgtggccctgaccttcgagcggcgggaggtcctggactcctccaatatcaaaccaatgaacctgatcggcgtggcaagaggcgaaaacatccccgccgtgatcgccctgaccgaccccgagggctgcccactgagccggtttaaggatagcctgggaaacccaacccacatcctgagaatcggcgagagctataaggagaagcagcggaccatccaggccaagaaggaggtggagcagcggagagccggcggctacagccggaagtacgccagcaaagccaagaatctggcagacgatatggtgagaaacaccgctagagatctgctgtactacgccgtgacccaggatgccatgctgatcttcgccaacctgagccggggcttcggccggcagggcaagcggaccttcatggccgagagacagtacacacggatggaggactggctgaccgccaagctggcctacgagggcctgagcaagacctacctgtccaagacactggcccagtacacctccaagacatgcagcaactgtgggtttaccatcaccagcgccgactacgacagggtgctggagaagctgaagaagacagcaacaggctggatgaccacaattaacggcaaggagctgaaggtggagggccagattacctactacaacagatacaagagacagaacgtagtcaaggacctgtccgtcgagctggatagactgagcgaagaatctgtgaacaacgacatctcctcctggacaaagggcagaagcggagaagctctgagcctcctgaagaaaagattctcccatagacccgtgcaggagaagttcgtgtgcctgaactgcggcttcgagacacacgcagccgagcaagccgccctgaacatcgccagatcctggctgttcctgcggagccaggagtacaagaaataccagacaaacaagacaaccggcaacaccgataagagagccttcgtcgagacctggcagtccttttaccggaagaagcttaaggaggtgtggaaacctgccgtgcggtctggcggatctggcggaggctcctctggcccccgaggaccacggcagcagctacgagggcagcgtgagcttcagggacgtggccatcgacttcagcagggaggagtggaggcacctggacctgagccagaggaacctgtacagggacgtgatgctggagacctacagccacctgctgagcgtgggctaccaggtgcccgaggccgaggtggtgatgctggagcagggcaaggagccctgggccctgcagggcgagaggcccaggcacggatctggctccggcagcggccccaagaaaaagagaaaagtctaagctgccttctgcggggcttgccttctggccatgcccttcttctctcccttgcacctgtacctcttggtctttgaataaagcctgagtaggaaggctagcaaaaaaaaaaaaaaaaaaaaaaaaaaaaaaaaaaaaaaaaaaaaaaaaaaaaaaaaaaaaaaaaaaaaaaaaaaaaaaaa

SEQ ID NO: 15479 - RNA, 9485 nt, synthetic construct
  source 1..9485: mol_type = other RNA
aggaaataagagagaaaagaagagtaagaagaaatataagagccaccatggcccctaagaagaagcgtaaagtgagccggatggaacgcctcgtctacgaggtgcggcagaagtgcagaaacatcgaggacatctgcatctcctgcggatctctgaacgtgaccctggagcacccactgttcatcggcggcatgtgccagaactgtaaaaactgttttctggagtgtgcctatcaatacgacgatgacggctaccagagctactgcaccatctgttgcggcggaagagaggtgctgatgtgtggaaataacaactgctgccggtgcttctgcgtggaatgcgtggacctgctggtgggccccggcgccgcccaggccgctattaaggaagatccttggaactgctacatgtgcggccacaagggcacatacggcctgctgagacggagagaggactggcctagcagactgcagatgttcttcgccaataaccacgaccaggagttcgacccccctaaggtgtaccctcccgtccccgccgagaagagaaagcccatccgggtcctgagcctgttcgatggcatcgccaccggtctgctggtgctgaaggacctgggcatccaggtggataggtacattgcctccgaggtgtgcgaggactccatcaccgtgggaatggtgcgtcatcagggcaagatcatgtacgtgggcgacgtgcggagcgtgacacagaagcatatccaggagtggggccctttcgacctggtgatcggcggcagcccttgcaatgacctgagcatcgtgaacccagcccggaagggcctgtacgagggaaccggcagactgttcttcgagttttacagactgctgcacgacgcccggcctaaggaaggcgacgaccggcccttcttttggctgttcgagaatgtggtggccatgggagtcagcgacaagcgggatattagccggttcctggagagcaaccccgtgatgatcgatgccaaggaagtgagcgccgcccaccgggccagatacttctggggcaatctgcctggcatgaacagacccctggccagcaccgtgaacgacaagctggagctgcaggagtgcctggagcacggccggatcgccaagttcagcaaggtgagaaccatcaccacccgaagcaacagcatcaaacaaggcaaggaccagcactttcctgtgttcatgaacgagaaggaggacatcctgtggtgtaccgagatggagagagtgttcgggttcccagtccactacacagatgtcagcaacatgtctagactggccagacagagactgctgggaagaagctggtccgtccctgtgatcagacacctgttcgcccctctgaaggagtacttcgcctgcgtgagcagcggcaacagcaacgccaacagccggggccccagcttctctagcggcctggtgccactgtccctgagagggagccacatgggccccatggagatctacaaaaccgtgagcgcctggaagcggcagcctgtgcgcgtgctgagcctgtttcggaatatcgataaagtcctgaaaagcctgggattcctggagagcggctctggctccggcggtggcaccctgaagtacgtggaggatgtgacaaacgtggtcagacgggatgtggagaagtggggccccttcgatctggtgtacggcagcacccaacccctgggcagctcttgtgaccggtgccctggctggtacatgtttcagttccaccggatcctgcagtacgccctgccgagacaggagtcccagcggccattcttttggattttcatggacaacttgctgctgaccgaggatgaccaggaaactaccactcggttcctgcagaccgaagccgtgaccctgcaggacgtgagaggccgggactaccagaacgccatgcgggtgtggtccaacatccctggactgaaaagcaagcacgcacctctgacccctaaagaagaggagtacctgcaggcccaggtgcggagcagaagcaagctggacgcccctaaggtggatctgctggtgaagaattgcctcctgcccctgagagagtacttcaagtatttcagccagaatagtctgcccctgggaggcagcggcggcggcgccctggtgacatttgaggacgtcgccgtgcggttcacccaggaggaatgggctctgctggatccttctcagaaaatcctgtaccgggacgtgatgagagagacataccggaatctgacctccgtgggcatcaactgggaatgttgggaccttgaagcctgcttcagaagcctgggaagaaacctgagagtgcaggtggtgaagagaaagtgcgagctgaccaacagcggcccctgcgccgagggcggcccaagcagcggcgcccctcctcccagcggcggcagcccagccggctccccaacctctaccgaggagggcacctctgagtccgccacccccgagagcggccctggcacctccaccgagcccagcgagggcagcgcacccggcagccctgccggcagccccacctccacagaggagggaaccagcaccgagcccagcgaaggcagcgccccaggcaccagcaccgagcctagtgagcaggagattaaacggatcaacaagatcagaagaagacttgtgaaagacagcaacaccaagaaggccggcaagacaggccccatgaaaaccctgctggttagagtgatgacacccgatctgagagagcggctggaaaacctgagaaagaagcctgaaaatatcccccagcccatcagcaatacatctagagccaacctgaataagctgctgaccgattacaccgaaatgaagaaggcgatcctgcatgtgtactgggaagagttccagaaggaccctgtgggcctgatgagccgggtggcccagcctgccagcaagaagatcgatcagaacaagctgaaacctgagatggacgagaagggcaacctgaccaccgccggctttgcctgctctcagtgtggccagcccctgttcgtgtacaagctggagcaggtgtctgagaagggcaaggcttacaccaactacttcggacggtgcaatgtggccgagcacgaaaagctgatcctgctggcccagctgaagcccgagaaggatagcgacgaagccgtgacatatagcctgggaaagtttgggcagagggccctggatttctacagcattcatgtgaccaaggagtccacccaccccgtgaagcccctggcccagatcgccggaaacagatacgcctccggacctgtgggaaaggccctgagcgacgcatgtatgggcacaatcgcctccttcctgtctaagtaccaggacatcatcatcgaacaccagaaggtggtgaagggcaaccagaagagactggagagcctgcgggagctggccggcaaggaaaacctggaataccctagcgtgaccctgccacctcagcctcacaccaaggagggcgttgatgcctacaacgaagtgatcgcccgggtgcgaatgtgggtgaacctgaacctgtggcagaagctgaagctaagcagagatgatgccaagcctctgctgagactgaagggattcccttcctttcctctggtcgagagacaggccaacgaagtggactggtgggacatggtgtgtaacgtgaagaagctgatcaacgagaaaaaggaggatggcaaggtgttttggcagaatctggctggctacaagagacaggaagccctgagaccatacctgagcagcgaggaagatcggaagaagggaaagaaattcgctcggtaccagctgggcgacctgctgctgcacctggaaaagaagcacggcgaggactggggaaaggtgtacgacgaggcctgggagcggattgacaagaaagtggaaggcctgagcaagcacatcaagctggaagaggaacggagaagcgaggacgcccagagcaaggccgccctgaccgactggctgcgggctaaggccagcttcgtgatcgagggcctgaaggaggccgacaaggacgagttctgcagatgcgagctgaagctgcagaagtggtacggggacctgcggggaaagcccttcgccatcgaagccgagaacagcatcctggacatcagcggcttcagcaagcagtacaactgtgccttcatctggcagaaggacggcgtgaagaagctgaacctgtacctgatcatcaactacttcaagggcggcaagctgcggttcaagaagatcaaacctgaagccttcgaagccaacagattctacaccgtgatcaacaaaaagagcggcgagatcgtgcccatggaggtgaacttcaacttcgacgaccccaacctgatcatcctgcctctggcctttggcaagagacagggcagagaattcatctggaacgacctgctgtccctggaaaccggcagcctgaagctggccaacggaagagtgatcgagaagacactgtacaacagaagaacccggcaggatgagcctgccctgttcgtggccctgaccttcgagcggcgggaggtcctggactcctccaatatcaaaccaatgaacctgatcggcgtggcaagaggcgaaaacatccccgccgtgatcgccctgaccgaccccgagggctgcccactgagccggtttaaggatagcctgggaaacccaacccacatcctgagaatcggcgagagctataaggagaagcagcggaccatccaggccaagaaggaggtggagcagcggagagccggcggctacagccggaagtacgccagcaaagccaagaatctggcagacgatatggtgagaaacaccgctagagatctgctgtactacgccgtgacccaggatgccatgctgatcttcgccaacctgagccggggcttcggccggcagggcaagcggaccttcatggccgagagacagtacacacggatggaggactggctgaccgccaagctggcctacgagggcctgagcaagacctacctgtccaagacactggcccagtacacctccaagacatgcagcaactgtgggtttaccatcaccagcgccgactacgacagggtgctggagaagctgaagaagacagcaacaggctggatgaccacaattaacggcaaggagctgaaggtggagggccagattacctactacaacagatacaagagacagaacgtagtcaaggacctgtccgtcgagctggatagactgagcgaagaatctgtgaacaacgacatctcctcctggacaaagggcagaagcggagaagctctgagcctcctgaagaaaagattctcccatagacccgtgcaggagaagttcgtgtgcctgaactgcggcttcgagacacacgcagccgagcaagccgccctgaacatcgccagatcctggctgttcctgcggagccaggagtacaagaaataccagacaaacaagacaaccggcaacaccgataagagagccttcgtcgagacctggcagtccttttaccggaagaagcttaaggaggtgtggaaacctgccgtgcggtctggcggatctggcggaggctccgacgaggccctgatggccttcaaggacgtggccgtggccttcacccagaaggagtggaagctgctgagccccgcccagaggaccctgtacagggacgtgatgctggagaactacagccacatggtgagcctgggcatcgccttccccaagcccaagctgatcacccagctggagcagggcgaggagccctggagggaggagagcgagagcctgctggacctgtgccccgccgagcccaggaccggcggcccaagcagcggcgcccctcctcccagcggcggcagcccagccggctccccaacctctaccgaggagggcacctctgagtccgccacccccgagagcggccctggcacctccaccgagcccagcgagggcagcgcacccggcagccctgccggcagccccacctccacagaggagggaaccagcaccgagcccagcgaaggcagcgccccaggcaccagcaccgagcctagtgagcaggagattaaacggatcaacaagatcagaagaagacttgtgaaagacagcaacaccaagaaggccggcaagacaggccccatgaaaaccctgctggttagagtgatgacacccgatctgagagagcggctggaaaacctgagaaagaagcctgaaaatatcccccagcccatcagcaatacatctagagccaacctgaataagctgctgaccgattacaccgaaatgaagaaggcgatcctgcatgtgtactgggaagagttccagaaggaccctgtgggcctgatgagccgggtggcccagcctgccagcaagaagatcgatcagaacaagctgaaacctgagatggacgagaagggcaacctgaccaccgccggctttgcctgctctcagtgtggccagcccctgttcgtgtacaagctggagcaggtgtctgagaagggcaaggcttacaccaactacttcggacggtgcaatgtggccgagcacgaaaagctgatcctgctggcccagctgaagcccgagaaggatagcgacgaagccgtgacatatagcctgggaaagtttgggcagagggccctggatttctacagcattcatgtgaccaaggagtccacccaccccgtgaagcccctggcccagatcgccggaaacagatacgcctccggacctgtgggaaaggccctgagcgacgcatgtatgggcacaatcgcctccttcctgtctaagtaccaggacatcatcatcgaacaccagaaggtggtgaagggcaaccagaagagactggagagcctgcgggagctggccggcaaggaaaacctggaataccctagcgtgaccctgccacctcagcctcacaccaaggagggcgttgatgcctacaacgaagtgatcgcccgggtgcgaatgtgggtgaacctgaacctgtggcagaagctgaagctaagcagagatgatgccaagcctctgctgagactgaagggattcccttcctttcctctggtcgagagacaggccaacgaagtggactggtgggacatggtgtgtaacgtgaagaagctgatcaacgagaaaaaggaggatggcaaggtgttttggcagaatctggctggctacaagagacaggaagccctgagaccatacctgagcagcgaggaagatcggaagaagggaaagaaattcgctcggtaccagctgggcgacctgctgctgcacctggaaaagaagcacggcgaggactggggaaaggtgtacgacgaggcctgggagcggattgacaagaaagtggaaggcctgagcaagcacatcaagctggaagaggaacggagaagcgaggacgcccagagcaaggccgccctgaccgactggctgcgggctaaggccagcttcgtgatcgagggcctgaaggaggccgacaaggacgagttctgcagatgcgagctgaagctgcagaagtggtacggggacctgcggggaaagcccttcgccatcgaagccgagaacagcatcctggacatcagcggcttcagcaagcagtacaactgtgccttcatctggcagaaggacggcgtgaagaagctgaacctgtacctgatcatcaactacttcaagggcggcaagctgcggttcaagaagatcaaacctgaagccttcgaagccaacagattctacaccgtgatcaacaaaaagagcggcgagatcgtgcccatggaggtgaacttcaacttcgacgaccccaacctgatcatcctgcctctggcctttggcaagagacagggcagagaattcatctggaacgacctgctgtccctggaaaccggcagcctgaagctggccaacggaagagtgatcgagaagacactgtacaacagaagaacccggcaggatgagcctgccctgttcgtggccctgaccttcgagcggcgggaggtcctggactcctccaatatcaaaccaatgaacctgatcggcgtggcaagaggcgaaaacatccccgccgtgatcgccctgaccgaccccgagggctgcccactgagccggtttaaggatagcctgggaaacccaacccacatcctgagaatcggcgagagctataaggagaagcagcggaccatccaggccaagaaggaggtggagcagcggagagccggcggctacagccggaagtacgccagcaaagccaagaatctggcagacgatatggtgagaaacaccgctagagatctgctgtactacgccgtgacccaggatgccatgctgatcttcgccaacctgagccggggcttcggccggcagggcaagcggaccttcatggccgagagacagtacacacggatggaggactggctgaccgccaagctggcctacgagggcctgagcaagacctacctgtccaagacactggcccagtacacctccaagacatgcagcaactgtgggtttaccatcaccagcgccgactacgacagggtgctggagaagctgaagaagacagcaacaggctggatgaccacaattaacggcaaggagctgaaggtggagggccagattacctactacaacagatacaagagacagaacgtagtcaaggacctgtccgtcgagctggatagactgagcgaagaatctgtgaacaacgacatctcctcctggacaaagggcagaagcggagaagctctgagcctcctgaagaaaagattctcccatagacccgtgcaggagaagttcgtgtgcctgaactgcggcttcgagacacacgcagccgagcaagccgccctgaacatcgccagatcctggctgttcctgcggagccaggagtacaagaaataccagacaaacaagacaaccggcaacaccgataagagagccttcgtcgagacctggcagtccttttaccggaagaagcttaaggaggtgtggaaacctgccgtgcggtctggcggatctggcggaggctcctgacgaggccctgatggccttcaaggacgtggccgtggccttcacccagaaggagtggaagctgctgagccccgcccagaggaccctgtacagggacgtgatgctggagaactacagccacatggtgagcctgggcatcgccttccccaagcccaagctgatcacccagctggagcagggcgaggagccctggagggaggagagcgagagcctgctggacctgtgccccgccgagcccaggaccggatctggctccggcagcggccccaagaaaaagagaaaagtctaagctgccttctgcggggcttgccttctggccatgcccttcttctctcccttgcacctgtacctcttggtctttgaataaagcctgagtaggaaggctagcaaaaaaaaaaaaaaaaaaaaaaaaaaaaaaaaaaaaaaaaaaaaaaaaaaaaaaaaaaaaaaaaaaaaaaaaaaaaaaaa

SEQ ID NO: 15480 - RNA, 9485 nt, synthetic construct
  source 1..9485: mol_type = other RNA
aggaaataagagagaaaagaagagtaagaagaaatataagagccaccatggcccctaagaagaagcgtaaagtgagccggatggaacgcctcgtctacgaggtgcggcagaagtgcagaaacatcgaggacatctgcatctcctgcggatctctgaacgtgaccctggagcacccactgttcatcggcggcatgtgccagaactgtaaaaactgttttctggagtgtgcctatcaatacgacgatgacggctaccagagctactgcaccatctgttgcggcggaagagaggtgctgatgtgtggaaataacaactgctgccggtgcttctgcgtggaatgcgtggacctgctggtgggccccggcgccgcccaggccgctattaaggaagatccttggaactgctacatgtgcggccacaagggcacatacggcctgctgagacggagagaggactggcctagcagactgcagatgttcttcgccaataaccacgaccaggagttcgacccccctaaggtgtaccctcccgtccccgccgagaagagaaagcccatccgggtcctgagcctgttcgatggcatcgccaccggtctgctggtgctgaaggacctgggcatccaggtggataggtacattgcctccgaggtgtgcgaggactccatcaccgtgggaatggtgcgtcatcagggcaagatcatgtacgtgggcgacgtgcggagcgtgacacagaagcatatccaggagtggggccctttcgacctggtgatcggcggcagcccttgcaatgacctgagcatcgtgaacccagcccggaagggcctgtacgagggaaccggcagactgttcttcgagttttacagactgctgcacgacgcccggcctaaggaaggcgacgaccggcccttcttttggctgttcgagaatgtggtggccatgggagtcagcgacaagcgggatattagccggttcctggagagcaaccccgtgatgatcgatgccaaggaagtgagcgccgcccaccgggccagatacttctggggcaatctgcctggcatgaacagacccctggccagcaccgtgaacgacaagctggagctgcaggagtgcctggagcacggccggatcgccaagttcagcaaggtgagaaccatcaccacccgaagcaacagcatcaaacaaggcaaggaccagcactttcctgtgttcatgaacgagaaggaggacatcctgtggtgtaccgagatggagagagtgttcgggttcccagtccactacacagatgtcagcaacatgtctagactggccagacagagactgctgggaagaagctggtccgtccctgtgatcagacacctgttcgcccctctgaaggagtacttcgcctgcgtgagcagcggcaacagcaacgccaacagccggggccccagcttctctagcggcctggtgccactgtccctgagagggagccacatgggccccatggagatctacaaaaccgtgagcgcctggaagcggcagcctgtgcgcgtgctgagcctgtttcggaatatcgataaagtcctgaaaagcctgggattcctggagagcggctctggctccggcggtggcaccctgaagtacgtggaggatgtgacaaacgtggtcagacgggatgtggagaagtggggccccttcgatctggtgtacggcagcacccaacccctgggcagctcttgtgaccggtgccctggctggtacatgtttcagttccaccggatcctgcagtacgccctgccgagacaggagtcccagcggccattcttttggattttcatggacaacttgctgctgaccgaggatgaccaggaaactaccactcggttcctgcagaccgaagccgtgaccctgcaggacgtgagaggccgggactaccagaacgccatgcgggtgtggtccaacatccctggactgaaaagcaagcacgcacctctgacccctaaagaagaggagtacctgcaggcccaggtgcggagcagaagcaagctggacgcccctaaggtggatctgctggtgaagaattgcctcctgcccctgagagagtacttcaagtatttcagccagaatagtctgcccctgggaggcagcggcggcggcgccctggtgacatttgaggacgtcgccgtgcggttcacccaggaggaatgggctctgctggatccttctcagaaaatcctgtaccgggacgtgatgagagagacataccggaatctgacctccgtgggcatcaactgggaatgttgggaccttgaagcctgcttcagaagcctgggaagaaacctgagagtgcaggtggtgaagagaaagtgcgagctgaccaacagcggcccctgcgccgagggcggcccaagcagcggcgcccctcctcccagcggcggcagcccagccggctccccaacctctaccgaggagggcacctctgagtccgccacccccgagagcggccctggcacctccaccgagcccagcgagggcagcgcacccggcagccctgccggcagccccacctccacagaggagggaaccagcaccgagcccagcgaaggcagcgccccaggcaccagcaccgagcctagtgagcaggagattaaacggatcaacaagatcagaagaagacttgtgaaagacagcaacaccaagaaggccggcaagacaggccccatgaaaaccctgctggttagagtgatgacacccgatctgagagagcggctggaaaacctgagaaagaagcctgaaaatatcccccagcccatcagcaatacatctagagccaacctgaataagctgctgaccgattacaccgaaatgaagaaggcgatcctgcatgtgtactgggaagagttccagaaggaccctgtgggcctgatgagccgggtggcccagcctgccagcaagaagatcgatcagaacaagctgaaacctgagatggacgagaagggcaacctgaccaccgccggctttgcctgctctcagtgtggccagcccctgttcgtgtacaagctggagcaggtgtctgagaagggcaaggcttacaccaactacttcggacggtgcaatgtggccgagcacgaaaagctgatcctgctggcccagctgaagcccgagaaggatagcgacgaagccgtgacatatagcctgggaaagtttgggcagagggccctggatttctacagcattcatgtgaccaaggagtccacccaccccgtgaagcccctggcccagatcgccggaaacagatacgcctccggacctgtgggaaaggccctgagcgacgcatgtatgggcacaatcgcctccttcctgtctaagtaccaggacatcatcatcgaacaccagaaggtggtgaagggcaaccagaagagactggagagcctgcgggagctggccggcaaggaaaacctggaataccctagcgtgaccctgccacctcagcctcacaccaaggagggcgttgatgcctacaacgaagtgatcgcccgggtgcgaatgtgggtgaacctgaacctgtggcagaagctgaagctaagcagagatgatgccaagcctctgctgagactgaagggattcccttcctttcctctggtcgagagacaggccaacgaagtggactggtgggacatggtgtgtaacgtgaagaagctgatcaacgagaaaaaggaggatggcaaggtgttttggcagaatctggctggctacaagagacaggaagccctgagaccatacctgagcagcgaggaagatcggaagaagggaaagaaattcgctcggtaccagctgggcgacctgctgctgcacctggaaaagaagcacggcgaggactggggaaaggtgtacgacgaggcctgggagcggattgacaagaaagtggaaggcctgagcaagcacatcaagctggaagaggaacggagaagcgaggacgcccagagcaaggccgccctgaccgactggctgcgggctaaggccagcttcgtgatcgagggcctgaaggaggccgacaaggacgagttctgcagatgcgagctgaagctgcagaagtggtacggggacctgcggggaaagcccttcgccatcgaagccgagaacagcatcctggacatcagcggcttcagcaagcagtacaactgtgccttcatctggcagaaggacggcgtgaagaagctgaacctgtacctgatcatcaactacttcaagggcggcaagctgcggttcaagaagatcaaacctgaagccttcgaagccaacagattctacaccgtgatcaacaaaaagagcggcgagatcgtgcccatggaggtgaacttcaacttcgacgaccccaacctgatcatcctgcctctggcctttggcaagagacagggcagagaattcatctggaacgacctgctgtccctggaaaccggcagcctgaagctggccaacggaagagtgatcgagaagacactgtacaacagaagaacccggcaggatgagcctgccctgttcgtggccctgaccttcgagcggcgggaggtcctggactcctccaatatcaaaccaatgaacctgatcggcgtggcaagaggcgaaaacatccccgccgtgatcgccctgaccgaccccgagggctgcccactgagccggtttaaggatagcctgggaaacccaacccacatcctgagaatcggcgagagctataaggagaagcagcggaccatccaggccaagaaggaggtggagcagcggagagccggcggctacagccggaagtacgccagcaaagccaagaatctggcagacgatatggtgagaaacaccgctagagatctgctgtactacgccgtgacccaggatgccatgctgatcttcgccaacctgagccggggcttcggccggcagggcaagcggaccttcatggccgagagacagtacacacggatggaggactggctgaccgccaagctggcctacgagggcctgagcaagacctacctgtccaagacactggcccagtacacctccaagacatgcagcaactgtgggtttaccatcaccagcgccgactacgacagggtgctggagaagctgaagaagacagcaacaggctggatgaccacaattaacggcaaggagctgaaggtggagggccagattacctactacaacagatacaagagacagaacgtagtcaaggacctgtccgtcgagctggatagactgagcgaagaatctgtgaacaacgacatctcctcctggacaaagggcagaagcggagaagctctgagcctcctgaagaaaagattctcccatagacccgtgcaggagaagttcgtgtgcctgaactgcggcttcgagacacacgcagccgagcaagccgccctgaacatcgccagatcctggctgttcctgcggagccaggagtacaagaaataccagacaaacaagacaaccggcaacaccgataagagagccttcgtcgagacctggcagtccttttaccggaagaagcttaaggaggtgtggaaacctgccgtgcggtctggcggatctggcggaggctccgcccaggagagcgtgatgttcagcgacgtgagcatcgacttcagccaggaggagtgggagtgcctgaacgacgaccagagggccctgtacagggacgtgatgctggagaactacagcaacctggtgagcatgggccacagcatcagcaagcccgacgtgatcagcttcctggagcagggcaaggagccctggctggtggacagggagctgaccaggggccagtggcccgtgctggagagcaggggcggcccaagcagcggcgcccctcctcccagcggcggcagcccagccggctccccaacctctaccgaggagggcacctctgagtccgccacccccgagagcggccctggcacctccaccgagcccagcgagggcagcgcacccggcagccctgccggcagccccacctccacagaggagggaaccagcaccgagcccagcgaaggcagcgccccaggcaccagcaccgagcctagtgagcaggagattaaacggatcaacaagatcagaagaagacttgtgaaagacagcaacaccaagaaggccggcaagacaggccccatgaaaaccctgctggttagagtgatgacacccgatctgagagagcggctggaaaacctgagaaagaagcctgaaaatatcccccagcccatcagcaatacatctagagccaacctgaataagctgctgaccgattacaccgaaatgaagaaggcgatcctgcatgtgtactgggaagagttccagaaggaccctgtgggcctgatgagccgggtggcccagcctgccagcaagaagatcgatcagaacaagctgaaacctgagatggacgagaagggcaacctgaccaccgccggctttgcctgctctcagtgtggccagcccctgttcgtgtacaagctggagcaggtgtctgagaagggcaaggcttacaccaactacttcggacggtgcaatgtggccgagcacgaaaagctgatcctgctggcccagctgaagcccgagaaggatagcgacgaagccgtgacatatagcctgggaaagtttgggcagagggccctggatttctacagcattcatgtgaccaaggagtccacccaccccgtgaagcccctggcccagatcgccggaaacagatacgcctccggacctgtgggaaaggccctgagcgacgcatgtatgggcacaatcgcctccttcctgtctaagtaccaggacatcatcatcgaacaccagaaggtggtgaagggcaaccagaagagactggagagcctgcgggagctggccggcaaggaaaacctggaataccctagcgtgaccctgccacctcagcctcacaccaaggagggcgttgatgcctacaacgaagtgatcgcccgggtgcgaatgtgggtgaacctgaacctgtggcagaagctgaagctaagcagagatgatgccaagcctctgctgagactgaagggattcccttcctttcctctggtcgagagacaggccaacgaagtggactggtgggacatggtgtgtaacgtgaagaagctgatcaacgagaaaaaggaggatggcaaggtgttttggcagaatctggctggctacaagagacaggaagccctgagaccatacctgagcagcgaggaagatcggaagaagggaaagaaattcgctcggtaccagctgggcgacctgctgctgcacctggaaaagaagcacggcgaggactggggaaaggtgtacgacgaggcctgggagcggattgacaagaaagtggaaggcctgagcaagcacatcaagctggaagaggaacggagaagcgaggacgcccagagcaaggccgccctgaccgactggctgcgggctaaggccagcttcgtgatcgagggcctgaaggaggccgacaaggacgagttctgcagatgcgagctgaagctgcagaagtggtacggggacctgcggggaaagcccttcgccatcgaagccgagaacagcatcctggacatcagcggcttcagcaagcagtacaactgtgccttcatctggcagaaggacggcgtgaagaagctgaacctgtacctgatcatcaactacttcaagggcggcaagctgcggttcaagaagatcaaacctgaagccttcgaagccaacagattctacaccgtgatcaacaaaaagagcggcgagatcgtgcccatggaggtgaacttcaacttcgacgaccccaacctgatcatcctgcctctggcctttggcaagagacagggcagagaattcatctggaacgacctgctgtccctggaaaccggcagcctgaagctggccaacggaagagtgatcgagaagacactgtacaacagaagaacccggcaggatgagcctgccctgttcgtggccctgaccttcgagcggcgggaggtcctggactcctccaatatcaaaccaatgaacctgatcggcgtggcaagaggcgaaaacatccccgccgtgatcgccctgaccgaccccgagggctgcccactgagccggtttaaggatagcctgggaaacccaacccacatcctgagaatcggcgagagctataaggagaagcagcggaccatccaggccaagaaggaggtggagcagcggagagccggcggctacagccggaagtacgccagcaaagccaagaatctggcagacgatatggtgagaaacaccgctagagatctgctgtactacgccgtgacccaggatgccatgctgatcttcgccaacctgagccggggcttcggccggcagggcaagcggaccttcatggccgagagacagtacacacggatggaggactggctgaccgccaagctggcctacgagggcctgagcaagacctacctgtccaagacactggcccagtacacctccaagacatgcagcaactgtgggtttaccatcaccagcgccgactacgacagggtgctggagaagctgaagaagacagcaacaggctggatgaccacaattaacggcaaggagctgaaggtggagggccagattacctactacaacagatacaagagacagaacgtagtcaaggacctgtccgtcgagctggatagactgagcgaagaatctgtgaacaacgacatctcctcctggacaaagggcagaagcggagaagctctgagcctcctgaagaaaagattctcccatagacccgtgcaggagaagttcgtgtgcctgaactgcggcttcgagacacacgcagccgagcaagccgccctgaacatcgccagatcctggctgttcctgcggagccaggagtacaagaaataccagacaaacaagacaaccggcaacaccgataagagagccttcgtcgagacctggcagtccttttaccggaagaagcttaaggaggtgtggaaacctgccgtgcggtctggcggatctggcggaggctcctgcccaggagagcgtgatgttcagcgacgtgagcatcgacttcagccaggaggagtgggagtgcctgaacgacgaccagagggccctgtacagggacgtgatgctggagaactacagcaacctggtgagcatgggccacagcatcagcaagcccgacgtgatcagcttcctggagcagggcaaggagccctggctggtggacagggagctgaccaggggccagtggcccgtgctggagagcaggggatctggctccggcagcggccccaagaaaaagagaaaagtctaagctgccttctgcggggcttgccttctggccatgcccttcttctctcccttgcacctgtacctcttggtctttgaataaagcctgagtaggaaggctagcaaaaaaaaaaaaaaaaaaaaaaaaaaaaaaaaaaaaaaaaaaaaaaaaaaaaaaaaaaaaaaaaaaaaaaaaaaaaaaaa

SEQ ID NO: 15481 - RNA, 9485 nt, synthetic construct
  source 1..9485: mol_type = other RNA
aggaaataagagagaaaagaagagtaagaagaaatataagagccaccatggcccctaagaagaagcgtaaagtgagccggatggaacgcctcgtctacgaggtgcggcagaagtgcagaaacatcgaggacatctgcatctcctgcggatctctgaacgtgaccctggagcacccactgttcatcggcggcatgtgccagaactgtaaaaactgttttctggagtgtgcctatcaatacgacgatgacggctaccagagctactgcaccatctgttgcggcggaagagaggtgctgatgtgtggaaataacaactgctgccggtgcttctgcgtggaatgcgtggacctgctggtgggccccggcgccgcccaggccgctattaaggaagatccttggaactgctacatgtgcggccacaagggcacatacggcctgctgagacggagagaggactggcctagcagactgcagatgttcttcgccaataaccacgaccaggagttcgacccccctaaggtgtaccctcccgtccccgccgagaagagaaagcccatccgggtcctgagcctgttcgatggcatcgccaccggtctgctggtgctgaaggacctgggcatccaggtggataggtacattgcctccgaggtgtgcgaggactccatcaccgtgggaatggtgcgtcatcagggcaagatcatgtacgtgggcgacgtgcggagcgtgacacagaagcatatccaggagtggggccctttcgacctggtgatcggcggcagcccttgcaatgacctgagcatcgtgaacccagcccggaagggcctgtacgagggaaccggcagactgttcttcgagttttacagactgctgcacgacgcccggcctaaggaaggcgacgaccggcccttcttttggctgttcgagaatgtggtggccatgggagtcagcgacaagcgggatattagccggttcctggagagcaaccccgtgatgatcgatgccaaggaagtgagcgccgcccaccgggccagatacttctggggcaatctgcctggcatgaacagacccctggccagcaccgtgaacgacaagctggagctgcaggagtgcctggagcacggccggatcgccaagttcagcaaggtgagaaccatcaccacccgaagcaacagcatcaaacaaggcaaggaccagcactttcctgtgttcatgaacgagaaggaggacatcctgtggtgtaccgagatggagagagtgttcgggttcccagtccactacacagatgtcagcaacatgtctagactggccagacagagactgctgggaagaagctggtccgtccctgtgatcagacacctgttcgcccctctgaaggagtacttcgcctgcgtgagcagcggcaacagcaacgccaacagccggggccccagcttctctagcggcctggtgccactgtccctgagagggagccacatgggccccatggagatctacaaaaccgtgagcgcctggaagcggcagcctgtgcgcgtgctgagcctgtttcggaatatcgataaagtcctgaaaagcctgggattcctggagagcggctctggctccggcggtggcaccctgaagtacgtggaggatgtgacaaacgtggtcagacgggatgtggagaagtggggccccttcgatctggtgtacggcagcacccaacccctgggcagctcttgtgaccggtgccctggctggtacatgtttcagttccaccggatcctgcagtacgccctgccgagacaggagtcccagcggccattcttttggattttcatggacaacttgctgctgaccgaggatgaccaggaaactaccactcggttcctgcagaccgaagccgtgaccctgcaggacgtgagaggccgggactaccagaacgccatgcgggtgtggtccaacatccctggactgaaaagcaagcacgcacctctgacccctaaagaagaggagtacctgcaggcccaggtgcggagcagaagcaagctggacgcccctaaggtggatctgctggtgaagaattgcctcctgcccctgagagagtacttcaagtatttcagccagaatagtctgcccctgggaggcagcggcggcggcgccctggtgacatttgaggacgtcgccgtgcggttcacccaggaggaatgggctctgctggatccttctcagaaaatcctgtaccgggacgtgatgagagagacataccggaatctgacctccgtgggcatcaactgggaatgttgggaccttgaagcctgcttcagaagcctgggaagaaacctgagagtgcaggtggtgaagagaaagtgcgagctgaccaacagcggcccctgcgccgagggcggcccaagcagcggcgcccctcctcccagcggcggcagcccagccggctccccaacctctaccgaggagggcacctctgagtccgccacccccgagagcggccctggcacctccaccgagcccagcgagggcagcgcacccggcagccctgccggcagccccacctccacagaggagggaaccagcaccgagcccagcgaaggcagcgccccaggcaccagcaccgagcctagtgagcaggagattaaacggatcaacaagatcagaagaagacttgtgaaagacagcaacaccaagaaggccggcaagacaggccccatgaaaaccctgctggttagagtgatgacacccgatctgagagagcggctggaaaacctgagaaagaagcctgaaaatatcccccagcccatcagcaatacatctagagccaacctgaataagctgctgaccgattacaccgaaatgaagaaggcgatcctgcatgtgtactgggaagagttccagaaggaccctgtgggcctgatgagccgggtggcccagcctgccagcaagaagatcgatcagaacaagctgaaacctgagatggacgagaagggcaacctgaccaccgccggctttgcctgctctcagtgtggccagcccctgttcgtgtacaagctggagcaggtgtctgagaagggcaaggcttacaccaactacttcggacggtgcaatgtggccgagcacgaaaagctgatcctgctggcccagctgaagcccgagaaggatagcgacgaagccgtgacatatagcctgggaaagtttgggcagagggccctggatttctacagcattcatgtgaccaaggagtccacccaccccgtgaagcccctggcccagatcgccggaaacagatacgcctccggacctgtgggaaaggccctgagcgacgcatgtatgggcacaatcgcctccttcctgtctaagtaccaggacatcatcatcgaacaccagaaggtggtgaagggcaaccagaagagactggagagcctgcgggagctggccggcaaggaaaacctggaataccctagcgtgaccctgccacctcagcctcacaccaaggagggcgttgatgcctacaacgaagtgatcgcccgggtgcgaatgtgggtgaacctgaacctgtggcagaagctgaagctaagcagagatgatgccaagcctctgctgagactgaagggattcccttcctttcctctggtcgagagacaggccaacgaagtggactggtgggacatggtgtgtaacgtgaagaagctgatcaacgagaaaaaggaggatggcaaggtgttttggcagaatctggctggctacaagagacaggaagccctgagaccatacctgagcagcgaggaagatcggaagaagggaaagaaattcgctcggtaccagctgggcgacctgctgctgcacctggaaaagaagcacggcgaggactggggaaaggtgtacgacgaggcctgggagcggattgacaagaaagtggaaggcctgagcaagcacatcaagctggaagaggaacggagaagcgaggacgcccagagcaaggccgccctgaccgactggctgcgggctaaggccagcttcgtgatcgagggcctgaaggaggccgacaaggacgagttctgcagatgcgagctgaagctgcagaagtggtacggggacctgcggggaaagcccttcgccatcgaagccgagaacagcatcctggacatcagcggcttcagcaagcagtacaactgtgccttcatctggcagaaggacggcgtgaagaagctgaacctgtacctgatcatcaactacttcaagggcggcaagctgcggttcaagaagatcaaacctgaagccttcgaagccaacagattctacaccgtgatcaacaaaaagagcggcgagatcgtgcccatggaggtgaacttcaacttcgacgaccccaacctgatcatcctgcctctggcctttggcaagagacagggcagagaattcatctggaacgacctgctgtccctggaaaccggcagcctgaagctggccaacggaagagtgatcgagaagacactgtacaacagaagaacccggcaggatgagcctgccctgttcgtggccctgaccttcgagcggcgggaggtcctggactcctccaatatcaaaccaatgaacctgatcggcgtggcaagaggcgaaaacatccccgccgtgatcgccctgaccgaccccgagggctgcccactgagccggtttaaggatagcctgggaaacccaacccacatcctgagaatcggcgagagctataaggagaagcagcggaccatccaggccaagaaggaggtggagcagcggagagccggcggctacagccggaagtacgccagcaaagccaagaatctggcagacgatatggtgagaaacaccgctagagatctgctgtactacgccgtgacccaggatgccatgctgatcttcgccaacctgagccggggcttcggccggcagggcaagcggaccttcatggccgagagacagtacacacggatggaggactggctgaccgccaagctggcctacgagggcctgagcaagacctacctgtccaagacactggcccagtacacctccaagacatgcagcaactgtgggtttaccatcaccagcgccgactacgacagggtgctggagaagctgaagaagacagcaacaggctggatgaccacaattaacggcaaggagctgaaggtggagggccagattacctactacaacagatacaagagacagaacgtagtcaaggacctgtccgtcgagctggatagactgagcgaagaatctgtgaacaacgacatctcctcctggacaaagggcagaagcggagaagctctgagcctcctgaagaaaagattctcccatagacccgtgcaggagaagttcgtgtgcctgaactgcggcttcgagacacacgcagccgagcaagccgccctgaacatcgccagatcctggctgttcctgcggagccaggagtacaagaaataccagacaaacaagacaaccggcaacaccgataagagagccttcgtcgagacctggcagtccttttaccggaagaagcttaaggaggtgtggaaacctgccgtgcggtctggcggatctggcggaggctccccccaggtgctggtgagcttcgaggaggtggccgtgctgctgagccaggaggagtggggccacctgggccccgaccagaagaggctgtacagggacgtgatgctggagacctacggcaacctggtgagcctgggcctgcagggcagcaagcccgacgtgatcagcaagctggagcagggcgaggagccctgggccccccacagccccaggatcgagggcagctggatctggaggaggaggaggggcggcccaagcagcggcgcccctcctcccagcggcggcagcccagccggctccccaacctctaccgaggagggcacctctgagtccgccacccccgagagcggccctggcacctccaccgagcccagcgagggcagcgcacccggcagccctgccggcagccccacctccacagaggagggaaccagcaccgagcccagcgaaggcagcgccccaggcaccagcaccgagcctagtgagcaggagattaaacggatcaacaagatcagaagaagacttgtgaaagacagcaacaccaagaaggccggcaagacaggccccatgaaaaccctgctggttagagtgatgacacccgatctgagagagcggctggaaaacctgagaaagaagcctgaaaatatcccccagcccatcagcaatacatctagagccaacctgaataagctgctgaccgattacaccgaaatgaagaaggcgatcctgcatgtgtactgggaagagttccagaaggaccctgtgggcctgatgagccgggtggcccagcctgccagcaagaagatcgatcagaacaagctgaaacctgagatggacgagaagggcaacctgaccaccgccggctttgcctgctctcagtgtggccagcccctgttcgtgtacaagctggagcaggtgtctgagaagggcaaggcttacaccaactacttcggacggtgcaatgtggccgagcacgaaaagctgatcctgctggcccagctgaagcccgagaaggatagcgacgaagccgtgacatatagcctgggaaagtttgggcagagggccctggatttctacagcattcatgtgaccaaggagtccacccaccccgtgaagcccctggcccagatcgccggaaacagatacgcctccggacctgtgggaaaggccctgagcgacgcatgtatgggcacaatcgcctccttcctgtctaagtaccaggacatcatcatcgaacaccagaaggtggtgaagggcaaccagaagagactggagagcctgcgggagctggccggcaaggaaaacctggaataccctagcgtgaccctgccacctcagcctcacaccaaggagggcgttgatgcctacaacgaagtgatcgcccgggtgcgaatgtgggtgaacctgaacctgtggcagaagctgaagctaagcagagatgatgccaagcctctgctgagactgaagggattcccttcctttcctctggtcgagagacaggccaacgaagtggactggtgggacatggtgtgtaacgtgaagaagctgatcaacgagaaaaaggaggatggcaaggtgttttggcagaatctggctggctacaagagacaggaagccctgagaccatacctgagcagcgaggaagatcggaagaagggaaagaaattcgctcggtaccagctgggcgacctgctgctgcacctggaaaagaagcacggcgaggactggggaaaggtgtacgacgaggcctgggagcggattgacaagaaagtggaaggcctgagcaagcacatcaagctggaagaggaacggagaagcgaggacgcccagagcaaggccgccctgaccgactggctgcgggctaaggccagcttcgtgatcgagggcctgaaggaggccgacaaggacgagttctgcagatgcgagctgaagctgcagaagtggtacggggacctgcggggaaagcccttcgccatcgaagccgagaacagcatcctggacatcagcggcttcagcaagcagtacaactgtgccttcatctggcagaaggacggcgtgaagaagctgaacctgtacctgatcatcaactacttcaagggcggcaagctgcggttcaagaagatcaaacctgaagccttcgaagccaacagattctacaccgtgatcaacaaaaagagcggcgagatcgtgcccatggaggtgaacttcaacttcgacgaccccaacctgatcatcctgcctctggcctttggcaagagacagggcagagaattcatctggaacgacctgctgtccctggaaaccggcagcctgaagctggccaacggaagagtgatcgagaagacactgtacaacagaagaacccggcaggatgagcctgccctgttcgtggccctgaccttcgagcggcgggaggtcctggactcctccaatatcaaaccaatgaacctgatcggcgtggcaagaggcgaaaacatccccgccgtgatcgccctgaccgaccccgagggctgcccactgagccggtttaaggatagcctgggaaacccaacccacatcctgagaatcggcgagagctataaggagaagcagcggaccatccaggccaagaaggaggtggagcagcggagagccggcggctacagccggaagtacgccagcaaagccaagaatctggcagacgatatggtgagaaacaccgctagagatctgctgtactacgccgtgacccaggatgccatgctgatcttcgccaacctgagccggggcttcggccggcagggcaagcggaccttcatggccgagagacagtacacacggatggaggactggctgaccgccaagctggcctacgagggcctgagcaagacctacctgtccaagacactggcccagtacacctccaagacatgcagcaactgtgggtttaccatcaccagcgccgactacgacagggtgctggagaagctgaagaagacagcaacaggctggatgaccacaattaacggcaaggagctgaaggtggagggccagattacctactacaacagatacaagagacagaacgtagtcaaggacctgtccgtcgagctggatagactgagcgaagaatctgtgaacaacgacatctcctcctggacaaagggcagaagcggagaagctctgagcctcctgaagaaaagattctcccatagacccgtgcaggagaagttcgtgtgcctgaactgcggcttcgagacacacgcagccgagcaagccgccctgaacatcgccagatcctggctgttcctgcggagccaggagtacaagaaataccagacaaacaagacaaccggcaacaccgataagagagccttcgtcgagacctggcagtccttttaccggaagaagcttaaggaggtgtggaaacctgccgtgcggtctggcggatctggcggaggctcctccccaggtgctggtgagcttcgaggaggtggccgtgctgctgagccaggaggagtggggccacctgggccccgaccagaagaggctgtacagggacgtgatgctggagacctacggcaacctggtgagcctgggcctgcagggcagcaagcccgacgtgatcagcaagctggagcagggcgaggagccctgggccccccacagccccaggatcgagggcagctggatctggaggaggaggaggggatctggctccggcagcggccccaagaaaaagagaaaagtctaagctgccttctgcggggcttgccttctggccatgcccttcttctctcccttgcacctgtacctcttggtctttgaataaagcctgagtaggaaggctagcaaaaaaaaaaaaaaaaaaaaaaaaaaaaaaaaaaaaaaaaaaaaaaaaaaaaaaaaaaaaaaaaaaaaaaaaaaaaaaaa

SEQ ID NO: 15482 - RNA, 9485 nt, synthetic construct
  source 1..9485: mol_type = other RNA
aggaaataagagagaaaagaagagtaagaagaaatataagagccaccatggcccctaagaagaagcgtaaagtgagccggatggaacgcctcgtctacgaggtgcggcagaagtgcagaaacatcgaggacatctgcatctcctgcggatctctgaacgtgaccctggagcacccactgttcatcggcggcatgtgccagaactgtaaaaactgttttctggagtgtgcctatcaatacgacgatgacggctaccagagctactgcaccatctgttgcggcggaagagaggtgctgatgtgtggaaataacaactgctgccggtgcttctgcgtggaatgcgtggacctgctggtgggccccggcgccgcccaggccgctattaaggaagatccttggaactgctacatgtgcggccacaagggcacatacggcctgctgagacggagagaggactggcctagcagactgcagatgttcttcgccaataaccacgaccaggagttcgacccccctaaggtgtaccctcccgtccccgccgagaagagaaagcccatccgggtcctgagcctgttcgatggcatcgccaccggtctgctggtgctgaaggacctgggcatccaggtggataggtacattgcctccgaggtgtgcgaggactccatcaccgtgggaatggtgcgtcatcagggcaagatcatgtacgtgggcgacgtgcggagcgtgacacagaagcatatccaggagtggggccctttcgacctggtgatcggcggcagcccttgcaatgacctgagcatcgtgaacccagcccggaagggcctgtacgagggaaccggcagactgttcttcgagttttacagactgctgcacgacgcccggcctaaggaaggcgacgaccggcccttcttttggctgttcgagaatgtggtggccatgggagtcagcgacaagcgggatattagccggttcctggagagcaaccccgtgatgatcgatgccaaggaagtgagcgccgcccaccgggccagatacttctggggcaatctgcctggcatgaacagacccctggccagcaccgtgaacgacaagctggagctgcaggagtgcctggagcacggccggatcgccaagttcagcaaggtgagaaccatcaccacccgaagcaacagcatcaaacaaggcaaggaccagcactttcctgtgttcatgaacgagaaggaggacatcctgtggtgtaccgagatggagagagtgttcgggttcccagtccactacacagatgtcagcaacatgtctagactggccagacagagactgctgggaagaagctggtccgtccctgtgatcagacacctgttcgcccctctgaaggagtacttcgcctgcgtgagcagcggcaacagcaacgccaacagccggggccccagcttctctagcggcctggtgccactgtccctgagagggagccacatgggccccatggagatctacaaaaccgtgagcgcctggaagcggcagcctgtgcgcgtgctgagcctgtttcggaatatcgataaagtcctgaaaagcctgggattcctggagagcggctctggctccggcggtggcaccctgaagtacgtggaggatgtgacaaacgtggtcagacgggatgtggagaagtggggccccttcgatctggtgtacggcagcacccaacccctgggcagctcttgtgaccggtgccctggctggtacatgtttcagttccaccggatcctgcagtacgccctgccgagacaggagtcccagcggccattcttttggattttcatggacaacttgctgctgaccgaggatgaccaggaaactaccactcggttcctgcagaccgaagccgtgaccctgcaggacgtgagaggccgggactaccagaacgccatgcgggtgtggtccaacatccctggactgaaaagcaagcacgcacctctgacccctaaagaagaggagtacctgcaggcccaggtgcggagcagaagcaagctggacgcccctaaggtggatctgctggtgaagaattgcctcctgcccctgagagagtacttcaagtatttcagccagaatagtctgcccctgggaggcagcggcggcggcgccctggtgacatttgaggacgtcgccgtgcggttcacccaggaggaatgggctctgctggatccttctcagaaaatcctgtaccgggacgtgatgagagagacataccggaatctgacctccgtgggcatcaactgggaatgttgggaccttgaagcctgcttcagaagcctgggaagaaacctgagagtgcaggtggtgaagagaaagtgcgagctgaccaacagcggcccctgcgccgagggcggcccaagcagcggcgcccctcctcccagcggcggcagcccagccggctccccaacctctaccgaggagggcacctctgagtccgccacccccgagagcggccctggcacctccaccgagcccagcgagggcagcgcacccggcagccctgccggcagccccacctccacagaggagggaaccagcaccgagcccagcgaaggcagcgccccaggcaccagcaccgagcctagtgagcaggagattaaacggatcaacaagatcagaagaagacttgtgaaagacagcaacaccaagaaggccggcaagacaggccccatgaaaaccctgctggttagagtgatgacacccgatctgagagagcggctggaaaacctgagaaagaagcctgaaaatatcccccagcccatcagcaatacatctagagccaacctgaataagctgctgaccgattacaccgaaatgaagaaggcgatcctgcatgtgtactgggaagagttccagaaggaccctgtgggcctgatgagccgggtggcccagcctgccagcaagaagatcgatcagaacaagctgaaacctgagatggacgagaagggcaacctgaccaccgccggctttgcctgctctcagtgtggccagcccctgttcgtgtacaagctggagcaggtgtctgagaagggcaaggcttacaccaactacttcggacggtgcaatgtggccgagcacgaaaagctgatcctgctggcccagctgaagcccgagaaggatagcgacgaagccgtgacatatagcctgggaaagtttgggcagagggccctggatttctacagcattcatgtgaccaaggagtccacccaccccgtgaagcccctggcccagatcgccggaaacagatacgcctccggacctgtgggaaaggccctgagcgacgcatgtatgggcacaatcgcctccttcctgtctaagtaccaggacatcatcatcgaacaccagaaggtggtgaagggcaaccagaagagactggagagcctgcgggagctggccggcaaggaaaacctggaataccctagcgtgaccctgccacctcagcctcacaccaaggagggcgttgatgcctacaacgaagtgatcgcccgggtgcgaatgtgggtgaacctgaacctgtggcagaagctgaagctaagcagagatgatgccaagcctctgctgagactgaagggattcccttcctttcctctggtcgagagacaggccaacgaagtggactggtgggacatggtgtgtaacgtgaagaagctgatcaacgagaaaaaggaggatggcaaggtgttttggcagaatctggctggctacaagagacaggaagccctgagaccatacctgagcagcgaggaagatcggaagaagggaaagaaattcgctcggtaccagctgggcgacctgctgctgcacctggaaaagaagcacggcgaggactggggaaaggtgtacgacgaggcctgggagcggattgacaagaaagtggaaggcctgagcaagcacatcaagctggaagaggaacggagaagcgaggacgcccagagcaaggccgccctgaccgactggctgcgggctaaggccagcttcgtgatcgagggcctgaaggaggccgacaaggacgagttctgcagatgcgagctgaagctgcagaagtggtacggggacctgcggggaaagcccttcgccatcgaagccgagaacagcatcctggacatcagcggcttcagcaagcagtacaactgtgccttcatctggcagaaggacggcgtgaagaagctgaacctgtacctgatcatcaactacttcaagggcggcaagctgcggttcaagaagatcaaacctgaagccttcgaagccaacagattctacaccgtgatcaacaaaaagagcggcgagatcgtgcccatggaggtgaacttcaacttcgacgaccccaacctgatcatcctgcctctggcctttggcaagagacagggcagagaattcatctggaacgacctgctgtccctggaaaccggcagcctgaagctggccaacggaagagtgatcgagaagacactgtacaacagaagaacccggcaggatgagcctgccctgttcgtggccctgaccttcgagcggcgggaggtcctggactcctccaatatcaaaccaatgaacctgatcggcgtggcaagaggcgaaaacatccccgccgtgatcgccctgaccgaccccgagggctgcccactgagccggtttaaggatagcctgggaaacccaacccacatcctgagaatcggcgagagctataaggagaagcagcggaccatccaggccaagaaggaggtggagcagcggagagccggcggctacagccggaagtacgccagcaaagccaagaatctggcagacgatatggtgagaaacaccgctagagatctgctgtactacgccgtgacccaggatgccatgctgatcttcgccaacctgagccggggcttcggccggcagggcaagcggaccttcatggccgagagacagtacacacggatggaggactggctgaccgccaagctggcctacgagggcctgagcaagacctacctgtccaagacactggcccagtacacctccaagacatgcagcaactgtgggtttaccatcaccagcgccgactacgacagggtgctggagaagctgaagaagacagcaacaggctggatgaccacaattaacggcaaggagctgaaggtggagggccagattacctactacaacagatacaagagacagaacgtagtcaaggacctgtccgtcgagctggatagactgagcgaagaatctgtgaacaacgacatctcctcctggacaaagggcagaagcggagaagctctgagcctcctgaagaaaagattctcccatagacccgtgcaggagaagttcgtgtgcctgaactgcggcttcgagacacacgcagccgagcaagccgccctgaacatcgccagatcctggctgttcctgcggagccaggagtacaagaaataccagacaaacaagacaaccggcaacaccgataagagagccttcgtcgagacctggcagtccttttaccggaagaagcttaaggaggtgtggaaacctgccgtgcggtctggcggatctggcggaggctccctgatcaacgccgtgacctacaacgacgtgcacatcaacttcacccaggaggagtgggccctgctggaccccagccagaagagcctgtacaaggacgtgatgctggagacctacaggaacctgaccgccatcggctacagctgcgaggaccacaacatcgaggagcactgccagagcagcaccaggcacaggaggtacgagaggaggcacagcagggagaagcccagcgagtacagccagtgcggcggcccaagcagcggcgcccctcctcccagcggcggcagcccagccggctccccaacctctaccgaggagggcacctctgagtccgccacccccgagagcggccctggcacctccaccgagcccagcgagggcagcgcacccggcagccctgccggcagccccacctccacagaggagggaaccagcaccgagcccagcgaaggcagcgccccaggcaccagcaccgagcctagtgagcaggagattaaacggatcaacaagatcagaagaagacttgtgaaagacagcaacaccaagaaggccggcaagacaggccccatgaaaaccctgctggttagagtgatgacacccgatctgagagagcggctggaaaacctgagaaagaagcctgaaaatatcccccagcccatcagcaatacatctagagccaacctgaataagctgctgaccgattacaccgaaatgaagaaggcgatcctgcatgtgtactgggaagagttccagaaggaccctgtgggcctgatgagccgggtggcccagcctgccagcaagaagatcgatcagaacaagctgaaacctgagatggacgagaagggcaacctgaccaccgccggctttgcctgctctcagtgtggccagcccctgttcgtgtacaagctggagcaggtgtctgagaagggcaaggcttacaccaactacttcggacggtgcaatgtggccgagcacgaaaagctgatcctgctggcccagctgaagcccgagaaggatagcgacgaagccgtgacatatagcctgggaaagtttgggcagagggccctggatttctacagcattcatgtgaccaaggagtccacccaccccgtgaagcccctggcccagatcgccggaaacagatacgcctccggacctgtgggaaaggccctgagcgacgcatgtatgggcacaatcgcctccttcctgtctaagtaccaggacatcatcatcgaacaccagaaggtggtgaagggcaaccagaagagactggagagcctgcgggagctggccggcaaggaaaacctggaataccctagcgtgaccctgccacctcagcctcacaccaaggagggcgttgatgcctacaacgaagtgatcgcccgggtgcgaatgtgggtgaacctgaacctgtggcagaagctgaagctaagcagagatgatgccaagcctctgctgagactgaagggattcccttcctttcctctggtcgagagacaggccaacgaagtggactggtgggacatggtgtgtaacgtgaagaagctgatcaacgagaaaaaggaggatggcaaggtgttttggcagaatctggctggctacaagagacaggaagccctgagaccatacctgagcagcgaggaagatcggaagaagggaaagaaattcgctcggtaccagctgggcgacctgctgctgcacctggaaaagaagcacggcgaggactggggaaaggtgtacgacgaggcctgggagcggattgacaagaaagtggaaggcctgagcaagcacatcaagctggaagaggaacggagaagcgaggacgcccagagcaaggccgccctgaccgactggctgcgggctaaggccagcttcgtgatcgagggcctgaaggaggccgacaaggacgagttctgcagatgcgagctgaagctgcagaagtggtacggggacctgcggggaaagcccttcgccatcgaagccgagaacagcatcctggacatcagcggcttcagcaagcagtacaactgtgccttcatctggcagaaggacggcgtgaagaagctgaacctgtacctgatcatcaactacttcaagggcggcaagctgcggttcaagaagatcaaacctgaagccttcgaagccaacagattctacaccgtgatcaacaaaaagagcggcgagatcgtgcccatggaggtgaacttcaacttcgacgaccccaacctgatcatcctgcctctggcctttggcaagagacagggcagagaattcatctggaacgacctgctgtccctggaaaccggcagcctgaagctggccaacggaagagtgatcgagaagacactgtacaacagaagaacccggcaggatgagcctgccctgttcgtggccctgaccttcgagcggcgggaggtcctggactcctccaatatcaaaccaatgaacctgatcggcgtggcaagaggcgaaaacatccccgccgtgatcgccctgaccgaccccgagggctgcccactgagccggtttaaggatagcctgggaaacccaacccacatcctgagaatcggcgagagctataaggagaagcagcggaccatccaggccaagaaggaggtggagcagcggagagccggcggctacagccggaagtacgccagcaaagccaagaatctggcagacgatatggtgagaaacaccgctagagatctgctgtactacgccgtgacccaggatgccatgctgatcttcgccaacctgagccggggcttcggccggcagggcaagcggaccttcatggccgagagacagtacacacggatggaggactggctgaccgccaagctggcctacgagggcctgagcaagacctacctgtccaagacactggcccagtacacctccaagacatgcagcaactgtgggtttaccatcaccagcgccgactacgacagggtgctggagaagctgaagaagacagcaacaggctggatgaccacaattaacggcaaggagctgaaggtggagggccagattacctactacaacagatacaagagacagaacgtagtcaaggacctgtccgtcgagctggatagactgagcgaagaatctgtgaacaacgacatctcctcctggacaaagggcagaagcggagaagctctgagcctcctgaagaaaagattctcccatagacccgtgcaggagaagttcgtgtgcctgaactgcggcttcgagacacacgcagccgagcaagccgccctgaacatcgccagatcctggctgttcctgcggagccaggagtacaagaaataccagacaaacaagacaaccggcaacaccgataagagagccttcgtcgagacctggcagtccttttaccggaagaagcttaaggaggtgtggaaacctgccgtgcggtctggcggatctggcggaggctcctctgatcaacgccgtgacctacaacgacgtgcacatcaacttcacccaggaggagtgggccctgctggaccccagccagaagagcctgtacaaggacgtgatgctggagacctacaggaacctgaccgccatcggctacagctgcgaggaccacaacatcgaggagcactgccagagcagcaccaggcacaggaggtacgagaggaggcacagcagggagaagcccagcgagtacagccagtgcggatctggctccggcagcggccccaagaaaaagagaaaagtctaagctgccttctgcggggcttgccttctggccatgcccttcttctctcccttgcacctgtacctcttggtctttgaataaagcctgagtaggaaggctagcaaaaaaaaaaaaaaaaaaaaaaaaaaaaaaaaaaaaaaaaaaaaaaaaaaaaaaaaaaaaaaaaaaaaaaaaaaaaaaaa

SEQ ID NO: 15483 - RNA, 9485 nt, synthetic construct
  source 1..9485: mol_type = other RNA
aggaaataagagagaaaagaagagtaagaagaaatataagagccaccatggcccctaagaagaagcgtaaagtgagccggatggaacgcctcgtctacgaggtgcggcagaagtgcagaaacatcgaggacatctgcatctcctgcggatctctgaacgtgaccctggagcacccactgttcatcggcggcatgtgccagaactgtaaaaactgttttctggagtgtgcctatcaatacgacgatgacggctaccagagctactgcaccatctgttgcggcggaagagaggtgctgatgtgtggaaataacaactgctgccggtgcttctgcgtggaatgcgtggacctgctggtgggccccggcgccgcccaggccgctattaaggaagatccttggaactgctacatgtgcggccacaagggcacatacggcctgctgagacggagagaggactggcctagcagactgcagatgttcttcgccaataaccacgaccaggagttcgacccccctaaggtgtaccctcccgtccccgccgagaagagaaagcccatccgggtcctgagcctgttcgatggcatcgccaccggtctgctggtgctgaaggacctgggcatccaggtggataggtacattgcctccgaggtgtgcgaggactccatcaccgtgggaatggtgcgtcatcagggcaagatcatgtacgtgggcgacgtgcggagcgtgacacagaagcatatccaggagtggggccctttcgacctggtgatcggcggcagcccttgcaatgacctgagcatcgtgaacccagcccggaagggcctgtacgagggaaccggcagactgttcttcgagttttacagactgctgcacgacgcccggcctaaggaaggcgacgaccggcccttcttttggctgttcgagaatgtggtggccatgggagtcagcgacaagcgggatattagccggttcctggagagcaaccccgtgatgatcgatgccaaggaagtgagcgccgcccaccgggccagatacttctggggcaatctgcctggcatgaacagacccctggccagcaccgtgaacgacaagctggagctgcaggagtgcctggagcacggccggatcgccaagttcagcaaggtgagaaccatcaccacccgaagcaacagcatcaaacaaggcaaggaccagcactttcctgtgttcatgaacgagaaggaggacatcctgtggtgtaccgagatggagagagtgttcgggttcccagtccactacacagatgtcagcaacatgtctagactggccagacagagactgctgggaagaagctggtccgtccctgtgatcagacacctgttcgcccctctgaaggagtacttcgcctgcgtgagcagcggcaacagcaacgccaacagccggggccccagcttctctagcggcctggtgccactgtccctgagagggagccacatgggccccatggagatctacaaaaccgtgagcgcctggaagcggcagcctgtgcgcgtgctgagcctgtttcggaatatcgataaagtcctgaaaagcctgggattcctggagagcggctctggctccggcggtggcaccctgaagtacgtggaggatgtgacaaacgtggtcagacgggatgtggagaagtggggccccttcgatctggtgtacggcagcacccaacccctgggcagctcttgtgaccggtgccctggctggtacatgtttcagttccaccggatcctgcagtacgccctgccgagacaggagtcccagcggccattcttttggattttcatggacaacttgctgctgaccgaggatgaccaggaaactaccactcggttcctgcagaccgaagccgtgaccctgcaggacgtgagaggccgggactaccagaacgccatgcgggtgtggtccaacatccctggactgaaaagcaagcacgcacctctgacccctaaagaagaggagtacctgcaggcccaggtgcggagcagaagcaagctggacgcccctaaggtggatctgctggtgaagaattgcctcctgcccctgagagagtacttcaagtatttcagccagaatagtctgcccctgggaggcagcggcggcggcgccctggtgacatttgaggacgtcgccgtgcggttcacccaggaggaatgggctctgctggatccttctcagaaaatcctgtaccgggacgtgatgagagagacataccggaatctgacctccgtgggcatcaactgggaatgttgggaccttgaagcctgcttcagaagcctgggaagaaacctgagagtgcaggtggtgaagagaaagtgcgagctgaccaacagcggcccctgcgccgagggcggcccaagcagcggcgcccctcctcccagcggcggcagcccagccggctccccaacctctaccgaggagggcacctctgagtccgccacccccgagagcggccctggcacctccaccgagcccagcgagggcagcgcacccggcagccctgccggcagccccacctccacagaggagggaaccagcaccgagcccagcgaaggcagcgccccaggcaccagcaccgagcctagtgagcaggagattaaacggatcaacaagatcagaagaagacttgtgaaagacagcaacaccaagaaggccggcaagacaggccccatgaaaaccctgctggttagagtgatgacacccgatctgagagagcggctggaaaacctgagaaagaagcctgaaaatatcccccagcccatcagcaatacatctagagccaacctgaataagctgctgaccgattacaccgaaatgaagaaggcgatcctgcatgtgtactgggaagagttccagaaggaccctgtgggcctgatgagccgggtggcccagcctgccagcaagaagatcgatcagaacaagctgaaacctgagatggacgagaagggcaacctgaccaccgccggctttgcctgctctcagtgtggccagcccctgttcgtgtacaagctggagcaggtgtctgagaagggcaaggcttacaccaactacttcggacggtgcaatgtggccgagcacgaaaagctgatcctgctggcccagctgaagcccgagaaggatagcgacgaagccgtgacatatagcctgggaaagtttgggcagagggccctggatttctacagcattcatgtgaccaaggagtccacccaccccgtgaagcccctggcccagatcgccggaaacagatacgcctccggacctgtgggaaaggccctgagcgacgcatgtatgggcacaatcgcctccttcctgtctaagtaccaggacatcatcatcgaacaccagaaggtggtgaagggcaaccagaagagactggagagcctgcgggagctggccggcaaggaaaacctggaataccctagcgtgaccctgccacctcagcctcacaccaaggagggcgttgatgcctacaacgaagtgatcgcccgggtgcgaatgtgggtgaacctgaacctgtggcagaagctgaagctaagcagagatgatgccaagcctctgctgagactgaagggattcccttcctttcctctggtcgagagacaggccaacgaagtggactggtgggacatggtgtgtaacgtgaagaagctgatcaacgagaaaaaggaggatggcaaggtgttttggcagaatctggctggctacaagagacaggaagccctgagaccatacctgagcagcgaggaagatcggaagaagggaaagaaattcgctcggtaccagctgggcgacctgctgctgcacctggaaaagaagcacggcgaggactggggaaaggtgtacgacgaggcctgggagcggattgacaagaaagtggaaggcctgagcaagcacatcaagctggaagaggaacggagaagcgaggacgcccagagcaaggccgccctgaccgactggctgcgggctaaggccagcttcgtgatcgagggcctgaaggaggccgacaaggacgagttctgcagatgcgagctgaagctgcagaagtggtacggggacctgcggggaaagcccttcgccatcgaagccgagaacagcatcctggacatcagcggcttcagcaagcagtacaactgtgccttcatctggcagaaggacggcgtgaagaagctgaacctgtacctgatcatcaactacttcaagggcggcaagctgcggttcaagaagatcaaacctgaagccttcgaagccaacagattctacaccgtgatcaacaaaaagagcggcgagatcgtgcccatggaggtgaacttcaacttcgacgaccccaacctgatcatcctgcctctggcctttggcaagagacagggcagagaattcatctggaacgacctgctgtccctggaaaccggcagcctgaagctggccaacggaagagtgatcgagaagacactgtacaacagaagaacccggcaggatgagcctgccctgttcgtggccctgaccttcgagcggcgggaggtcctggactcctccaatatcaaaccaatgaacctgatcggcgtggcaagaggcgaaaacatccccgccgtgatcgccctgaccgaccccgagggctgcccactgagccggtttaaggatagcctgggaaacccaacccacatcctgagaatcggcgagagctataaggagaagcagcggaccatccaggccaagaaggaggtggagcagcggagagccggcggctacagccggaagtacgccagcaaagccaagaatctggcagacgatatggtgagaaacaccgctagagatctgctgtactacgccgtgacccaggatgccatgctgatcttcgccaacctgagccggggcttcggccggcagggcaagcggaccttcatggccgagagacagtacacacggatggaggactggctgaccgccaagctggcctacgagggcctgagcaagacctacctgtccaagacactggcccagtacacctccaagacatgcagcaactgtgggtttaccatcaccagcgccgactacgacagggtgctggagaagctgaagaagacagcaacaggctggatgaccacaattaacggcaaggagctgaaggtggagggccagattacctactacaacagatacaagagacagaacgtagtcaaggacctgtccgtcgagctggatagactgagcgaagaatctgtgaacaacgacatctcctcctggacaaagggcagaagcggagaagctctgagcctcctgaagaaaagattctcccatagacccgtgcaggagaagttcgtgtgcctgaactgcggcttcgagacacacgcagccgagcaagccgccctgaacatcgccagatcctggctgttcctgcggagccaggagtacaagaaataccagacaaacaagacaaccggcaacaccgataagagagccttcgtcgagacctggcagtccttttaccggaagaagcttaaggaggtgtggaaacctgccgtgcggtctggcggatctggcggaggctccaggcccgagagcgtgaccttcgaggacgtggccgtgtacttcagcgagaacgagtggatcggcctgggccccgcccagagggccctgtacagggacgtgatgctggagaactacggcgccgtggccagcctggccgccttccccttccccaagcccgccctgatcagccagctggagaggggcgaggccccctggtgcagcgtgccctggggcgccctggacggcgaggaccccaggagcatcggcggcccaagcagcggcgcccctcctcccagcggcggcagcccagccggctccccaacctctaccgaggagggcacctctgagtccgccacccccgagagcggccctggcacctccaccgagcccagcgagggcagcgcacccggcagccctgccggcagccccacctccacagaggagggaaccagcaccgagcccagcgaaggcagcgccccaggcaccagcaccgagcctagtgagcaggagattaaacggatcaacaagatcagaagaagacttgtgaaagacagcaacaccaagaaggccggcaagacaggccccatgaaaaccctgctggttagagtgatgacacccgatctgagagagcggctggaaaacctgagaaagaagcctgaaaatatcccccagcccatcagcaatacatctagagccaacctgaataagctgctgaccgattacaccgaaatgaagaaggcgatcctgcatgtgtactgggaagagttccagaaggaccctgtgggcctgatgagccgggtggcccagcctgccagcaagaagatcgatcagaacaagctgaaacctgagatggacgagaagggcaacctgaccaccgccggctttgcctgctctcagtgtggccagcccctgttcgtgtacaagctggagcaggtgtctgagaagggcaaggcttacaccaactacttcggacggtgcaatgtggccgagcacgaaaagctgatcctgctggcccagctgaagcccgagaaggatagcgacgaagccgtgacatatagcctgggaaagtttgggcagagggccctggatttctacagcattcatgtgaccaaggagtccacccaccccgtgaagcccctggcccagatcgccggaaacagatacgcctccggacctgtgggaaaggccctgagcgacgcatgtatgggcacaatcgcctccttcctgtctaagtaccaggacatcatcatcgaacaccagaaggtggtgaagggcaaccagaagagactggagagcctgcgggagctggccggcaaggaaaacctggaataccctagcgtgaccctgccacctcagcctcacaccaaggagggcgttgatgcctacaacgaagtgatcgcccgggtgcgaatgtgggtgaacctgaacctgtggcagaagctgaagctaagcagagatgatgccaagcctctgctgagactgaagggattcccttcctttcctctggtcgagagacaggccaacgaagtggactggtgggacatggtgtgtaacgtgaagaagctgatcaacgagaaaaaggaggatggcaaggtgttttggcagaatctggctggctacaagagacaggaagccctgagaccatacctgagcagcgaggaagatcggaagaagggaaagaaattcgctcggtaccagctgggcgacctgctgctgcacctggaaaagaagcacggcgaggactggggaaaggtgtacgacgaggcctgggagcggattgacaagaaagtggaaggcctgagcaagcacatcaagctggaagaggaacggagaagcgaggacgcccagagcaaggccgccctgaccgactggctgcgggctaaggccagcttcgtgatcgagggcctgaaggaggccgacaaggacgagttctgcagatgcgagctgaagctgcagaagtggtacggggacctgcggggaaagcccttcgccatcgaagccgagaacagcatcctggacatcagcggcttcagcaagcagtacaactgtgccttcatctggcagaaggacggcgtgaagaagctgaacctgtacctgatcatcaactacttcaagggcggcaagctgcggttcaagaagatcaaacctgaagccttcgaagccaacagattctacaccgtgatcaacaaaaagagcggcgagatcgtgcccatggaggtgaacttcaacttcgacgaccccaacctgatcatcctgcctctggcctttggcaagagacagggcagagaattcatctggaacgacctgctgtccctggaaaccggcagcctgaagctggccaacggaagagtgatcgagaagacactgtacaacagaagaacccggcaggatgagcctgccctgttcgtggccctgaccttcgagcggcgggaggtcctggactcctccaatatcaaaccaatgaacctgatcggcgtggcaagaggcgaaaacatccccgccgtgatcgccctgaccgaccccgagggctgcccactgagccggtttaaggatagcctgggaaacccaacccacatcctgagaatcggcgagagctataaggagaagcagcggaccatccaggccaagaaggaggtggagcagcggagagccggcggctacagccggaagtacgccagcaaagccaagaatctggcagacgatatggtgagaaacaccgctagagatctgctgtactacgccgtgacccaggatgccatgctgatcttcgccaacctgagccggggcttcggccggcagggcaagcggaccttcatggccgagagacagtacacacggatggaggactggctgaccgccaagctggcctacgagggcctgagcaagacctacctgtccaagacactggcccagtacacctccaagacatgcagcaactgtgggtttaccatcaccagcgccgactacgacagggtgctggagaagctgaagaagacagcaacaggctggatgaccacaattaacggcaaggagctgaaggtggagggccagattacctactacaacagatacaagagacagaacgtagtcaaggacctgtccgtcgagctggatagactgagcgaagaatctgtgaacaacgacatctcctcctggacaaagggcagaagcggagaagctctgagcctcctgaagaaaagattctcccatagacccgtgcaggagaagttcgtgtgcctgaactgcggcttcgagacacacgcagccgagcaagccgccctgaacatcgccagatcctggctgttcctgcggagccaggagtacaagaaataccagacaaacaagacaaccggcaacaccgataagagagccttcgtcgagacctggcagtccttttaccggaagaagcttaaggaggtgtggaaacctgccgtgcggtctggcggatctggcggaggctcctaggcccgagagcgtgaccttcgaggacgtggccgtgtacttcagcgagaacgagtggatcggcctgggccccgcccagagggccctgtacagggacgtgatgctggagaactacggcgccgtggccagcctggccgccttccccttccccaagcccgccctgatcagccagctggagaggggcgaggccccctggtgcagcgtgccctggggcgccctggacggcgaggaccccaggagcatcggatctggctccggcagcggccccaagaaaaagagaaaagtctaagctgccttctgcggggcttgccttctggccatgcccttcttctctcccttgcacctgtacctcttggtctttgaataaagcctgagtaggaaggctagcaaaaaaaaaaaaaaaaaaaaaaaaaaaaaaaaaaaaaaaaaaaaaaaaaaaaaaaaaaaaaaaaaaaaaaaaaaaaaaaa

SEQ ID NO: 15484 - RNA, 9485 nt, synthetic construct
  source 1..9485: mol_type = other RNA
aggaaataagagagaaaagaagagtaagaagaaatataagagccaccatggcccctaagaagaagcgtaaagtgagccggatggaacgcctcgtctacgaggtgcggcagaagtgcagaaacatcgaggacatctgcatctcctgcggatctctgaacgtgaccctggagcacccactgttcatcggcggcatgtgccagaactgtaaaaactgttttctggagtgtgcctatcaatacgacgatgacggctaccagagctactgcaccatctgttgcggcggaagagaggtgctgatgtgtggaaataacaactgctgccggtgcttctgcgtggaatgcgtggacctgctggtgggccccggcgccgcccaggccgctattaaggaagatccttggaactgctacatgtgcggccacaagggcacatacggcctgctgagacggagagaggactggcctagcagactgcagatgttcttcgccaataaccacgaccaggagttcgacccccctaaggtgtaccctcccgtccccgccgagaagagaaagcccatccgggtcctgagcctgttcgatggcatcgccaccggtctgctggtgctgaaggacctgggcatccaggtggataggtacattgcctccgaggtgtgcgaggactccatcaccgtgggaatggtgcgtcatcagggcaagatcatgtacgtgggcgacgtgcggagcgtgacacagaagcatatccaggagtggggccctttcgacctggtgatcggcggcagcccttgcaatgacctgagcatcgtgaacccagcccggaagggcctgtacgagggaaccggcagactgttcttcgagttttacagactgctgcacgacgcccggcctaaggaaggcgacgaccggcccttcttttggctgttcgagaatgtggtggccatgggagtcagcgacaagcgggatattagccggttcctggagagcaaccccgtgatgatcgatgccaaggaagtgagcgccgcccaccgggccagatacttctggggcaatctgcctggcatgaacagacccctggccagcaccgtgaacgacaagctggagctgcaggagtgcctggagcacggccggatcgccaagttcagcaaggtgagaaccatcaccacccgaagcaacagcatcaaacaaggcaaggaccagcactttcctgtgttcatgaacgagaaggaggacatcctgtggtgtaccgagatggagagagtgttcgggttcccagtccactacacagatgtcagcaacatgtctagactggccagacagagactgctgggaagaagctggtccgtccctgtgatcagacacctgttcgcccctctgaaggagtacttcgcctgcgtgagcagcggcaacagcaacgccaacagccggggccccagcttctctagcggcctggtgccactgtccctgagagggagccacatgggccccatggagatctacaaaaccgtgagcgcctggaagcggcagcctgtgcgcgtgctgagcctgtttcggaatatcgataaagtcctgaaaagcctgggattcctggagagcggctctggctccggcggtggcaccctgaagtacgtggaggatgtgacaaacgtggtcagacgggatgtggagaagtggggccccttcgatctggtgtacggcagcacccaacccctgggcagctcttgtgaccggtgccctggctggtacatgtttcagttccaccggatcctgcagtacgccctgccgagacaggagtcccagcggccattcttttggattttcatggacaacttgctgctgaccgaggatgaccaggaaactaccactcggttcctgcagaccgaagccgtgaccctgcaggacgtgagaggccgggactaccagaacgccatgcgggtgtggtccaacatccctggactgaaaagcaagcacgcacctctgacccctaaagaagaggagtacctgcaggcccaggtgcggagcagaagcaagctggacgcccctaaggtggatctgctggtgaagaattgcctcctgcccctgagagagtacttcaagtatttcagccagaatagtctgcccctgggaggcagcggcggcggcgccctggtgacatttgaggacgtcgccgtgcggttcacccaggaggaatgggctctgctggatccttctcagaaaatcctgtaccgggacgtgatgagagagacataccggaatctgacctccgtgggcatcaactgggaatgttgggaccttgaagcctgcttcagaagcctgggaagaaacctgagagtgcaggtggtgaagagaaagtgcgagctgaccaacagcggcccctgcgccgagggcggcccaagcagcggcgcccctcctcccagcggcggcagcccagccggctccccaacctctaccgaggagggcacctctgagtccgccacccccgagagcggccctggcacctccaccgagcccagcgagggcagcgcacccggcagccctgccggcagccccacctccacagaggagggaaccagcaccgagcccagcgaaggcagcgccccaggcaccagcaccgagcctagtgagcaggagattaaacggatcaacaagatcagaagaagacttgtgaaagacagcaacaccaagaaggccggcaagacaggccccatgaaaaccctgctggttagagtgatgacacccgatctgagagagcggctggaaaacctgagaaagaagcctgaaaatatcccccagcccatcagcaatacatctagagccaacctgaataagctgctgaccgattacaccgaaatgaagaaggcgatcctgcatgtgtactgggaagagttccagaaggaccctgtgggcctgatgagccgggtggcccagcctgccagcaagaagatcgatcagaacaagctgaaacctgagatggacgagaagggcaacctgaccaccgccggctttgcctgctctcagtgtggccagcccctgttcgtgtacaagctggagcaggtgtctgagaagggcaaggcttacaccaactacttcggacggtgcaatgtggccgagcacgaaaagctgatcctgctggcccagctgaagcccgagaaggatagcgacgaagccgtgacatatagcctgggaaagtttgggcagagggccctggatttctacagcattcatgtgaccaaggagtccacccaccccgtgaagcccctggcccagatcgccggaaacagatacgcctccggacctgtgggaaaggccctgagcgacgcatgtatgggcacaatcgcctccttcctgtctaagtaccaggacatcatcatcgaacaccagaaggtggtgaagggcaaccagaagagactggagagcctgcgggagctggccggcaaggaaaacctggaataccctagcgtgaccctgccacctcagcctcacaccaaggagggcgttgatgcctacaacgaagtgatcgcccgggtgcgaatgtgggtgaacctgaacctgtggcagaagctgaagctaagcagagatgatgccaagcctctgctgagactgaagggattcccttcctttcctctggtcgagagacaggccaacgaagtggactggtgggacatggtgtgtaacgtgaagaagctgatcaacgagaaaaaggaggatggcaaggtgttttggcagaatctggctggctacaagagacaggaagccctgagaccatacctgagcagcgaggaagatcggaagaagggaaagaaattcgctcggtaccagctgggcgacctgctgctgcacctggaaaagaagcacggcgaggactggggaaaggtgtacgacgaggcctgggagcggattgacaagaaagtggaaggcctgagcaagcacatcaagctggaagaggaacggagaagcgaggacgcccagagcaaggccgccctgaccgactggctgcgggctaaggccagcttcgtgatcgagggcctgaaggaggccgacaaggacgagttctgcagatgcgagctgaagctgcagaagtggtacggggacctgcggggaaagcccttcgccatcgaagccgagaacagcatcctggacatcagcggcttcagcaagcagtacaactgtgccttcatctggcagaaggacggcgtgaagaagctgaacctgtacctgatcatcaactacttcaagggcggcaagctgcggttcaagaagatcaaacctgaagccttcgaagccaacagattctacaccgtgatcaacaaaaagagcggcgagatcgtgcccatggaggtgaacttcaacttcgacgaccccaacctgatcatcctgcctctggcctttggcaagagacagggcagagaattcatctggaacgacctgctgtccctggaaaccggcagcctgaagctggccaacggaagagtgatcgagaagacactgtacaacagaagaacccggcaggatgagcctgccctgttcgtggccctgaccttcgagcggcgggaggtcctggactcctccaatatcaaaccaatgaacctgatcggcgtggcaagaggcgaaaacatccccgccgtgatcgccctgaccgaccccgagggctgcccactgagccggtttaaggatagcctgggaaacccaacccacatcctgagaatcggcgagagctataaggagaagcagcggaccatccaggccaagaaggaggtggagcagcggagagccggcggctacagccggaagtacgccagcaaagccaagaatctggcagacgatatggtgagaaacaccgctagagatctgctgtactacgccgtgacccaggatgccatgctgatcttcgccaacctgagccggggcttcggccggcagggcaagcggaccttcatggccgagagacagtacacacggatggaggactggctgaccgccaagctggcctacgagggcctgagcaagacctacctgtccaagacactggcccagtacacctccaagacatgcagcaactgtgggtttaccatcaccagcgccgactacgacagggtgctggagaagctgaagaagacagcaacaggctggatgaccacaattaacggcaaggagctgaaggtggagggccagattacctactacaacagatacaagagacagaacgtagtcaaggacctgtccgtcgagctggatagactgagcgaagaatctgtgaacaacgacatctcctcctggacaaagggcagaagcggagaagctctgagcctcctgaagaaaagattctcccatagacccgtgcaggagaagttcgtgtgcctgaactgcggcttcgagacacacgcagccgagcaagccgccctgaacatcgccagatcctggctgttcctgcggagccaggagtacaagaaataccagacaaacaagacaaccggcaacaccgataagagagccttcgtcgagacctggcagtccttttaccggaagaagcttaaggaggtgtggaaacctgccgtgcggtctggcggatctggcggaggctccttccaggccagcgtgaccttcaaggacgtggccgtggacttcacctgggaggagtggaggctgctggaccccccccagaaggagctgttctgggaggtgatgctggagaactacaggaacctggtgtgcctgggcctggccgacagcaacaaggacgtgatgatgagcaagctggagagcggcgagccccactggatccccaccggcggcgtgctgaggagctgctggcccggctgggagagcggcggcccaagcagcggcgcccctcctcccagcggcggcagcccagccggctccccaacctctaccgaggagggcacctctgagtccgccacccccgagagcggccctggcacctccaccgagcccagcgagggcagcgcacccggcagccctgccggcagccccacctccacagaggagggaaccagcaccgagcccagcgaaggcagcgccccaggcaccagcaccgagcctagtgagcaggagattaaacggatcaacaagatcagaagaagacttgtgaaagacagcaacaccaagaaggccggcaagacaggccccatgaaaaccctgctggttagagtgatgacacccgatctgagagagcggctggaaaacctgagaaagaagcctgaaaatatcccccagcccatcagcaatacatctagagccaacctgaataagctgctgaccgattacaccgaaatgaagaaggcgatcctgcatgtgtactgggaagagttccagaaggaccctgtgggcctgatgagccgggtggcccagcctgccagcaagaagatcgatcagaacaagctgaaacctgagatggacgagaagggcaacctgaccaccgccggctttgcctgctctcagtgtggccagcccctgttcgtgtacaagctggagcaggtgtctgagaagggcaaggcttacaccaactacttcggacggtgcaatgtggccgagcacgaaaagctgatcctgctggcccagctgaagcccgagaaggatagcgacgaagccgtgacatatagcctgggaaagtttgggcagagggccctggatttctacagcattcatgtgaccaaggagtccacccaccccgtgaagcccctggcccagatcgccggaaacagatacgcctccggacctgtgggaaaggccctgagcgacgcatgtatgggcacaatcgcctccttcctgtctaagtaccaggacatcatcatcgaacaccagaaggtggtgaagggcaaccagaagagactggagagcctgcgggagctggccggcaaggaaaacctggaataccctagcgtgaccctgccacctcagcctcacaccaaggagggcgttgatgcctacaacgaagtgatcgcccgggtgcgaatgtgggtgaacctgaacctgtggcagaagctgaagctaagcagagatgatgccaagcctctgctgagactgaagggattcccttcctttcctctggtcgagagacaggccaacgaagtggactggtgggacatggtgtgtaacgtgaagaagctgatcaacgagaaaaaggaggatggcaaggtgttttggcagaatctggctggctacaagagacaggaagccctgagaccatacctgagcagcgaggaagatcggaagaagggaaagaaattcgctcggtaccagctgggcgacctgctgctgcacctggaaaagaagcacggcgaggactggggaaaggtgtacgacgaggcctgggagcggattgacaagaaagtggaaggcctgagcaagcacatcaagctggaagaggaacggagaagcgaggacgcccagagcaaggccgccctgaccgactggctgcgggctaaggccagcttcgtgatcgagggcctgaaggaggccgacaaggacgagttctgcagatgcgagctgaagctgcagaagtggtacggggacctgcggggaaagcccttcgccatcgaagccgagaacagcatcctggacatcagcggcttcagcaagcagtacaactgtgccttcatctggcagaaggacggcgtgaagaagctgaacctgtacctgatcatcaactacttcaagggcggcaagctgcggttcaagaagatcaaacctgaagccttcgaagccaacagattctacaccgtgatcaacaaaaagagcggcgagatcgtgcccatggaggtgaacttcaacttcgacgaccccaacctgatcatcctgcctctggcctttggcaagagacagggcagagaattcatctggaacgacctgctgtccctggaaaccggcagcctgaagctggccaacggaagagtgatcgagaagacactgtacaacagaagaacccggcaggatgagcctgccctgttcgtggccctgaccttcgagcggcgggaggtcctggactcctccaatatcaaaccaatgaacctgatcggcgtggcaagaggcgaaaacatccccgccgtgatcgccctgaccgaccccgagggctgcccactgagccggtttaaggatagcctgggaaacccaacccacatcctgagaatcggcgagagctataaggagaagcagcggaccatccaggccaagaaggaggtggagcagcggagagccggcggctacagccggaagtacgccagcaaagccaagaatctggcagacgatatggtgagaaacaccgctagagatctgctgtactacgccgtgacccaggatgccatgctgatcttcgccaacctgagccggggcttcggccggcagggcaagcggaccttcatggccgagagacagtacacacggatggaggactggctgaccgccaagctggcctacgagggcctgagcaagacctacctgtccaagacactggcccagtacacctccaagacatgcagcaactgtgggtttaccatcaccagcgccgactacgacagggtgctggagaagctgaagaagacagcaacaggctggatgaccacaattaacggcaaggagctgaaggtggagggccagattacctactacaacagatacaagagacagaacgtagtcaaggacctgtccgtcgagctggatagactgagcgaagaatctgtgaacaacgacatctcctcctggacaaagggcagaagcggagaagctctgagcctcctgaagaaaagattctcccatagacccgtgcaggagaagttcgtgtgcctgaactgcggcttcgagacacacgcagccgagcaagccgccctgaacatcgccagatcctggctgttcctgcggagccaggagtacaagaaataccagacaaacaagacaaccggcaacaccgataagagagccttcgtcgagacctggcagtccttttaccggaagaagcttaaggaggtgtggaaacctgccgtgcggtctggcggatctggcggaggctcctttccaggccagcgtgaccttcaaggacgtggccgtggacttcacctgggaggagtggaggctgctggaccccccccagaaggagctgttctgggaggtgatgctggagaactacaggaacctggtgtgcctgggcctggccgacagcaacaaggacgtgatgatgagcaagctggagagcggcgagccccactggatccccaccggcggcgtgctgaggagctgctggcccggctgggagagcggatctggctccggcagcggccccaagaaaaagagaaaagtctaagctgccttctgcggggcttgccttctggccatgcccttcttctctcccttgcacctgtacctcttggtctttgaataaagcctgagtaggaaggctagcaaaaaaaaaaaaaaaaaaaaaaaaaaaaaaaaaaaaaaaaaaaaaaaaaaaaaaaaaaaaaaaaaaaaaaaaaaaaaaaa

SEQ ID NO: 15485 - RNA, 9485 nt, synthetic construct
  source 1..9485: mol_type = other RNA
aggaaataagagagaaaagaagagtaagaagaaatataagagccaccatggcccctaagaagaagcgtaaagtgagccggatggaacgcctcgtctacgaggtgcggcagaagtgcagaaacatcgaggacatctgcatctcctgcggatctctgaacgtgaccctggagcacccactgttcatcggcggcatgtgccagaactgtaaaaactgttttctggagtgtgcctatcaatacgacgatgacggctaccagagctactgcaccatctgttgcggcggaagagaggtgctgatgtgtggaaataacaactgctgccggtgcttctgcgtggaatgcgtggacctgctggtgggccccggcgccgcccaggccgctattaaggaagatccttggaactgctacatgtgcggccacaagggcacatacggcctgctgagacggagagaggactggcctagcagactgcagatgttcttcgccaataaccacgaccaggagttcgacccccctaaggtgtaccctcccgtccccgccgagaagagaaagcccatccgggtcctgagcctgttcgatggcatcgccaccggtctgctggtgctgaaggacctgggcatccaggtggataggtacattgcctccgaggtgtgcgaggactccatcaccgtgggaatggtgcgtcatcagggcaagatcatgtacgtgggcgacgtgcggagcgtgacacagaagcatatccaggagtggggccctttcgacctggtgatcggcggcagcccttgcaatgacctgagcatcgtgaacccagcccggaagggcctgtacgagggaaccggcagactgttcttcgagttttacagactgctgcacgacgcccggcctaaggaaggcgacgaccggcccttcttttggctgttcgagaatgtggtggccatgggagtcagcgacaagcgggatattagccggttcctggagagcaaccccgtgatgatcgatgccaaggaagtgagcgccgcccaccgggccagatacttctggggcaatctgcctggcatgaacagacccctggccagcaccgtgaacgacaagctggagctgcaggagtgcctggagcacggccggatcgccaagttcagcaaggtgagaaccatcaccacccgaagcaacagcatcaaacaaggcaaggaccagcactttcctgtgttcatgaacgagaaggaggacatcctgtggtgtaccgagatggagagagtgttcgggttcccagtccactacacagatgtcagcaacatgtctagactggccagacagagactgctgggaagaagctggtccgtccctgtgatcagacacctgttcgcccctctgaaggagtacttcgcctgcgtgagcagcggcaacagcaacgccaacagccggggccccagcttctctagcggcctggtgccactgtccctgagagggagccacatgggccccatggagatctacaaaaccgtgagcgcctggaagcggcagcctgtgcgcgtgctgagcctgtttcggaatatcgataaagtcctgaaaagcctgggattcctggagagcggctctggctccggcggtggcaccctgaagtacgtggaggatgtgacaaacgtggtcagacgggatgtggagaagtggggccccttcgatctggtgtacggcagcacccaacccctgggcagctcttgtgaccggtgccctggctggtacatgtttcagttccaccggatcctgcagtacgccctgccgagacaggagtcccagcggccattcttttggattttcatggacaacttgctgctgaccgaggatgaccaggaaactaccactcggttcctgcagaccgaagccgtgaccctgcaggacgtgagaggccgggactaccagaacgccatgcgggtgtggtccaacatccctggactgaaaagcaagcacgcacctctgacccctaaagaagaggagtacctgcaggcccaggtgcggagcagaagcaagctggacgcccctaaggtggatctgctggtgaagaattgcctcctgcccctgagagagtacttcaagtatttcagccagaatagtctgcccctgggaggcagcggcggcggcgccctggtgacatttgaggacgtcgccgtgcggttcacccaggaggaatgggctctgctggatccttctcagaaaatcctgtaccgggacgtgatgagagagacataccggaatctgacctccgtgggcatcaactgggaatgttgggaccttgaagcctgcttcagaagcctgggaagaaacctgagagtgcaggtggtgaagagaaagtgcgagctgaccaacagcggcccctgcgccgagggcggcccaagcagcggcgcccctcctcccagcggcggcagcccagccggctccccaacctctaccgaggagggcacctctgagtccgccacccccgagagcggccctggcacctccaccgagcccagcgagggcagcgcacccggcagccctgccggcagccccacctccacagaggagggaaccagcaccgagcccagcgaaggcagcgccccaggcaccagcaccgagcctagtgagcaggagattaaacggatcaacaagatcagaagaagacttgtgaaagacagcaacaccaagaaggccggcaagacaggccccatgaaaaccctgctggttagagtgatgacacccgatctgagagagcggctggaaaacctgagaaagaagcctgaaaatatcccccagcccatcagcaatacatctagagccaacctgaataagctgctgaccgattacaccgaaatgaagaaggcgatcctgcatgtgtactgggaagagttccagaaggaccctgtgggcctgatgagccgggtggcccagcctgccagcaagaagatcgatcagaacaagctgaaacctgagatggacgagaagggcaacctgaccaccgccggctttgcctgctctcagtgtggccagcccctgttcgtgtacaagctggagcaggtgtctgagaagggcaaggcttacaccaactacttcggacggtgcaatgtggccgagcacgaaaagctgatcctgctggcccagctgaagcccgagaaggatagcgacgaagccgtgacatatagcctgggaaagtttgggcagagggccctggatttctacagcattcatgtgaccaaggagtccacccaccccgtgaagcccctggcccagatcgccggaaacagatacgcctccggacctgtgggaaaggccctgagcgacgcatgtatgggcacaatcgcctccttcctgtctaagtaccaggacatcatcatcgaacaccagaaggtggtgaagggcaaccagaagagactggagagcctgcgggagctggccggcaaggaaaacctggaataccctagcgtgaccctgccacctcagcctcacaccaaggagggcgttgatgcctacaacgaagtgatcgcccgggtgcgaatgtgggtgaacctgaacctgtggcagaagctgaagctaagcagagatgatgccaagcctctgctgagactgaagggattcccttcctttcctctggtcgagagacaggccaacgaagtggactggtgggacatggtgtgtaacgtgaagaagctgatcaacgagaaaaaggaggatggcaaggtgttttggcagaatctggctggctacaagagacaggaagccctgagaccatacctgagcagcgaggaagatcggaagaagggaaagaaattcgctcggtaccagctgggcgacctgctgctgcacctggaaaagaagcacggcgaggactggggaaaggtgtacgacgaggcctgggagcggattgacaagaaagtggaaggcctgagcaagcacatcaagctggaagaggaacggagaagcgaggacgcccagagcaaggccgccctgaccgactggctgcgggctaaggccagcttcgtgatcgagggcctgaaggaggccgacaaggacgagttctgcagatgcgagctgaagctgcagaagtggtacggggacctgcggggaaagcccttcgccatcgaagccgagaacagcatcctggacatcagcggcttcagcaagcagtacaactgtgccttcatctggcagaaggacggcgtgaagaagctgaacctgtacctgatcatcaactacttcaagggcggcaagctgcggttcaagaagatcaaacctgaagccttcgaagccaacagattctacaccgtgatcaacaaaaagagcggcgagatcgtgcccatggaggtgaacttcaacttcgacgaccccaacctgatcatcctgcctctggcctttggcaagagacagggcagagaattcatctggaacgacctgctgtccctggaaaccggcagcctgaagctggccaacggaagagtgatcgagaagacactgtacaacagaagaacccggcaggatgagcctgccctgttcgtggccctgaccttcgagcggcgggaggtcctggactcctccaatatcaaaccaatgaacctgatcggcgtggcaagaggcgaaaacatccccgccgtgatcgccctgaccgaccccgagggctgcccactgagccggtttaaggatagcctgggaaacccaacccacatcctgagaatcggcgagagctataaggagaagcagcggaccatccaggccaagaaggaggtggagcagcggagagccggcggctacagccggaagtacgccagcaaagccaagaatctggcagacgatatggtgagaaacaccgctagagatctgctgtactacgccgtgacccaggatgccatgctgatcttcgccaacctgagccggggcttcggccggcagggcaagcggaccttcatggccgagagacagtacacacggatggaggactggctgaccgccaagctggcctacgagggcctgagcaagacctacctgtccaagacactggcccagtacacctccaagacatgcagcaactgtgggtttaccatcaccagcgccgactacgacagggtgctggagaagctgaagaagacagcaacaggctggatgaccacaattaacggcaaggagctgaaggtggagggccagattacctactacaacagatacaagagacagaacgtagtcaaggacctgtccgtcgagctggatagactgagcgaagaatctgtgaacaacgacatctcctcctggacaaagggcagaagcggagaagctctgagcctcctgaagaaaagattctcccatagacccgtgcaggagaagttcgtgtgcctgaactgcggcttcgagacacacgcagccgagcaagccgccctgaacatcgccagatcctggctgttcctgcggagccaggagtacaagaaataccagacaaacaagacaaccggcaacaccgataagagagccttcgtcgagacctggcagtccttttaccggaagaagcttaaggaggtgtggaaacctgccgtgcggtctggcggatctggcggaggctccagccaggagagcgtgaccttccaggacgtgaccgtggacttcacccaggaggagtggtgcatgctggactgcagccagaagaagctgtacagggaggtgatgctggagaacgtgcagaacctgctgagcgtgggcctgcccgtgcccagggagaacctgctgagcagctgccagcagggcgacagcccctggctgctggagcagaagggcaccaggatcttcagggccgacgccgagatctgcggcggcccaagcagcggcgcccctcctcccagcggcggcagcccagccggctccccaacctctaccgaggagggcacctctgagtccgccacccccgagagcggccctggcacctccaccgagcccagcgagggcagcgcacccggcagccctgccggcagccccacctccacagaggagggaaccagcaccgagcccagcgaaggcagcgccccaggcaccagcaccgagcctagtgagcaggagattaaacggatcaacaagatcagaagaagacttgtgaaagacagcaacaccaagaaggccggcaagacaggccccatgaaaaccctgctggttagagtgatgacacccgatctgagagagcggctggaaaacctgagaaagaagcctgaaaatatcccccagcccatcagcaatacatctagagccaacctgaataagctgctgaccgattacaccgaaatgaagaaggcgatcctgcatgtgtactgggaagagttccagaaggaccctgtgggcctgatgagccgggtggcccagcctgccagcaagaagatcgatcagaacaagctgaaacctgagatggacgagaagggcaacctgaccaccgccggctttgcctgctctcagtgtggccagcccctgttcgtgtacaagctggagcaggtgtctgagaagggcaaggcttacaccaactacttcggacggtgcaatgtggccgagcacgaaaagctgatcctgctggcccagctgaagcccgagaaggatagcgacgaagccgtgacatatagcctgggaaagtttgggcagagggccctggatttctacagcattcatgtgaccaaggagtccacccaccccgtgaagcccctggcccagatcgccggaaacagatacgcctccggacctgtgggaaaggccctgagcgacgcatgtatgggcacaatcgcctccttcctgtctaagtaccaggacatcatcatcgaacaccagaaggtggtgaagggcaaccagaagagactggagagcctgcgggagctggccggcaaggaaaacctggaataccctagcgtgaccctgccacctcagcctcacaccaaggagggcgttgatgcctacaacgaagtgatcgcccgggtgcgaatgtgggtgaacctgaacctgtggcagaagctgaagctaagcagagatgatgccaagcctctgctgagactgaagggattcccttcctttcctctggtcgagagacaggccaacgaagtggactggtgggacatggtgtgtaacgtgaagaagctgatcaacgagaaaaaggaggatggcaaggtgttttggcagaatctggctggctacaagagacaggaagccctgagaccatacctgagcagcgaggaagatcggaagaagggaaagaaattcgctcggtaccagctgggcgacctgctgctgcacctggaaaagaagcacggcgaggactggggaaaggtgtacgacgaggcctgggagcggattgacaagaaagtggaaggcctgagcaagcacatcaagctggaagaggaacggagaagcgaggacgcccagagcaaggccgccctgaccgactggctgcgggctaaggccagcttcgtgatcgagggcctgaaggaggccgacaaggacgagttctgcagatgcgagctgaagctgcagaagtggtacggggacctgcggggaaagcccttcgccatcgaagccgagaacagcatcctggacatcagcggcttcagcaagcagtacaactgtgccttcatctggcagaaggacggcgtgaagaagctgaacctgtacctgatcatcaactacttcaagggcggcaagctgcggttcaagaagatcaaacctgaagccttcgaagccaacagattctacaccgtgatcaacaaaaagagcggcgagatcgtgcccatggaggtgaacttcaacttcgacgaccccaacctgatcatcctgcctctggcctttggcaagagacagggcagagaattcatctggaacgacctgctgtccctggaaaccggcagcctgaagctggccaacggaagagtgatcgagaagacactgtacaacagaagaacccggcaggatgagcctgccctgttcgtggccctgaccttcgagcggcgggaggtcctggactcctccaatatcaaaccaatgaacctgatcggcgtggcaagaggcgaaaacatccccgccgtgatcgccctgaccgaccccgagggctgcccactgagccggtttaaggatagcctgggaaacccaacccacatcctgagaatcggcgagagctataaggagaagcagcggaccatccaggccaagaaggaggtggagcagcggagagccggcggctacagccggaagtacgccagcaaagccaagaatctggcagacgatatggtgagaaacaccgctagagatctgctgtactacgccgtgacccaggatgccatgctgatcttcgccaacctgagccggggcttcggccggcagggcaagcggaccttcatggccgagagacagtacacacggatggaggactggctgaccgccaagctggcctacgagggcctgagcaagacctacctgtccaagacactggcccagtacacctccaagacatgcagcaactgtgggtttaccatcaccagcgccgactacgacagggtgctggagaagctgaagaagacagcaacaggctggatgaccacaattaacggcaaggagctgaaggtggagggccagattacctactacaacagatacaagagacagaacgtagtcaaggacctgtccgtcgagctggatagactgagcgaagaatctgtgaacaacgacatctcctcctggacaaagggcagaagcggagaagctctgagcctcctgaagaaaagattctcccatagacccgtgcaggagaagttcgtgtgcctgaactgcggcttcgagacacacgcagccgagcaagccgccctgaacatcgccagatcctggctgttcctgcggagccaggagtacaagaaataccagacaaacaagacaaccggcaacaccgataagagagccttcgtcgagacctggcagtccttttaccggaagaagcttaaggaggtgtggaaacctgccgtgcggtctggcggatctggcggaggctcctagccaggagagcgtgaccttccaggacgtgaccgtggacttcacccaggaggagtggtgcatgctggactgcagccagaagaagctgtacagggaggtgatgctggagaacgtgcagaacctgctgagcgtgggcctgcccgtgcccagggagaacctgctgagcagctgccagcagggcgacagcccctggctgctggagcagaagggcaccaggatcttcagggccgacgccgagatctgcggatctggctccggcagcggccccaagaaaaagagaaaagtctaagctgccttctgcggggcttgccttctggccatgcccttcttctctcccttgcacctgtacctcttggtctttgaataaagcctgagtaggaaggctagcaaaaaaaaaaaaaaaaaaaaaaaaaaaaaaaaaaaaaaaaaaaaaaaaaaaaaaaaaaaaaaaaaaaaaaaaaaaaaaaa

SEQ ID NO: 15486 - RNA, 9485 nt, synthetic construct
  source 1..9485: mol_type = other RNA
aggaaataagagagaaaagaagagtaagaagaaatataagagccaccatggcccctaagaagaagcgtaaagtgagccggatggaacgcctcgtctacgaggtgcggcagaagtgcagaaacatcgaggacatctgcatctcctgcggatctctgaacgtgaccctggagcacccactgttcatcggcggcatgtgccagaactgtaaaaactgttttctggagtgtgcctatcaatacgacgatgacggctaccagagctactgcaccatctgttgcggcggaagagaggtgctgatgtgtggaaataacaactgctgccggtgcttctgcgtggaatgcgtggacctgctggtgggccccggcgccgcccaggccgctattaaggaagatccttggaactgctacatgtgcggccacaagggcacatacggcctgctgagacggagagaggactggcctagcagactgcagatgttcttcgccaataaccacgaccaggagttcgacccccctaaggtgtaccctcccgtccccgccgagaagagaaagcccatccgggtcctgagcctgttcgatggcatcgccaccggtctgctggtgctgaaggacctgggcatccaggtggataggtacattgcctccgaggtgtgcgaggactccatcaccgtgggaatggtgcgtcatcagggcaagatcatgtacgtgggcgacgtgcggagcgtgacacagaagcatatccaggagtggggccctttcgacctggtgatcggcggcagcccttgcaatgacctgagcatcgtgaacccagcccggaagggcctgtacgagggaaccggcagactgttcttcgagttttacagactgctgcacgacgcccggcctaaggaaggcgacgaccggcccttcttttggctgttcgagaatgtggtggccatgggagtcagcgacaagcgggatattagccggttcctggagagcaaccccgtgatgatcgatgccaaggaagtgagcgccgcccaccgggccagatacttctggggcaatctgcctggcatgaacagacccctggccagcaccgtgaacgacaagctggagctgcaggagtgcctggagcacggccggatcgccaagttcagcaaggtgagaaccatcaccacccgaagcaacagcatcaaacaaggcaaggaccagcactttcctgtgttcatgaacgagaaggaggacatcctgtggtgtaccgagatggagagagtgttcgggttcccagtccactacacagatgtcagcaacatgtctagactggccagacagagactgctgggaagaagctggtccgtccctgtgatcagacacctgttcgcccctctgaaggagtacttcgcctgcgtgagcagcggcaacagcaacgccaacagccggggccccagcttctctagcggcctggtgccactgtccctgagagggagccacatgggccccatggagatctacaaaaccgtgagcgcctggaagcggcagcctgtgcgcgtgctgagcctgtttcggaatatcgataaagtcctgaaaagcctgggattcctggagagcggctctggctccggcggtggcaccctgaagtacgtggaggatgtgacaaacgtggtcagacgggatgtggagaagtggggccccttcgatctggtgtacggcagcacccaacccctgggcagctcttgtgaccggtgccctggctggtacatgtttcagttccaccggatcctgcagtacgccctgccgagacaggagtcccagcggccattcttttggattttcatggacaacttgctgctgaccgaggatgaccaggaaactaccactcggttcctgcagaccgaagccgtgaccctgcaggacgtgagaggccgggactaccagaacgccatgcgggtgtggtccaacatccctggactgaaaagcaagcacgcacctctgacccctaaagaagaggagtacctgcaggcccaggtgcggagcagaagcaagctggacgcccctaaggtggatctgctggtgaagaattgcctcctgcccctgagagagtacttcaagtatttcagccagaatagtctgcccctgggaggcagcggcggcggcgccctggtgacatttgaggacgtcgccgtgcggttcacccaggaggaatgggctctgctggatccttctcagaaaatcctgtaccgggacgtgatgagagagacataccggaatctgacctccgtgggcatcaactgggaatgttgggaccttgaagcctgcttcagaagcctgggaagaaacctgagagtgcaggtggtgaagagaaagtgcgagctgaccaacagcggcccctgcgccgagggcggcccaagcagcggcgcccctcctcccagcggcggcagcccagccggctccccaacctctaccgaggagggcacctctgagtccgccacccccgagagcggccctggcacctccaccgagcccagcgagggcagcgcacccggcagccctgccggcagccccacctccacagaggagggaaccagcaccgagcccagcgaaggcagcgccccaggcaccagcaccgagcctagtgagcaggagattaaacggatcaacaagatcagaagaagacttgtgaaagacagcaacaccaagaaggccggcaagacaggccccatgaaaaccctgctggttagagtgatgacacccgatctgagagagcggctggaaaacctgagaaagaagcctgaaaatatcccccagcccatcagcaatacatctagagccaacctgaataagctgctgaccgattacaccgaaatgaagaaggcgatcctgcatgtgtactgggaagagttccagaaggaccctgtgggcctgatgagccgggtggcccagcctgccagcaagaagatcgatcagaacaagctgaaacctgagatggacgagaagggcaacctgaccaccgccggctttgcctgctctcagtgtggccagcccctgttcgtgtacaagctggagcaggtgtctgagaagggcaaggcttacaccaactacttcggacggtgcaatgtggccgagcacgaaaagctgatcctgctggcccagctgaagcccgagaaggatagcgacgaagccgtgacatatagcctgggaaagtttgggcagagggccctggatttctacagcattcatgtgaccaaggagtccacccaccccgtgaagcccctggcccagatcgccggaaacagatacgcctccggacctgtgggaaaggccctgagcgacgcatgtatgggcacaatcgcctccttcctgtctaagtaccaggacatcatcatcgaacaccagaaggtggtgaagggcaaccagaagagactggagagcctgcgggagctggccggcaaggaaaacctggaataccctagcgtgaccctgccacctcagcctcacaccaaggagggcgttgatgcctacaacgaagtgatcgcccgggtgcgaatgtgggtgaacctgaacctgtggcagaagctgaagctaagcagagatgatgccaagcctctgctgagactgaagggattcccttcctttcctctggtcgagagacaggccaacgaagtggactggtgggacatggtgtgtaacgtgaagaagctgatcaacgagaaaaaggaggatggcaaggtgttttggcagaatctggctggctacaagagacaggaagccctgagaccatacctgagcagcgaggaagatcggaagaagggaaagaaattcgctcggtaccagctgggcgacctgctgctgcacctggaaaagaagcacggcgaggactggggaaaggtgtacgacgaggcctgggagcggattgacaagaaagtggaaggcctgagcaagcacatcaagctggaagaggaacggagaagcgaggacgcccagagcaaggccgccctgaccgactggctgcgggctaaggccagcttcgtgatcgagggcctgaaggaggccgacaaggacgagttctgcagatgcgagctgaagctgcagaagtggtacggggacctgcggggaaagcccttcgccatcgaagccgagaacagcatcctggacatcagcggcttcagcaagcagtacaactgtgccttcatctggcagaaggacggcgtgaagaagctgaacctgtacctgatcatcaactacttcaagggcggcaagctgcggttcaagaagatcaaacctgaagccttcgaagccaacagattctacaccgtgatcaacaaaaagagcggcgagatcgtgcccatggaggtgaacttcaacttcgacgaccccaacctgatcatcctgcctctggcctttggcaagagacagggcagagaattcatctggaacgacctgctgtccctggaaaccggcagcctgaagctggccaacggaagagtgatcgagaagacactgtacaacagaagaacccggcaggatgagcctgccctgttcgtggccctgaccttcgagcggcgggaggtcctggactcctccaatatcaaaccaatgaacctgatcggcgtggcaagaggcgaaaacatccccgccgtgatcgccctgaccgaccccgagggctgcccactgagccggtttaaggatagcctgggaaacccaacccacatcctgagaatcggcgagagctataaggagaagcagcggaccatccaggccaagaaggaggtggagcagcggagagccggcggctacagccggaagtacgccagcaaagccaagaatctggcagacgatatggtgagaaacaccgctagagatctgctgtactacgccgtgacccaggatgccatgctgatcttcgccaacctgagccggggcttcggccggcagggcaagcggaccttcatggccgagagacagtacacacggatggaggactggctgaccgccaagctggcctacgagggcctgagcaagacctacctgtccaagacactggcccagtacacctccaagacatgcagcaactgtgggtttaccatcaccagcgccgactacgacagggtgctggagaagctgaagaagacagcaacaggctggatgaccacaattaacggcaaggagctgaaggtggagggccagattacctactacaacagatacaagagacagaacgtagtcaaggacctgtccgtcgagctggatagactgagcgaagaatctgtgaacaacgacatctcctcctggacaaagggcagaagcggagaagctctgagcctcctgaagaaaagattctcccatagacccgtgcaggagaagttcgtgtgcctgaactgcggcttcgagacacacgcagccgagcaagccgccctgaacatcgccagatcctggctgttcctgcggagccaggagtacaagaaataccagacaaacaagacaaccggcaacaccgataagagagccttcgtcgagacctggcagtccttttaccggaagaagcttaaggaggtgtggaaacctgccgtgcggtctggcggatctggcggaggctccctgcaggagcccgtgagcttcgaggaggtggccgtgtacttcagcagggaggagtgggccctgctggaccccgcccagagggccctgtacagggacgtgatgctggagacctacgagtgcgtggccagcctggcccccctgcccgcccccaagcccatggtgatcagcctgctggaggagggcgaggagccctgggtgcccgacgtgggcagccccgaggccgtggccggcgacgtgagccccggcggcccaagcagcggcgcccctcctcccagcggcggcagcccagccggctccccaacctctaccgaggagggcacctctgagtccgccacccccgagagcggccctggcacctccaccgagcccagcgagggcagcgcacccggcagccctgccggcagccccacctccacagaggagggaaccagcaccgagcccagcgaaggcagcgccccaggcaccagcaccgagcctagtgagcaggagattaaacggatcaacaagatcagaagaagacttgtgaaagacagcaacaccaagaaggccggcaagacaggccccatgaaaaccctgctggttagagtgatgacacccgatctgagagagcggctggaaaacctgagaaagaagcctgaaaatatcccccagcccatcagcaatacatctagagccaacctgaataagctgctgaccgattacaccgaaatgaagaaggcgatcctgcatgtgtactgggaagagttccagaaggaccctgtgggcctgatgagccgggtggcccagcctgccagcaagaagatcgatcagaacaagctgaaacctgagatggacgagaagggcaacctgaccaccgccggctttgcctgctctcagtgtggccagcccctgttcgtgtacaagctggagcaggtgtctgagaagggcaaggcttacaccaactacttcggacggtgcaatgtggccgagcacgaaaagctgatcctgctggcccagctgaagcccgagaaggatagcgacgaagccgtgacatatagcctgggaaagtttgggcagagggccctggatttctacagcattcatgtgaccaaggagtccacccaccccgtgaagcccctggcccagatcgccggaaacagatacgcctccggacctgtgggaaaggccctgagcgacgcatgtatgggcacaatcgcctccttcctgtctaagtaccaggacatcatcatcgaacaccagaaggtggtgaagggcaaccagaagagactggagagcctgcgggagctggccggcaaggaaaacctggaataccctagcgtgaccctgccacctcagcctcacaccaaggagggcgttgatgcctacaacgaagtgatcgcccgggtgcgaatgtgggtgaacctgaacctgtggcagaagctgaagctaagcagagatgatgccaagcctctgctgagactgaagggattcccttcctttcctctggtcgagagacaggccaacgaagtggactggtgggacatggtgtgtaacgtgaagaagctgatcaacgagaaaaaggaggatggcaaggtgttttggcagaatctggctggctacaagagacaggaagccctgagaccatacctgagcagcgaggaagatcggaagaagggaaagaaattcgctcggtaccagctgggcgacctgctgctgcacctggaaaagaagcacggcgaggactggggaaaggtgtacgacgaggcctgggagcggattgacaagaaagtggaaggcctgagcaagcacatcaagctggaagaggaacggagaagcgaggacgcccagagcaaggccgccctgaccgactggctgcgggctaaggccagcttcgtgatcgagggcctgaaggaggccgacaaggacgagttctgcagatgcgagctgaagctgcagaagtggtacggggacctgcggggaaagcccttcgccatcgaagccgagaacagcatcctggacatcagcggcttcagcaagcagtacaactgtgccttcatctggcagaaggacggcgtgaagaagctgaacctgtacctgatcatcaactacttcaagggcggcaagctgcggttcaagaagatcaaacctgaagccttcgaagccaacagattctacaccgtgatcaacaaaaagagcggcgagatcgtgcccatggaggtgaacttcaacttcgacgaccccaacctgatcatcctgcctctggcctttggcaagagacagggcagagaattcatctggaacgacctgctgtccctggaaaccggcagcctgaagctggccaacggaagagtgatcgagaagacactgtacaacagaagaacccggcaggatgagcctgccctgttcgtggccctgaccttcgagcggcgggaggtcctggactcctccaatatcaaaccaatgaacctgatcggcgtggcaagaggcgaaaacatccccgccgtgatcgccctgaccgaccccgagggctgcccactgagccggtttaaggatagcctgggaaacccaacccacatcctgagaatcggcgagagctataaggagaagcagcggaccatccaggccaagaaggaggtggagcagcggagagccggcggctacagccggaagtacgccagcaaagccaagaatctggcagacgatatggtgagaaacaccgctagagatctgctgtactacgccgtgacccaggatgccatgctgatcttcgccaacctgagccggggcttcggccggcagggcaagcggaccttcatggccgagagacagtacacacggatggaggactggctgaccgccaagctggcctacgagggcctgagcaagacctacctgtccaagacactggcccagtacacctccaagacatgcagcaactgtgggtttaccatcaccagcgccgactacgacagggtgctggagaagctgaagaagacagcaacaggctggatgaccacaattaacggcaaggagctgaaggtggagggccagattacctactacaacagatacaagagacagaacgtagtcaaggacctgtccgtcgagctggatagactgagcgaagaatctgtgaacaacgacatctcctcctggacaaagggcagaagcggagaagctctgagcctcctgaagaaaagattctcccatagacccgtgcaggagaagttcgtgtgcctgaactgcggcttcgagacacacgcagccgagcaagccgccctgaacatcgccagatcctggctgttcctgcggagccaggagtacaagaaataccagacaaacaagacaaccggcaacaccgataagagagccttcgtcgagacctggcagtccttttaccggaagaagcttaaggaggtgtggaaacctgccgtgcggtctggcggatctggcggaggctcctctgcaggagcccgtgagcttcgaggaggtggccgtgtacttcagcagggaggagtgggccctgctggaccccgcccagagggccctgtacagggacgtgatgctggagacctacgagtgcgtggccagcctggcccccctgcccgcccccaagcccatggtgatcagcctgctggaggagggcgaggagccctgggtgcccgacgtgggcagccccgaggccgtggccggcgacgtgagccccggatctggctccggcagcggccccaagaaaaagagaaaagtctaagctgccttctgcggggcttgccttctggccatgcccttcttctctcccttgcacctgtacctcttggtctttgaataaagcctgagtaggaaggctagcaaaaaaaaaaaaaaaaaaaaaaaaaaaaaaaaaaaaaaaaaaaaaaaaaaaaaaaaaaaaaaaaaaaaaaaaaaaaaaaa

SEQ ID NO: 15487 - RNA, 9485 nt, synthetic construct
  source 1..9485: mol_type = other RNA
aggaaataagagagaaaagaagagtaagaagaaatataagagccaccatggcccctaagaagaagcgtaaagtgagccggatggaacgcctcgtctacgaggtgcggcagaagtgcagaaacatcgaggacatctgcatctcctgcggatctctgaacgtgaccctggagcacccactgttcatcggcggcatgtgccagaactgtaaaaactgttttctggagtgtgcctatcaatacgacgatgacggctaccagagctactgcaccatctgttgcggcggaagagaggtgctgatgtgtggaaataacaactgctgccggtgcttctgcgtggaatgcgtggacctgctggtgggccccggcgccgcccaggccgctattaaggaagatccttggaactgctacatgtgcggccacaagggcacatacggcctgctgagacggagagaggactggcctagcagactgcagatgttcttcgccaataaccacgaccaggagttcgacccccctaaggtgtaccctcccgtccccgccgagaagagaaagcccatccgggtcctgagcctgttcgatggcatcgccaccggtctgctggtgctgaaggacctgggcatccaggtggataggtacattgcctccgaggtgtgcgaggactccatcaccgtgggaatggtgcgtcatcagggcaagatcatgtacgtgggcgacgtgcggagcgtgacacagaagcatatccaggagtggggccctttcgacctggtgatcggcggcagcccttgcaatgacctgagcatcgtgaacccagcccggaagggcctgtacgagggaaccggcagactgttcttcgagttttacagactgctgcacgacgcccggcctaaggaaggcgacgaccggcccttcttttggctgttcgagaatgtggtggccatgggagtcagcgacaagcgggatattagccggttcctggagagcaaccccgtgatgatcgatgccaaggaagtgagcgccgcccaccgggccagatacttctggggcaatctgcctggcatgaacagacccctggccagcaccgtgaacgacaagctggagctgcaggagtgcctggagcacggccggatcgccaagttcagcaaggtgagaaccatcaccacccgaagcaacagcatcaaacaaggcaaggaccagcactttcctgtgttcatgaacgagaaggaggacatcctgtggtgtaccgagatggagagagtgttcgggttcccagtccactacacagatgtcagcaacatgtctagactggccagacagagactgctgggaagaagctggtccgtccctgtgatcagacacctgttcgcccctctgaaggagtacttcgcctgcgtgagcagcggcaacagcaacgccaacagccggggccccagcttctctagcggcctggtgccactgtccctgagagggagccacatgggccccatggagatctacaaaaccgtgagcgcctggaagcggcagcctgtgcgcgtgctgagcctgtttcggaatatcgataaagtcctgaaaagcctgggattcctggagagcggctctggctccggcggtggcaccctgaagtacgtggaggatgtgacaaacgtggtcagacgggatgtggagaagtggggccccttcgatctggtgtacggcagcacccaacccctgggcagctcttgtgaccggtgccctggctggtacatgtttcagttccaccggatcctgcagtacgccctgccgagacaggagtcccagcggccattcttttggattttcatggacaacttgctgctgaccgaggatgaccaggaaactaccactcggttcctgcagaccgaagccgtgaccctgcaggacgtgagaggccgggactaccagaacgccatgcgggtgtggtccaacatccctggactgaaaagcaagcacgcacctctgacccctaaagaagaggagtacctgcaggcccaggtgcggagcagaagcaagctggacgcccctaaggtggatctgctggtgaagaattgcctcctgcccctgagagagtacttcaagtatttcagccagaatagtctgcccctgggaggcagcggcggcggcgccctggtgacatttgaggacgtcgccgtgcggttcacccaggaggaatgggctctgctggatccttctcagaaaatcctgtaccgggacgtgatgagagagacataccggaatctgacctccgtgggcatcaactgggaatgttgggaccttgaagcctgcttcagaagcctgggaagaaacctgagagtgcaggtggtgaagagaaagtgcgagctgaccaacagcggcccctgcgccgagggcggcccaagcagcggcgcccctcctcccagcggcggcagcccagccggctccccaacctctaccgaggagggcacctctgagtccgccacccccgagagcggccctggcacctccaccgagcccagcgagggcagcgcacccggcagccctgccggcagccccacctccacagaggagggaaccagcaccgagcccagcgaaggcagcgccccaggcaccagcaccgagcctagtgagcaggagattaaacggatcaacaagatcagaagaagacttgtgaaagacagcaacaccaagaaggccggcaagacaggccccatgaaaaccctgctggttagagtgatgacacccgatctgagagagcggctggaaaacctgagaaagaagcctgaaaatatcccccagcccatcagcaatacatctagagccaacctgaataagctgctgaccgattacaccgaaatgaagaaggcgatcctgcatgtgtactgggaagagttccagaaggaccctgtgggcctgatgagccgggtggcccagcctgccagcaagaagatcgatcagaacaagctgaaacctgagatggacgagaagggcaacctgaccaccgccggctttgcctgctctcagtgtggccagcccctgttcgtgtacaagctggagcaggtgtctgagaagggcaaggcttacaccaactacttcggacggtgcaatgtggccgagcacgaaaagctgatcctgctggcccagctgaagcccgagaaggatagcgacgaagccgtgacatatagcctgggaaagtttgggcagagggccctggatttctacagcattcatgtgaccaaggagtccacccaccccgtgaagcccctggcccagatcgccggaaacagatacgcctccggacctgtgggaaaggccctgagcgacgcatgtatgggcacaatcgcctccttcctgtctaagtaccaggacatcatcatcgaacaccagaaggtggtgaagggcaaccagaagagactggagagcctgcgggagctggccggcaaggaaaacctggaataccctagcgtgaccctgccacctcagcctcacaccaaggagggcgttgatgcctacaacgaagtgatcgcccgggtgcgaatgtgggtgaacctgaacctgtggcagaagctgaagctaagcagagatgatgccaagcctctgctgagactgaagggattcccttcctttcctctggtcgagagacaggccaacgaagtggactggtgggacatggtgtgtaacgtgaagaagctgatcaacgagaaaaaggaggatggcaaggtgttttggcagaatctggctggctacaagagacaggaagccctgagaccatacctgagcagcgaggaagatcggaagaagggaaagaaattcgctcggtaccagctgggcgacctgctgctgcacctggaaaagaagcacggcgaggactggggaaaggtgtacgacgaggcctgggagcggattgacaagaaagtggaaggcctgagcaagcacatcaagctggaagaggaacggagaagcgaggacgcccagagcaaggccgccctgaccgactggctgcgggctaaggccagcttcgtgatcgagggcctgaaggaggccgacaaggacgagttctgcagatgcgagctgaagctgcagaagtggtacggggacctgcggggaaagcccttcgccatcgaagccgagaacagcatcctggacatcagcggcttcagcaagcagtacaactgtgccttcatctggcagaaggacggcgtgaagaagctgaacctgtacctgatcatcaactacttcaagggcggcaagctgcggttcaagaagatcaaacctgaagccttcgaagccaacagattctacaccgtgatcaacaaaaagagcggcgagatcgtgcccatggaggtgaacttcaacttcgacgaccccaacctgatcatcctgcctctggcctttggcaagagacagggcagagaattcatctggaacgacctgctgtccctggaaaccggcagcctgaagctggccaacggaagagtgatcgagaagacactgtacaacagaagaacccggcaggatgagcctgccctgttcgtggccctgaccttcgagcggcgggaggtcctggactcctccaatatcaaaccaatgaacctgatcggcgtggcaagaggcgaaaacatccccgccgtgatcgccctgaccgaccccgagggctgcccactgagccggtttaaggatagcctgggaaacccaacccacatcctgagaatcggcgagagctataaggagaagcagcggaccatccaggccaagaaggaggtggagcagcggagagccggcggctacagccggaagtacgccagcaaagccaagaatctggcagacgatatggtgagaaacaccgctagagatctgctgtactacgccgtgacccaggatgccatgctgatcttcgccaacctgagccggggcttcggccggcagggcaagcggaccttcatggccgagagacagtacacacggatggaggactggctgaccgccaagctggcctacgagggcctgagcaagacctacctgtccaagacactggcccagtacacctccaagacatgcagcaactgtgggtttaccatcaccagcgccgactacgacagggtgctggagaagctgaagaagacagcaacaggctggatgaccacaattaacggcaaggagctgaaggtggagggccagattacctactacaacagatacaagagacagaacgtagtcaaggacctgtccgtcgagctggatagactgagcgaagaatctgtgaacaacgacatctcctcctggacaaagggcagaagcggagaagctctgagcctcctgaagaaaagattctcccatagacccgtgcaggagaagttcgtgtgcctgaactgcggcttcgagacacacgcagccgagcaagccgccctgaacatcgccagatcctggctgttcctgcggagccaggagtacaagaaataccagacaaacaagacaaccggcaacaccgataagagagccttcgtcgagacctggcagtccttttaccggaagaagcttaaggaggtgtggaaacctgccgtgcggtctggcggatctggcggaggctccagccaggagctgctgaccttcaaggacatcttcgtggacttcacccaggaggagtggggccagctggcccccgcccacaggaacctgtacagggaggtgatgctggagaactacggcaacctggtgagcgtgggctaccagctgagcaagcccggcgtgatcagccagctggagaagggcgaggagccctggctgatcgagagggagatcagcggcagccccagcagcgacctggagaacaagggcggcccaagcagcggcgcccctcctcccagcggcggcagcccagccggctccccaacctctaccgaggagggcacctctgagtccgccacccccgagagcggccctggcacctccaccgagcccagcgagggcagcgcacccggcagccctgccggcagccccacctccacagaggagggaaccagcaccgagcccagcgaaggcagcgccccaggcaccagcaccgagcctagtgagcaggagattaaacggatcaacaagatcagaagaagacttgtgaaagacagcaacaccaagaaggccggcaagacaggccccatgaaaaccctgctggttagagtgatgacacccgatctgagagagcggctggaaaacctgagaaagaagcctgaaaatatcccccagcccatcagcaatacatctagagccaacctgaataagctgctgaccgattacaccgaaatgaagaaggcgatcctgcatgtgtactgggaagagttccagaaggaccctgtgggcctgatgagccgggtggcccagcctgccagcaagaagatcgatcagaacaagctgaaacctgagatggacgagaagggcaacctgaccaccgccggctttgcctgctctcagtgtggccagcccctgttcgtgtacaagctggagcaggtgtctgagaagggcaaggcttacaccaactacttcggacggtgcaatgtggccgagcacgaaaagctgatcctgctggcccagctgaagcccgagaaggatagcgacgaagccgtgacatatagcctgggaaagtttgggcagagggccctggatttctacagcattcatgtgaccaaggagtccacccaccccgtgaagcccctggcccagatcgccggaaacagatacgcctccggacctgtgggaaaggccctgagcgacgcatgtatgggcacaatcgcctccttcctgtctaagtaccaggacatcatcatcgaacaccagaaggtggtgaagggcaaccagaagagactggagagcctgcgggagctggccggcaaggaaaacctggaataccctagcgtgaccctgccacctcagcctcacaccaaggagggcgttgatgcctacaacgaagtgatcgcccgggtgcgaatgtgggtgaacctgaacctgtggcagaagctgaagctaagcagagatgatgccaagcctctgctgagactgaagggattcccttcctttcctctggtcgagagacaggccaacgaagtggactggtgggacatggtgtgtaacgtgaagaagctgatcaacgagaaaaaggaggatggcaaggtgttttggcagaatctggctggctacaagagacaggaagccctgagaccatacctgagcagcgaggaagatcggaagaagggaaagaaattcgctcggtaccagctgggcgacctgctgctgcacctggaaaagaagcacggcgaggactggggaaaggtgtacgacgaggcctgggagcggattgacaagaaagtggaaggcctgagcaagcacatcaagctggaagaggaacggagaagcgaggacgcccagagcaaggccgccctgaccgactggctgcgggctaaggccagcttcgtgatcgagggcctgaaggaggccgacaaggacgagttctgcagatgcgagctgaagctgcagaagtggtacggggacctgcggggaaagcccttcgccatcgaagccgagaacagcatcctggacatcagcggcttcagcaagcagtacaactgtgccttcatctggcagaaggacggcgtgaagaagctgaacctgtacctgatcatcaactacttcaagggcggcaagctgcggttcaagaagatcaaacctgaagccttcgaagccaacagattctacaccgtgatcaacaaaaagagcggcgagatcgtgcccatggaggtgaacttcaacttcgacgaccccaacctgatcatcctgcctctggcctttggcaagagacagggcagagaattcatctggaacgacctgctgtccctggaaaccggcagcctgaagctggccaacggaagagtgatcgagaagacactgtacaacagaagaacccggcaggatgagcctgccctgttcgtggccctgaccttcgagcggcgggaggtcctggactcctccaatatcaaaccaatgaacctgatcggcgtggcaagaggcgaaaacatccccgccgtgatcgccctgaccgaccccgagggctgcccactgagccggtttaaggatagcctgggaaacccaacccacatcctgagaatcggcgagagctataaggagaagcagcggaccatccaggccaagaaggaggtggagcagcggagagccggcggctacagccggaagtacgccagcaaagccaagaatctggcagacgatatggtgagaaacaccgctagagatctgctgtactacgccgtgacccaggatgccatgctgatcttcgccaacctgagccggggcttcggccggcagggcaagcggaccttcatggccgagagacagtacacacggatggaggactggctgaccgccaagctggcctacgagggcctgagcaagacctacctgtccaagacactggcccagtacacctccaagacatgcagcaactgtgggtttaccatcaccagcgccgactacgacagggtgctggagaagctgaagaagacagcaacaggctggatgaccacaattaacggcaaggagctgaaggtggagggccagattacctactacaacagatacaagagacagaacgtagtcaaggacctgtccgtcgagctggatagactgagcgaagaatctgtgaacaacgacatctcctcctggacaaagggcagaagcggagaagctctgagcctcctgaagaaaagattctcccatagacccgtgcaggagaagttcgtgtgcctgaactgcggcttcgagacacacgcagccgagcaagccgccctgaacatcgccagatcctggctgttcctgcggagccaggagtacaagaaataccagacaaacaagacaaccggcaacaccgataagagagccttcgtcgagacctggcagtccttttaccggaagaagcttaaggaggtgtggaaacctgccgtgcggtctggcggatctggcggaggctcctagccaggagctgctgaccttcaaggacatcttcgtggacttcacccaggaggagtggggccagctggcccccgcccacaggaacctgtacagggaggtgatgctggagaactacggcaacctggtgagcgtgggctaccagctgagcaagcccggcgtgatcagccagctggagaagggcgaggagccctggctgatcgagagggagatcagcggcagccccagcagcgacctggagaacaagggatctggctccggcagcggccccaagaaaaagagaaaagtctaagctgccttctgcggggcttgccttctggccatgcccttcttctctcccttgcacctgtacctcttggtctttgaataaagcctgagtaggaaggctagcaaaaaaaaaaaaaaaaaaaaaaaaaaaaaaaaaaaaaaaaaaaaaaaaaaaaaaaaaaaaaaaaaaaaaaaaaaaaaaaa

SEQ ID NO: 15488 - RNA, 9485 nt, synthetic construct
  source 1..9485: mol_type = other RNA
aggaaataagagagaaaagaagagtaagaagaaatataagagccaccatggcccctaagaagaagcgtaaagtgagccggatggaacgcctcgtctacgaggtgcggcagaagtgcagaaacatcgaggacatctgcatctcctgcggatctctgaacgtgaccctggagcacccactgttcatcggcggcatgtgccagaactgtaaaaactgttttctggagtgtgcctatcaatacgacgatgacggctaccagagctactgcaccatctgttgcggcggaagagaggtgctgatgtgtggaaataacaactgctgccggtgcttctgcgtggaatgcgtggacctgctggtgggccccggcgccgcccaggccgctattaaggaagatccttggaactgctacatgtgcggccacaagggcacatacggcctgctgagacggagagaggactggcctagcagactgcagatgttcttcgccaataaccacgaccaggagttcgacccccctaaggtgtaccctcccgtccccgccgagaagagaaagcccatccgggtcctgagcctgttcgatggcatcgccaccggtctgctggtgctgaaggacctgggcatccaggtggataggtacattgcctccgaggtgtgcgaggactccatcaccgtgggaatggtgcgtcatcagggcaagatcatgtacgtgggcgacgtgcggagcgtgacacagaagcatatccaggagtggggccctttcgacctggtgatcggcggcagcccttgcaatgacctgagcatcgtgaacccagcccggaagggcctgtacgagggaaccggcagactgttcttcgagttttacagactgctgcacgacgcccggcctaaggaaggcgacgaccggcccttcttttggctgttcgagaatgtggtggccatgggagtcagcgacaagcgggatattagccggttcctggagagcaaccccgtgatgatcgatgccaaggaagtgagcgccgcccaccgggccagatacttctggggcaatctgcctggcatgaacagacccctggccagcaccgtgaacgacaagctggagctgcaggagtgcctggagcacggccggatcgccaagttcagcaaggtgagaaccatcaccacccgaagcaacagcatcaaacaaggcaaggaccagcactttcctgtgttcatgaacgagaaggaggacatcctgtggtgtaccgagatggagagagtgttcgggttcccagtccactacacagatgtcagcaacatgtctagactggccagacagagactgctgggaagaagctggtccgtccctgtgatcagacacctgttcgcccctctgaaggagtacttcgcctgcgtgagcagcggcaacagcaacgccaacagccggggccccagcttctctagcggcctggtgccactgtccctgagagggagccacatgggccccatggagatctacaaaaccgtgagcgcctggaagcggcagcctgtgcgcgtgctgagcctgtttcggaatatcgataaagtcctgaaaagcctgggattcctggagagcggctctggctccggcggtggcaccctgaagtacgtggaggatgtgacaaacgtggtcagacgggatgtggagaagtggggccccttcgatctggtgtacggcagcacccaacccctgggcagctcttgtgaccggtgccctggctggtacatgtttcagttccaccggatcctgcagtacgccctgccgagacaggagtcccagcggccattcttttggattttcatggacaacttgctgctgaccgaggatgaccaggaaactaccactcggttcctgcagaccgaagccgtgaccctgcaggacgtgagaggccgggactaccagaacgccatgcgggtgtggtccaacatccctggactgaaaagcaagcacgcacctctgacccctaaagaagaggagtacctgcaggcccaggtgcggagcagaagcaagctggacgcccctaaggtggatctgctggtgaagaattgcctcctgcccctgagagagtacttcaagtatttcagccagaatagtctgcccctgggaggcagcggcggcggcgccctggtgacatttgaggacgtcgccgtgcggttcacccaggaggaatgggctctgctggatccttctcagaaaatcctgtaccgggacgtgatgagagagacataccggaatctgacctccgtgggcatcaactgggaatgttgggaccttgaagcctgcttcagaagcctgggaagaaacctgagagtgcaggtggtgaagagaaagtgcgagctgaccaacagcggcccctgcgccgagggcggcccaagcagcggcgcccctcctcccagcggcggcagcccagccggctccccaacctctaccgaggagggcacctctgagtccgccacccccgagagcggccctggcacctccaccgagcccagcgagggcagcgcacccggcagccctgccggcagccccacctccacagaggagggaaccagcaccgagcccagcgaaggcagcgccccaggcaccagcaccgagcctagtgagcaggagattaaacggatcaacaagatcagaagaagacttgtgaaagacagcaacaccaagaaggccggcaagacaggccccatgaaaaccctgctggttagagtgatgacacccgatctgagagagcggctggaaaacctgagaaagaagcctgaaaatatcccccagcccatcagcaatacatctagagccaacctgaataagctgctgaccgattacaccgaaatgaagaaggcgatcctgcatgtgtactgggaagagttccagaaggaccctgtgggcctgatgagccgggtggcccagcctgccagcaagaagatcgatcagaacaagctgaaacctgagatggacgagaagggcaacctgaccaccgccggctttgcctgctctcagtgtggccagcccctgttcgtgtacaagctggagcaggtgtctgagaagggcaaggcttacaccaactacttcggacggtgcaatgtggccgagcacgaaaagctgatcctgctggcccagctgaagcccgagaaggatagcgacgaagccgtgacatatagcctgggaaagtttgggcagagggccctggatttctacagcattcatgtgaccaaggagtccacccaccccgtgaagcccctggcccagatcgccggaaacagatacgcctccggacctgtgggaaaggccctgagcgacgcatgtatgggcacaatcgcctccttcctgtctaagtaccaggacatcatcatcgaacaccagaaggtggtgaagggcaaccagaagagactggagagcctgcgggagctggccggcaaggaaaacctggaataccctagcgtgaccctgccacctcagcctcacaccaaggagggcgttgatgcctacaacgaagtgatcgcccgggtgcgaatgtgggtgaacctgaacctgtggcagaagctgaagctaagcagagatgatgccaagcctctgctgagactgaagggattcccttcctttcctctggtcgagagacaggccaacgaagtggactggtgggacatggtgtgtaacgtgaagaagctgatcaacgagaaaaaggaggatggcaaggtgttttggcagaatctggctggctacaagagacaggaagccctgagaccatacctgagcagcgaggaagatcggaagaagggaaagaaattcgctcggtaccagctgggcgacctgctgctgcacctggaaaagaagcacggcgaggactggggaaaggtgtacgacgaggcctgggagcggattgacaagaaagtggaaggcctgagcaagcacatcaagctggaagaggaacggagaagcgaggacgcccagagcaaggccgccctgaccgactggctgcgggctaaggccagcttcgtgatcgagggcctgaaggaggccgacaaggacgagttctgcagatgcgagctgaagctgcagaagtggtacggggacctgcggggaaagcccttcgccatcgaagccgagaacagcatcctggacatcagcggcttcagcaagcagtacaactgtgccttcatctggcagaaggacggcgtgaagaagctgaacctgtacctgatcatcaactacttcaagggcggcaagctgcggttcaagaagatcaaacctgaagccttcgaagccaacagattctacaccgtgatcaacaaaaagagcggcgagatcgtgcccatggaggtgaacttcaacttcgacgaccccaacctgatcatcctgcctctggcctttggcaagagacagggcagagaattcatctggaacgacctgctgtccctggaaaccggcagcctgaagctggccaacggaagagtgatcgagaagacactgtacaacagaagaacccggcaggatgagcctgccctgttcgtggccctgaccttcgagcggcgggaggtcctggactcctccaatatcaaaccaatgaacctgatcggcgtggcaagaggcgaaaacatccccgccgtgatcgccctgaccgaccccgagggctgcccactgagccggtttaaggatagcctgggaaacccaacccacatcctgagaatcggcgagagctataaggagaagcagcggaccatccaggccaagaaggaggtggagcagcggagagccggcggctacagccggaagtacgccagcaaagccaagaatctggcagacgatatggtgagaaacaccgctagagatctgctgtactacgccgtgacccaggatgccatgctgatcttcgccaacctgagccggggcttcggccggcagggcaagcggaccttcatggccgagagacagtacacacggatggaggactggctgaccgccaagctggcctacgagggcctgagcaagacctacctgtccaagacactggcccagtacacctccaagacatgcagcaactgtgggtttaccatcaccagcgccgactacgacagggtgctggagaagctgaagaagacagcaacaggctggatgaccacaattaacggcaaggagctgaaggtggagggccagattacctactacaacagatacaagagacagaacgtagtcaaggacctgtccgtcgagctggatagactgagcgaagaatctgtgaacaacgacatctcctcctggacaaagggcagaagcggagaagctctgagcctcctgaagaaaagattctcccatagacccgtgcaggagaagttcgtgtgcctgaactgcggcttcgagacacacgcagccgagcaagccgccctgaacatcgccagatcctggctgttcctgcggagccaggagtacaagaaataccagacaaacaagacaaccggcaacaccgataagagagccttcgtcgagacctggcagtccttttaccggaagaagcttaaggaggtgtggaaacctgccgtgcggtctggcggatctggcggaggctccccccagaagagcgtgaccttcgaggacgtggccgtgtacttcacccagaccgagtgggacggcctgagccccgcccagagggccctgtacagggacgtgatgctggagaactacggcaacgtggccagcctgggcttcagcctgctgaagcccgccgtgatcagccagctggagggcgccggcgagctggagggccccagccccctggtggccggcaccgagatcggcccccagggcctgtggggcggcccaagcagcggcgcccctcctcccagcggcggcagcccagccggctccccaacctctaccgaggagggcacctctgagtccgccacccccgagagcggccctggcacctccaccgagcccagcgagggcagcgcacccggcagccctgccggcagccccacctccacagaggagggaaccagcaccgagcccagcgaaggcagcgccccaggcaccagcaccgagcctagtgagcaggagattaaacggatcaacaagatcagaagaagacttgtgaaagacagcaacaccaagaaggccggcaagacaggccccatgaaaaccctgctggttagagtgatgacacccgatctgagagagcggctggaaaacctgagaaagaagcctgaaaatatcccccagcccatcagcaatacatctagagccaacctgaataagctgctgaccgattacaccgaaatgaagaaggcgatcctgcatgtgtactgggaagagttccagaaggaccctgtgggcctgatgagccgggtggcccagcctgccagcaagaagatcgatcagaacaagctgaaacctgagatggacgagaagggcaacctgaccaccgccggctttgcctgctctcagtgtggccagcccctgttcgtgtacaagctggagcaggtgtctgagaagggcaaggcttacaccaactacttcggacggtgcaatgtggccgagcacgaaaagctgatcctgctggcccagctgaagcccgagaaggatagcgacgaagccgtgacatatagcctgggaaagtttgggcagagggccctggatttctacagcattcatgtgaccaaggagtccacccaccccgtgaagcccctggcccagatcgccggaaacagatacgcctccggacctgtgggaaaggccctgagcgacgcatgtatgggcacaatcgcctccttcctgtctaagtaccaggacatcatcatcgaacaccagaaggtggtgaagggcaaccagaagagactggagagcctgcgggagctggccggcaaggaaaacctggaataccctagcgtgaccctgccacctcagcctcacaccaaggagggcgttgatgcctacaacgaagtgatcgcccgggtgcgaatgtgggtgaacctgaacctgtggcagaagctgaagctaagcagagatgatgccaagcctctgctgagactgaagggattcccttcctttcctctggtcgagagacaggccaacgaagtggactggtgggacatggtgtgtaacgtgaagaagctgatcaacgagaaaaaggaggatggcaaggtgttttggcagaatctggctggctacaagagacaggaagccctgagaccatacctgagcagcgaggaagatcggaagaagggaaagaaattcgctcggtaccagctgggcgacctgctgctgcacctggaaaagaagcacggcgaggactggggaaaggtgtacgacgaggcctgggagcggattgacaagaaagtggaaggcctgagcaagcacatcaagctggaagaggaacggagaagcgaggacgcccagagcaaggccgccctgaccgactggctgcgggctaaggccagcttcgtgatcgagggcctgaaggaggccgacaaggacgagttctgcagatgcgagctgaagctgcagaagtggtacggggacctgcggggaaagcccttcgccatcgaagccgagaacagcatcctggacatcagcggcttcagcaagcagtacaactgtgccttcatctggcagaaggacggcgtgaagaagctgaacctgtacctgatcatcaactacttcaagggcggcaagctgcggttcaagaagatcaaacctgaagccttcgaagccaacagattctacaccgtgatcaacaaaaagagcggcgagatcgtgcccatggaggtgaacttcaacttcgacgaccccaacctgatcatcctgcctctggcctttggcaagagacagggcagagaattcatctggaacgacctgctgtccctggaaaccggcagcctgaagctggccaacggaagagtgatcgagaagacactgtacaacagaagaacccggcaggatgagcctgccctgttcgtggccctgaccttcgagcggcgggaggtcctggactcctccaatatcaaaccaatgaacctgatcggcgtggcaagaggcgaaaacatccccgccgtgatcgccctgaccgaccccgagggctgcccactgagccggtttaaggatagcctgggaaacccaacccacatcctgagaatcggcgagagctataaggagaagcagcggaccatccaggccaagaaggaggtggagcagcggagagccggcggctacagccggaagtacgccagcaaagccaagaatctggcagacgatatggtgagaaacaccgctagagatctgctgtactacgccgtgacccaggatgccatgctgatcttcgccaacctgagccggggcttcggccggcagggcaagcggaccttcatggccgagagacagtacacacggatggaggactggctgaccgccaagctggcctacgagggcctgagcaagacctacctgtccaagacactggcccagtacacctccaagacatgcagcaactgtgggtttaccatcaccagcgccgactacgacagggtgctggagaagctgaagaagacagcaacaggctggatgaccacaattaacggcaaggagctgaaggtggagggccagattacctactacaacagatacaagagacagaacgtagtcaaggacctgtccgtcgagctggatagactgagcgaagaatctgtgaacaacgacatctcctcctggacaaagggcagaagcggagaagctctgagcctcctgaagaaaagattctcccatagacccgtgcaggagaagttcgtgtgcctgaactgcggcttcgagacacacgcagccgagcaagccgccctgaacatcgccagatcctggctgttcctgcggagccaggagtacaagaaataccagacaaacaagacaaccggcaacaccgataagagagccttcgtcgagacctggcagtccttttaccggaagaagcttaaggaggtgtggaaacctgccgtgcggtctggcggatctggcggaggctcctccccagaagagcgtgaccttcgaggacgtggccgtgtacttcacccagaccgagtgggacggcctgagccccgcccagagggccctgtacagggacgtgatgctggagaactacggcaacgtggccagcctgggcttcagcctgctgaagcccgccgtgatcagccagctggagggcgccggcgagctggagggccccagccccctggtggccggcaccgagatcggcccccagggcctgtggggatctggctccggcagcggccccaagaaaaagagaaaagtctaagctgccttctgcggggcttgccttctggccatgcccttcttctctcccttgcacctgtacctcttggtctttgaataaagcctgagtaggaaggctagcaaaaaaaaaaaaaaaaaaaaaaaaaaaaaaaaaaaaaaaaaaaaaaaaaaaaaaaaaaaaaaaaaaaaaaaaaaaaaaaa

SEQ ID NO: 15489 - RNA, 9485 nt, synthetic construct
  source 1..9485: mol_type = other RNA
aggaaataagagagaaaagaagagtaagaagaaatataagagccaccatggcccctaagaagaagcgtaaagtgagccggatggaacgcctcgtctacgaggtgcggcagaagtgcagaaacatcgaggacatctgcatctcctgcggatctctgaacgtgaccctggagcacccactgttcatcggcggcatgtgccagaactgtaaaaactgttttctggagtgtgcctatcaatacgacgatgacggctaccagagctactgcaccatctgttgcggcggaagagaggtgctgatgtgtggaaataacaactgctgccggtgcttctgcgtggaatgcgtggacctgctggtgggccccggcgccgcccaggccgctattaaggaagatccttggaactgctacatgtgcggccacaagggcacatacggcctgctgagacggagagaggactggcctagcagactgcagatgttcttcgccaataaccacgaccaggagttcgacccccctaaggtgtaccctcccgtccccgccgagaagagaaagcccatccgggtcctgagcctgttcgatggcatcgccaccggtctgctggtgctgaaggacctgggcatccaggtggataggtacattgcctccgaggtgtgcgaggactccatcaccgtgggaatggtgcgtcatcagggcaagatcatgtacgtgggcgacgtgcggagcgtgacacagaagcatatccaggagtggggccctttcgacctggtgatcggcggcagcccttgcaatgacctgagcatcgtgaacccagcccggaagggcctgtacgagggaaccggcagactgttcttcgagttttacagactgctgcacgacgcccggcctaaggaaggcgacgaccggcccttcttttggctgttcgagaatgtggtggccatgggagtcagcgacaagcgggatattagccggttcctggagagcaaccccgtgatgatcgatgccaaggaagtgagcgccgcccaccgggccagatacttctggggcaatctgcctggcatgaacagacccctggccagcaccgtgaacgacaagctggagctgcaggagtgcctggagcacggccggatcgccaagttcagcaaggtgagaaccatcaccacccgaagcaacagcatcaaacaaggcaaggaccagcactttcctgtgttcatgaacgagaaggaggacatcctgtggtgtaccgagatggagagagtgttcgggttcccagtccactacacagatgtcagcaacatgtctagactggccagacagagactgctgggaagaagctggtccgtccctgtgatcagacacctgttcgcccctctgaaggagtacttcgcctgcgtgagcagcggcaacagcaacgccaacagccggggccccagcttctctagcggcctggtgccactgtccctgagagggagccacatgggccccatggagatctacaaaaccgtgagcgcctggaagcggcagcctgtgcgcgtgctgagcctgtttcggaatatcgataaagtcctgaaaagcctgggattcctggagagcggctctggctccggcggtggcaccctgaagtacgtggaggatgtgacaaacgtggtcagacgggatgtggagaagtggggccccttcgatctggtgtacggcagcacccaacccctgggcagctcttgtgaccggtgccctggctggtacatgtttcagttccaccggatcctgcagtacgccctgccgagacaggagtcccagcggccattcttttggattttcatggacaacttgctgctgaccgaggatgaccaggaaactaccactcggttcctgcagaccgaagccgtgaccctgcaggacgtgagaggccgggactaccagaacgccatgcgggtgtggtccaacatccctggactgaaaagcaagcacgcacctctgacccctaaagaagaggagtacctgcaggcccaggtgcggagcagaagcaagctggacgcccctaaggtggatctgctggtgaagaattgcctcctgcccctgagagagtacttcaagtatttcagccagaatagtctgcccctgggaggcagcggcggcggcgccctggtgacatttgaggacgtcgccgtgcggttcacccaggaggaatgggctctgctggatccttctcagaaaatcctgtaccgggacgtgatgagagagacataccggaatctgacctccgtgggcatcaactgggaatgttgggaccttgaagcctgcttcagaagcctgggaagaaacctgagagtgcaggtggtgaagagaaagtgcgagctgaccaacagcggcccctgcgccgagggcggcccaagcagcggcgcccctcctcccagcggcggcagcccagccggctccccaacctctaccgaggagggcacctctgagtccgccacccccgagagcggccctggcacctccaccgagcccagcgagggcagcgcacccggcagccctgccggcagccccacctccacagaggagggaaccagcaccgagcccagcgaaggcagcgccccaggcaccagcaccgagcctagtgagcaggagattaaacggatcaacaagatcagaagaagacttgtgaaagacagcaacaccaagaaggccggcaagacaggccccatgaaaaccctgctggttagagtgatgacacccgatctgagagagcggctggaaaacctgagaaagaagcctgaaaatatcccccagcccatcagcaatacatctagagccaacctgaataagctgctgaccgattacaccgaaatgaagaaggcgatcctgcatgtgtactgggaagagttccagaaggaccctgtgggcctgatgagccgggtggcccagcctgccagcaagaagatcgatcagaacaagctgaaacctgagatggacgagaagggcaacctgaccaccgccggctttgcctgctctcagtgtggccagcccctgttcgtgtacaagctggagcaggtgtctgagaagggcaaggcttacaccaactacttcggacggtgcaatgtggccgagcacgaaaagctgatcctgctggcccagctgaagcccgagaaggatagcgacgaagccgtgacatatagcctgggaaagtttgggcagagggccctggatttctacagcattcatgtgaccaaggagtccacccaccccgtgaagcccctggcccagatcgccggaaacagatacgcctccggacctgtgggaaaggccctgagcgacgcatgtatgggcacaatcgcctccttcctgtctaagtaccaggacatcatcatcgaacaccagaaggtggtgaagggcaaccagaagagactggagagcctgcgggagctggccggcaaggaaaacctggaataccctagcgtgaccctgccacctcagcctcacaccaaggagggcgttgatgcctacaacgaagtgatcgcccgggtgcgaatgtgggtgaacctgaacctgtggcagaagctgaagctaagcagagatgatgccaagcctctgctgagactgaagggattcccttcctttcctctggtcgagagacaggccaacgaagtggactggtgggacatggtgtgtaacgtgaagaagctgatcaacgagaaaaaggaggatggcaaggtgttttggcagaatctggctggctacaagagacaggaagccctgagaccatacctgagcagcgaggaagatcggaagaagggaaagaaattcgctcggtaccagctgggcgacctgctgctgcacctggaaaagaagcacggcgaggactggggaaaggtgtacgacgaggcctgggagcggattgacaagaaagtggaaggcctgagcaagcacatcaagctggaagaggaacggagaagcgaggacgcccagagcaaggccgccctgaccgactggctgcgggctaaggccagcttcgtgatcgagggcctgaaggaggccgacaaggacgagttctgcagatgcgagctgaagctgcagaagtggtacggggacctgcggggaaagcccttcgccatcgaagccgagaacagcatcctggacatcagcggcttcagcaagcagtacaactgtgccttcatctggcagaaggacggcgtgaagaagctgaacctgtacctgatcatcaactacttcaagggcggcaagctgcggttcaagaagatcaaacctgaagccttcgaagccaacagattctacaccgtgatcaacaaaaagagcggcgagatcgtgcccatggaggtgaacttcaacttcgacgaccccaacctgatcatcctgcctctggcctttggcaagagacagggcagagaattcatctggaacgacctgctgtccctggaaaccggcagcctgaagctggccaacggaagagtgatcgagaagacactgtacaacagaagaacccggcaggatgagcctgccctgttcgtggccctgaccttcgagcggcgggaggtcctggactcctccaatatcaaaccaatgaacctgatcggcgtggcaagaggcgaaaacatccccgccgtgatcgccctgaccgaccccgagggctgcccactgagccggtttaaggatagcctgggaaacccaacccacatcctgagaatcggcgagagctataaggagaagcagcggaccatccaggccaagaaggaggtggagcagcggagagccggcggctacagccggaagtacgccagcaaagccaagaatctggcagacgatatggtgagaaacaccgctagagatctgctgtactacgccgtgacccaggatgccatgctgatcttcgccaacctgagccggggcttcggccggcagggcaagcggaccttcatggccgagagacagtacacacggatggaggactggctgaccgccaagctggcctacgagggcctgagcaagacctacctgtccaagacactggcccagtacacctccaagacatgcagcaactgtgggtttaccatcaccagcgccgactacgacagggtgctggagaagctgaagaagacagcaacaggctggatgaccacaattaacggcaaggagctgaaggtggagggccagattacctactacaacagatacaagagacagaacgtagtcaaggacctgtccgtcgagctggatagactgagcgaagaatctgtgaacaacgacatctcctcctggacaaagggcagaagcggagaagctctgagcctcctgaagaaaagattctcccatagacccgtgcaggagaagttcgtgtgcctgaactgcggcttcgagacacacgcagccgagcaagccgccctgaacatcgccagatcctggctgttcctgcggagccaggagtacaagaaataccagacaaacaagacaaccggcaacaccgataagagagccttcgtcgagacctggcagtccttttaccggaagaagcttaaggaggtgtggaaacctgccgtgcggtctggcggatctggcggaggctccagccagaaggccctgaccttccaggacgtggccgtggagttcacccaggaggagtggggcctgctggagcccgcccagaagaacatgcacagggacgtgatgctggagaactacgagaacttcgtgagcctgggcctgcccgtgcccaagagcgccctgatcttccacctggagaggagggagaccccctggctgcccagcggcgaggtgctgaggaacacctaccccgactacctggtgcagggcggcccaagcagcggcgcccctcctcccagcggcggcagcccagccggctccccaacctctaccgaggagggcacctctgagtccgccacccccgagagcggccctggcacctccaccgagcccagcgagggcagcgcacccggcagccctgccggcagccccacctccacagaggagggaaccagcaccgagcccagcgaaggcagcgccccaggcaccagcaccgagcctagtgagcaggagattaaacggatcaacaagatcagaagaagacttgtgaaagacagcaacaccaagaaggccggcaagacaggccccatgaaaaccctgctggttagagtgatgacacccgatctgagagagcggctggaaaacctgagaaagaagcctgaaaatatcccccagcccatcagcaatacatctagagccaacctgaataagctgctgaccgattacaccgaaatgaagaaggcgatcctgcatgtgtactgggaagagttccagaaggaccctgtgggcctgatgagccgggtggcccagcctgccagcaagaagatcgatcagaacaagctgaaacctgagatggacgagaagggcaacctgaccaccgccggctttgcctgctctcagtgtggccagcccctgttcgtgtacaagctggagcaggtgtctgagaagggcaaggcttacaccaactacttcggacggtgcaatgtggccgagcacgaaaagctgatcctgctggcccagctgaagcccgagaaggatagcgacgaagccgtgacatatagcctgggaaagtttgggcagagggccctggatttctacagcattcatgtgaccaaggagtccacccaccccgtgaagcccctggcccagatcgccggaaacagatacgcctccggacctgtgggaaaggccctgagcgacgcatgtatgggcacaatcgcctccttcctgtctaagtaccaggacatcatcatcgaacaccagaaggtggtgaagggcaaccagaagagactggagagcctgcgggagctggccggcaaggaaaacctggaataccctagcgtgaccctgccacctcagcctcacaccaaggagggcgttgatgcctacaacgaagtgatcgcccgggtgcgaatgtgggtgaacctgaacctgtggcagaagctgaagctaagcagagatgatgccaagcctctgctgagactgaagggattcccttcctttcctctggtcgagagacaggccaacgaagtggactggtgggacatggtgtgtaacgtgaagaagctgatcaacgagaaaaaggaggatggcaaggtgttttggcagaatctggctggctacaagagacaggaagccctgagaccatacctgagcagcgaggaagatcggaagaagggaaagaaattcgctcggtaccagctgggcgacctgctgctgcacctggaaaagaagcacggcgaggactggggaaaggtgtacgacgaggcctgggagcggattgacaagaaagtggaaggcctgagcaagcacatcaagctggaagaggaacggagaagcgaggacgcccagagcaaggccgccctgaccgactggctgcgggctaaggccagcttcgtgatcgagggcctgaaggaggccgacaaggacgagttctgcagatgcgagctgaagctgcagaagtggtacggggacctgcggggaaagcccttcgccatcgaagccgagaacagcatcctggacatcagcggcttcagcaagcagtacaactgtgccttcatctggcagaaggacggcgtgaagaagctgaacctgtacctgatcatcaactacttcaagggcggcaagctgcggttcaagaagatcaaacctgaagccttcgaagccaacagattctacaccgtgatcaacaaaaagagcggcgagatcgtgcccatggaggtgaacttcaacttcgacgaccccaacctgatcatcctgcctctggcctttggcaagagacagggcagagaattcatctggaacgacctgctgtccctggaaaccggcagcctgaagctggccaacggaagagtgatcgagaagacactgtacaacagaagaacccggcaggatgagcctgccctgttcgtggccctgaccttcgagcggcgggaggtcctggactcctccaatatcaaaccaatgaacctgatcggcgtggcaagaggcgaaaacatccccgccgtgatcgccctgaccgaccccgagggctgcccactgagccggtttaaggatagcctgggaaacccaacccacatcctgagaatcggcgagagctataaggagaagcagcggaccatccaggccaagaaggaggtggagcagcggagagccggcggctacagccggaagtacgccagcaaagccaagaatctggcagacgatatggtgagaaacaccgctagagatctgctgtactacgccgtgacccaggatgccatgctgatcttcgccaacctgagccggggcttcggccggcagggcaagcggaccttcatggccgagagacagtacacacggatggaggactggctgaccgccaagctggcctacgagggcctgagcaagacctacctgtccaagacactggcccagtacacctccaagacatgcagcaactgtgggtttaccatcaccagcgccgactacgacagggtgctggagaagctgaagaagacagcaacaggctggatgaccacaattaacggcaaggagctgaaggtggagggccagattacctactacaacagatacaagagacagaacgtagtcaaggacctgtccgtcgagctggatagactgagcgaagaatctgtgaacaacgacatctcctcctggacaaagggcagaagcggagaagctctgagcctcctgaagaaaagattctcccatagacccgtgcaggagaagttcgtgtgcctgaactgcggcttcgagacacacgcagccgagcaagccgccctgaacatcgccagatcctggctgttcctgcggagccaggagtacaagaaataccagacaaacaagacaaccggcaacaccgataagagagccttcgtcgagacctggcagtccttttaccggaagaagcttaaggaggtgtggaaacctgccgtgcggtctggcggatctggcggaggctcctagccagaaggccctgaccttccaggacgtggccgtggagttcacccaggaggagtggggcctgctggagcccgcccagaagaacatgcacagggacgtgatgctggagaactacgagaacttcgtgagcctgggcctgcccgtgcccaagagcgccctgatcttccacctggagaggagggagaccccctggctgcccagcggcgaggtgctgaggaacacctaccccgactacctggtgcagggatctggctccggcagcggccccaagaaaaagagaaaagtctaagctgccttctgcggggcttgccttctggccatgcccttcttctctcccttgcacctgtacctcttggtctttgaataaagcctgagtaggaaggctagcaaaaaaaaaaaaaaaaaaaaaaaaaaaaaaaaaaaaaaaaaaaaaaaaaaaaaaaaaaaaaaaaaaaaaaaaaaaaaaaa

SEQ ID NO: 15490 - RNA, 9485 nt, synthetic construct
  source 1..9485: mol_type = other RNA
aggaaataagagagaaaagaagagtaagaagaaatataagagccaccatggcccctaagaagaagcgtaaagtgagccggatggaacgcctcgtctacgaggtgcggcagaagtgcagaaacatcgaggacatctgcatctcctgcggatctctgaacgtgaccctggagcacccactgttcatcggcggcatgtgccagaactgtaaaaactgttttctggagtgtgcctatcaatacgacgatgacggctaccagagctactgcaccatctgttgcggcggaagagaggtgctgatgtgtggaaataacaactgctgccggtgcttctgcgtggaatgcgtggacctgctggtgggccccggcgccgcccaggccgctattaaggaagatccttggaactgctacatgtgcggccacaagggcacatacggcctgctgagacggagagaggactggcctagcagactgcagatgttcttcgccaataaccacgaccaggagttcgacccccctaaggtgtaccctcccgtccccgccgagaagagaaagcccatccgggtcctgagcctgttcgatggcatcgccaccggtctgctggtgctgaaggacctgggcatccaggtggataggtacattgcctccgaggtgtgcgaggactccatcaccgtgggaatggtgcgtcatcagggcaagatcatgtacgtgggcgacgtgcggagcgtgacacagaagcatatccaggagtggggccctttcgacctggtgatcggcggcagcccttgcaatgacctgagcatcgtgaacccagcccggaagggcctgtacgagggaaccggcagactgttcttcgagttttacagactgctgcacgacgcccggcctaaggaaggcgacgaccggcccttcttttggctgttcgagaatgtggtggccatgggagtcagcgacaagcgggatattagccggttcctggagagcaaccccgtgatgatcgatgccaaggaagtgagcgccgcccaccgggccagatacttctggggcaatctgcctggcatgaacagacccctggccagcaccgtgaacgacaagctggagctgcaggagtgcctggagcacggccggatcgccaagttcagcaaggtgagaaccatcaccacccgaagcaacagcatcaaacaaggcaaggaccagcactttcctgtgttcatgaacgagaaggaggacatcctgtggtgtaccgagatggagagagtgttcgggttcccagtccactacacagatgtcagcaacatgtctagactggccagacagagactgctgggaagaagctggtccgtccctgtgatcagacacctgttcgcccctctgaaggagtacttcgcctgcgtgagcagcggcaacagcaacgccaacagccggggccccagcttctctagcggcctggtgccactgtccctgagagggagccacatgggccccatggagatctacaaaaccgtgagcgcctggaagcggcagcctgtgcgcgtgctgagcctgtttcggaatatcgataaagtcctgaaaagcctgggattcctggagagcggctctggctccggcggtggcaccctgaagtacgtggaggatgtgacaaacgtggtcagacgggatgtggagaagtggggccccttcgatctggtgtacggcagcacccaacccctgggcagctcttgtgaccggtgccctggctggtacatgtttcagttccaccggatcctgcagtacgccctgccgagacaggagtcccagcggccattcttttggattttcatggacaacttgctgctgaccgaggatgaccaggaaactaccactcggttcctgcagaccgaagccgtgaccctgcaggacgtgagaggccgggactaccagaacgccatgcgggtgtggtccaacatccctggactgaaaagcaagcacgcacctctgacccctaaagaagaggagtacctgcaggcccaggtgcggagcagaagcaagctggacgcccctaaggtggatctgctggtgaagaattgcctcctgcccctgagagagtacttcaagtatttcagccagaatagtctgcccctgggaggcagcggcggcggcgccctggtgacatttgaggacgtcgccgtgcggttcacccaggaggaatgggctctgctggatccttctcagaaaatcctgtaccgggacgtgatgagagagacataccggaatctgacctccgtgggcatcaactgggaatgttgggaccttgaagcctgcttcagaagcctgggaagaaacctgagagtgcaggtggtgaagagaaagtgcgagctgaccaacagcggcccctgcgccgagggcggcccaagcagcggcgcccctcctcccagcggcggcagcccagccggctccccaacctctaccgaggagggcacctctgagtccgccacccccgagagcggccctggcacctccaccgagcccagcgagggcagcgcacccggcagccctgccggcagccccacctccacagaggagggaaccagcaccgagcccagcgaaggcagcgccccaggcaccagcaccgagcctagtgagcaggagattaaacggatcaacaagatcagaagaagacttgtgaaagacagcaacaccaagaaggccggcaagacaggccccatgaaaaccctgctggttagagtgatgacacccgatctgagagagcggctggaaaacctgagaaagaagcctgaaaatatcccccagcccatcagcaatacatctagagccaacctgaataagctgctgaccgattacaccgaaatgaagaaggcgatcctgcatgtgtactgggaagagttccagaaggaccctgtgggcctgatgagccgggtggcccagcctgccagcaagaagatcgatcagaacaagctgaaacctgagatggacgagaagggcaacctgaccaccgccggctttgcctgctctcagtgtggccagcccctgttcgtgtacaagctggagcaggtgtctgagaagggcaaggcttacaccaactacttcggacggtgcaatgtggccgagcacgaaaagctgatcctgctggcccagctgaagcccgagaaggatagcgacgaagccgtgacatatagcctgggaaagtttgggcagagggccctggatttctacagcattcatgtgaccaaggagtccacccaccccgtgaagcccctggcccagatcgccggaaacagatacgcctccggacctgtgggaaaggccctgagcgacgcatgtatgggcacaatcgcctccttcctgtctaagtaccaggacatcatcatcgaacaccagaaggtggtgaagggcaaccagaagagactggagagcctgcgggagctggccggcaaggaaaacctggaataccctagcgtgaccctgccacctcagcctcacaccaaggagggcgttgatgcctacaacgaagtgatcgcccgggtgcgaatgtgggtgaacctgaacctgtggcagaagctgaagctaagcagagatgatgccaagcctctgctgagactgaagggattcccttcctttcctctggtcgagagacaggccaacgaagtggactggtgggacatggtgtgtaacgtgaagaagctgatcaacgagaaaaaggaggatggcaaggtgttttggcagaatctggctggctacaagagacaggaagccctgagaccatacctgagcagcgaggaagatcggaagaagggaaagaaattcgctcggtaccagctgggcgacctgctgctgcacctggaaaagaagcacggcgaggactggggaaaggtgtacgacgaggcctgggagcggattgacaagaaagtggaaggcctgagcaagcacatcaagctggaagaggaacggagaagcgaggacgcccagagcaaggccgccctgaccgactggctgcgggctaaggccagcttcgtgatcgagggcctgaaggaggccgacaaggacgagttctgcagatgcgagctgaagctgcagaagtggtacggggacctgcggggaaagcccttcgccatcgaagccgagaacagcatcctggacatcagcggcttcagcaagcagtacaactgtgccttcatctggcagaaggacggcgtgaagaagctgaacctgtacctgatcatcaactacttcaagggcggcaagctgcggttcaagaagatcaaacctgaagccttcgaagccaacagattctacaccgtgatcaacaaaaagagcggcgagatcgtgcccatggaggtgaacttcaacttcgacgaccccaacctgatcatcctgcctctggcctttggcaagagacagggcagagaattcatctggaacgacctgctgtccctggaaaccggcagcctgaagctggccaacggaagagtgatcgagaagacactgtacaacagaagaacccggcaggatgagcctgccctgttcgtggccctgaccttcgagcggcgggaggtcctggactcctccaatatcaaaccaatgaacctgatcggcgtggcaagaggcgaaaacatccccgccgtgatcgccctgaccgaccccgagggctgcccactgagccggtttaaggatagcctgggaaacccaacccacatcctgagaatcggcgagagctataaggagaagcagcggaccatccaggccaagaaggaggtggagcagcggagagccggcggctacagccggaagtacgccagcaaagccaagaatctggcagacgatatggtgagaaacaccgctagagatctgctgtactacgccgtgacccaggatgccatgctgatcttcgccaacctgagccggggcttcggccggcagggcaagcggaccttcatggccgagagacagtacacacggatggaggactggctgaccgccaagctggcctacgagggcctgagcaagacctacctgtccaagacactggcccagtacacctccaagacatgcagcaactgtgggtttaccatcaccagcgccgactacgacagggtgctggagaagctgaagaagacagcaacaggctggatgaccacaattaacggcaaggagctgaaggtggagggccagattacctactacaacagatacaagagacagaacgtagtcaaggacctgtccgtcgagctggatagactgagcgaagaatctgtgaacaacgacatctcctcctggacaaagggcagaagcggagaagctctgagcctcctgaagaaaagattctcccatagacccgtgcaggagaagttcgtgtgcctgaactgcggcttcgagacacacgcagccgagcaagccgccctgaacatcgccagatcctggctgttcctgcggagccaggagtacaagaaataccagacaaacaagacaaccggcaacaccgataagagagccttcgtcgagacctggcagtccttttaccggaagaagcttaaggaggtgtggaaacctgccgtgcggtctggcggatctggcggaggctccccccaggagcccgtgaccttcgaggacgtggccgtgtacttcacccagaaccagtgggccagcctggaccccacccagagggccctgtacagggaggtgatgctggagaactacgccagcgtggccagcctggtggtgttccccttccccaagcccgacctggtgagccagctggagagggaggaggccccctggggccccgacccctgggaggccgaggtgctgaggggcatctgccccggcggcggcccaagcagcggcgcccctcctcccagcggcggcagcccagccggctccccaacctctaccgaggagggcacctctgagtccgccacccccgagagcggccctggcacctccaccgagcccagcgagggcagcgcacccggcagccctgccggcagccccacctccacagaggagggaaccagcaccgagcccagcgaaggcagcgccccaggcaccagcaccgagcctagtgagcaggagattaaacggatcaacaagatcagaagaagacttgtgaaagacagcaacaccaagaaggccggcaagacaggccccatgaaaaccctgctggttagagtgatgacacccgatctgagagagcggctggaaaacctgagaaagaagcctgaaaatatcccccagcccatcagcaatacatctagagccaacctgaataagctgctgaccgattacaccgaaatgaagaaggcgatcctgcatgtgtactgggaagagttccagaaggaccctgtgggcctgatgagccgggtggcccagcctgccagcaagaagatcgatcagaacaagctgaaacctgagatggacgagaagggcaacctgaccaccgccggctttgcctgctctcagtgtggccagcccctgttcgtgtacaagctggagcaggtgtctgagaagggcaaggcttacaccaactacttcggacggtgcaatgtggccgagcacgaaaagctgatcctgctggcccagctgaagcccgagaaggatagcgacgaagccgtgacatatagcctgggaaagtttgggcagagggccctggatttctacagcattcatgtgaccaaggagtccacccaccccgtgaagcccctggcccagatcgccggaaacagatacgcctccggacctgtgggaaaggccctgagcgacgcatgtatgggcacaatcgcctccttcctgtctaagtaccaggacatcatcatcgaacaccagaaggtggtgaagggcaaccagaagagactggagagcctgcgggagctggccggcaaggaaaacctggaataccctagcgtgaccctgccacctcagcctcacaccaaggagggcgttgatgcctacaacgaagtgatcgcccgggtgcgaatgtgggtgaacctgaacctgtggcagaagctgaagctaagcagagatgatgccaagcctctgctgagactgaagggattcccttcctttcctctggtcgagagacaggccaacgaagtggactggtgggacatggtgtgtaacgtgaagaagctgatcaacgagaaaaaggaggatggcaaggtgttttggcagaatctggctggctacaagagacaggaagccctgagaccatacctgagcagcgaggaagatcggaagaagggaaagaaattcgctcggtaccagctgggcgacctgctgctgcacctggaaaagaagcacggcgaggactggggaaaggtgtacgacgaggcctgggagcggattgacaagaaagtggaaggcctgagcaagcacatcaagctggaagaggaacggagaagcgaggacgcccagagcaaggccgccctgaccgactggctgcgggctaaggccagcttcgtgatcgagggcctgaaggaggccgacaaggacgagttctgcagatgcgagctgaagctgcagaagtggtacggggacctgcggggaaagcccttcgccatcgaagccgagaacagcatcctggacatcagcggcttcagcaagcagtacaactgtgccttcatctggcagaaggacggcgtgaagaagctgaacctgtacctgatcatcaactacttcaagggcggcaagctgcggttcaagaagatcaaacctgaagccttcgaagccaacagattctacaccgtgatcaacaaaaagagcggcgagatcgtgcccatggaggtgaacttcaacttcgacgaccccaacctgatcatcctgcctctggcctttggcaagagacagggcagagaattcatctggaacgacctgctgtccctggaaaccggcagcctgaagctggccaacggaagagtgatcgagaagacactgtacaacagaagaacccggcaggatgagcctgccctgttcgtggccctgaccttcgagcggcgggaggtcctggactcctccaatatcaaaccaatgaacctgatcggcgtggcaagaggcgaaaacatccccgccgtgatcgccctgaccgaccccgagggctgcccactgagccggtttaaggatagcctgggaaacccaacccacatcctgagaatcggcgagagctataaggagaagcagcggaccatccaggccaagaaggaggtggagcagcggagagccggcggctacagccggaagtacgccagcaaagccaagaatctggcagacgatatggtgagaaacaccgctagagatctgctgtactacgccgtgacccaggatgccatgctgatcttcgccaacctgagccggggcttcggccggcagggcaagcggaccttcatggccgagagacagtacacacggatggaggactggctgaccgccaagctggcctacgagggcctgagcaagacctacctgtccaagacactggcccagtacacctccaagacatgcagcaactgtgggtttaccatcaccagcgccgactacgacagggtgctggagaagctgaagaagacagcaacaggctggatgaccacaattaacggcaaggagctgaaggtggagggccagattacctactacaacagatacaagagacagaacgtagtcaaggacctgtccgtcgagctggatagactgagcgaagaatctgtgaacaacgacatctcctcctggacaaagggcagaagcggagaagctctgagcctcctgaagaaaagattctcccatagacccgtgcaggagaagttcgtgtgcctgaactgcggcttcgagacacacgcagccgagcaagccgccctgaacatcgccagatcctggctgttcctgcggagccaggagtacaagaaataccagacaaacaagacaaccggcaacaccgataagagagccttcgtcgagacctggcagtccttttaccggaagaagcttaaggaggtgtggaaacctgccgtgcggtctggcggatctggcggaggctcctccccaggagcccgtgaccttcgaggacgtggccgtgtacttcacccagaaccagtgggccagcctggaccccacccagagggccctgtacagggaggtgatgctggagaactacgccagcgtggccagcctggtggtgttccccttccccaagcccgacctggtgagccagctggagagggaggaggccccctggggccccgacccctgggaggccgaggtgctgaggggcatctgccccggcggatctggctccggcagcggccccaagaaaaagagaaaagtctaagctgccttctgcggggcttgccttctggccatgcccttcttctctcccttgcacctgtacctcttggtctttgaataaagcctgagtaggaaggctagcaaaaaaaaaaaaaaaaaaaaaaaaaaaaaaaaaaaaaaaaaaaaaaaaaaaaaaaaaaaaaaaaaaaaaaaaaaaaaaaa

SEQ ID NO: 15491 - RNA, 9485 nt, synthetic construct
  source 1..9485: mol_type = other RNA
aggaaataagagagaaaagaagagtaagaagaaatataagagccaccatggcccctaagaagaagcgtaaagtgagccggatggaacgcctcgtctacgaggtgcggcagaagtgcagaaacatcgaggacatctgcatctcctgcggatctctgaacgtgaccctggagcacccactgttcatcggcggcatgtgccagaactgtaaaaactgttttctggagtgtgcctatcaatacgacgatgacggctaccagagctactgcaccatctgttgcggcggaagagaggtgctgatgtgtggaaataacaactgctgccggtgcttctgcgtggaatgcgtggacctgctggtgggccccggcgccgcccaggccgctattaaggaagatccttggaactgctacatgtgcggccacaagggcacatacggcctgctgagacggagagaggactggcctagcagactgcagatgttcttcgccaataaccacgaccaggagttcgacccccctaaggtgtaccctcccgtccccgccgagaagagaaagcccatccgggtcctgagcctgttcgatggcatcgccaccggtctgctggtgctgaaggacctgggcatccaggtggataggtacattgcctccgaggtgtgcgaggactccatcaccgtgggaatggtgcgtcatcagggcaagatcatgtacgtgggcgacgtgcggagcgtgacacagaagcatatccaggagtggggccctttcgacctggtgatcggcggcagcccttgcaatgacctgagcatcgtgaacccagcccggaagggcctgtacgagggaaccggcagactgttcttcgagttttacagactgctgcacgacgcccggcctaaggaaggcgacgaccggcccttcttttggctgttcgagaatgtggtggccatgggagtcagcgacaagcgggatattagccggttcctggagagcaaccccgtgatgatcgatgccaaggaagtgagcgccgcccaccgggccagatacttctggggcaatctgcctggcatgaacagacccctggccagcaccgtgaacgacaagctggagctgcaggagtgcctggagcacggccggatcgccaagttcagcaaggtgagaaccatcaccacccgaagcaacagcatcaaacaaggcaaggaccagcactttcctgtgttcatgaacgagaaggaggacatcctgtggtgtaccgagatggagagagtgttcgggttcccagtccactacacagatgtcagcaacatgtctagactggccagacagagactgctgggaagaagctggtccgtccctgtgatcagacacctgttcgcccctctgaaggagtacttcgcctgcgtgagcagcggcaacagcaacgccaacagccggggccccagcttctctagcggcctggtgccactgtccctgagagggagccacatgggccccatggagatctacaaaaccgtgagcgcctggaagcggcagcctgtgcgcgtgctgagcctgtttcggaatatcgataaagtcctgaaaagcctgggattcctggagagcggctctggctccggcggtggcaccctgaagtacgtggaggatgtgacaaacgtggtcagacgggatgtggagaagtggggccccttcgatctggtgtacggcagcacccaacccctgggcagctcttgtgaccggtgccctggctggtacatgtttcagttccaccggatcctgcagtacgccctgccgagacaggagtcccagcggccattcttttggattttcatggacaacttgctgctgaccgaggatgaccaggaaactaccactcggttcctgcagaccgaagccgtgaccctgcaggacgtgagaggccgggactaccagaacgccatgcgggtgtggtccaacatccctggactgaaaagcaagcacgcacctctgacccctaaagaagaggagtacctgcaggcccaggtgcggagcagaagcaagctggacgcccctaaggtggatctgctggtgaagaattgcctcctgcccctgagagagtacttcaagtatttcagccagaatagtctgcccctgggaggcagcggcggcggcgccctggtgacatttgaggacgtcgccgtgcggttcacccaggaggaatgggctctgctggatccttctcagaaaatcctgtaccgggacgtgatgagagagacataccggaatctgacctccgtgggcatcaactgggaatgttgggaccttgaagcctgcttcagaagcctgggaagaaacctgagagtgcaggtggtgaagagaaagtgcgagctgaccaacagcggcccctgcgccgagggcggcccaagcagcggcgcccctcctcccagcggcggcagcccagccggctccccaacctctaccgaggagggcacctctgagtccgccacccccgagagcggccctggcacctccaccgagcccagcgagggcagcgcacccggcagccctgccggcagccccacctccacagaggagggaaccagcaccgagcccagcgaaggcagcgccccaggcaccagcaccgagcctagtgagcaggagattaaacggatcaacaagatcagaagaagacttgtgaaagacagcaacaccaagaaggccggcaagacaggccccatgaaaaccctgctggttagagtgatgacacccgatctgagagagcggctggaaaacctgagaaagaagcctgaaaatatcccccagcccatcagcaatacatctagagccaacctgaataagctgctgaccgattacaccgaaatgaagaaggcgatcctgcatgtgtactgggaagagttccagaaggaccctgtgggcctgatgagccgggtggcccagcctgccagcaagaagatcgatcagaacaagctgaaacctgagatggacgagaagggcaacctgaccaccgccggctttgcctgctctcagtgtggccagcccctgttcgtgtacaagctggagcaggtgtctgagaagggcaaggcttacaccaactacttcggacggtgcaatgtggccgagcacgaaaagctgatcctgctggcccagctgaagcccgagaaggatagcgacgaagccgtgacatatagcctgggaaagtttgggcagagggccctggatttctacagcattcatgtgaccaaggagtccacccaccccgtgaagcccctggcccagatcgccggaaacagatacgcctccggacctgtgggaaaggccctgagcgacgcatgtatgggcacaatcgcctccttcctgtctaagtaccaggacatcatcatcgaacaccagaaggtggtgaagggcaaccagaagagactggagagcctgcgggagctggccggcaaggaaaacctggaataccctagcgtgaccctgccacctcagcctcacaccaaggagggcgttgatgcctacaacgaagtgatcgcccgggtgcgaatgtgggtgaacctgaacctgtggcagaagctgaagctaagcagagatgatgccaagcctctgctgagactgaagggattcccttcctttcctctggtcgagagacaggccaacgaagtggactggtgggacatggtgtgtaacgtgaagaagctgatcaacgagaaaaaggaggatggcaaggtgttttggcagaatctggctggctacaagagacaggaagccctgagaccatacctgagcagcgaggaagatcggaagaagggaaagaaattcgctcggtaccagctgggcgacctgctgctgcacctggaaaagaagcacggcgaggactggggaaaggtgtacgacgaggcctgggagcggattgacaagaaagtggaaggcctgagcaagcacatcaagctggaagaggaacggagaagcgaggacgcccagagcaaggccgccctgaccgactggctgcgggctaaggccagcttcgtgatcgagggcctgaaggaggccgacaaggacgagttctgcagatgcgagctgaagctgcagaagtggtacggggacctgcggggaaagcccttcgccatcgaagccgagaacagcatcctggacatcagcggcttcagcaagcagtacaactgtgccttcatctggcagaaggacggcgtgaagaagctgaacctgtacctgatcatcaactacttcaagggcggcaagctgcggttcaagaagatcaaacctgaagccttcgaagccaacagattctacaccgtgatcaacaaaaagagcggcgagatcgtgcccatggaggtgaacttcaacttcgacgaccccaacctgatcatcctgcctctggcctttggcaagagacagggcagagaattcatctggaacgacctgctgtccctggaaaccggcagcctgaagctggccaacggaagagtgatcgagaagacactgtacaacagaagaacccggcaggatgagcctgccctgttcgtggccctgaccttcgagcggcgggaggtcctggactcctccaatatcaaaccaatgaacctgatcggcgtggcaagaggcgaaaacatccccgccgtgatcgccctgaccgaccccgagggctgcccactgagccggtttaaggatagcctgggaaacccaacccacatcctgagaatcggcgagagctataaggagaagcagcggaccatccaggccaagaaggaggtggagcagcggagagccggcggctacagccggaagtacgccagcaaagccaagaatctggcagacgatatggtgagaaacaccgctagagatctgctgtactacgccgtgacccaggatgccatgctgatcttcgccaacctgagccggggcttcggccggcagggcaagcggaccttcatggccgagagacagtacacacggatggaggactggctgaccgccaagctggcctacgagggcctgagcaagacctacctgtccaagacactggcccagtacacctccaagacatgcagcaactgtgggtttaccatcaccagcgccgactacgacagggtgctggagaagctgaagaagacagcaacaggctggatgaccacaattaacggcaaggagctgaaggtggagggccagattacctactacaacagatacaagagacagaacgtagtcaaggacctgtccgtcgagctggatagactgagcgaagaatctgtgaacaacgacatctcctcctggacaaagggcagaagcggagaagctctgagcctcctgaagaaaagattctcccatagacccgtgcaggagaagttcgtgtgcctgaactgcggcttcgagacacacgcagccgagcaagccgccctgaacatcgccagatcctggctgttcctgcggagccaggagtacaagaaataccagacaaacaagacaaccggcaacaccgataagagagccttcgtcgagacctggcagtccttttaccggaagaagcttaaggaggtgtggaaacctgccgtgcggtctggcggatctggcggaggctccttccagcacctggtgatgttcagggacgtggccgtggacttcagccaggaggagtgggagtgcctgaacagctaccagaggaacctgtacagggacgtgatcctggagaactacagcaacctggtgagcgtggccggctgcagcatcagcaagcccgacgtgatcaccctgctggagcagggcaaggagccctggatggtggtgagggacgagaggaggaggagcctggacctggagagcaggggcggcccaagcagcggcgcccctcctcccagcggcggcagcccagccggctccccaacctctaccgaggagggcacctctgagtccgccacccccgagagcggccctggcacctccaccgagcccagcgagggcagcgcacccggcagccctgccggcagccccacctccacagaggagggaaccagcaccgagcccagcgaaggcagcgccccaggcaccagcaccgagcctagtgagcaggagattaaacggatcaacaagatcagaagaagacttgtgaaagacagcaacaccaagaaggccggcaagacaggccccatgaaaaccctgctggttagagtgatgacacccgatctgagagagcggctggaaaacctgagaaagaagcctgaaaatatcccccagcccatcagcaatacatctagagccaacctgaataagctgctgaccgattacaccgaaatgaagaaggcgatcctgcatgtgtactgggaagagttccagaaggaccctgtgggcctgatgagccgggtggcccagcctgccagcaagaagatcgatcagaacaagctgaaacctgagatggacgagaagggcaacctgaccaccgccggctttgcctgctctcagtgtggccagcccctgttcgtgtacaagctggagcaggtgtctgagaagggcaaggcttacaccaactacttcggacggtgcaatgtggccgagcacgaaaagctgatcctgctggcccagctgaagcccgagaaggatagcgacgaagccgtgacatatagcctgggaaagtttgggcagagggccctggatttctacagcattcatgtgaccaaggagtccacccaccccgtgaagcccctggcccagatcgccggaaacagatacgcctccggacctgtgggaaaggccctgagcgacgcatgtatgggcacaatcgcctccttcctgtctaagtaccaggacatcatcatcgaacaccagaaggtggtgaagggcaaccagaagagactggagagcctgcgggagctggccggcaaggaaaacctggaataccctagcgtgaccctgccacctcagcctcacaccaaggagggcgttgatgcctacaacgaagtgatcgcccgggtgcgaatgtgggtgaacctgaacctgtggcagaagctgaagctaagcagagatgatgccaagcctctgctgagactgaagggattcccttcctttcctctggtcgagagacaggccaacgaagtggactggtgggacatggtgtgtaacgtgaagaagctgatcaacgagaaaaaggaggatggcaaggtgttttggcagaatctggctggctacaagagacaggaagccctgagaccatacctgagcagcgaggaagatcggaagaagggaaagaaattcgctcggtaccagctgggcgacctgctgctgcacctggaaaagaagcacggcgaggactggggaaaggtgtacgacgaggcctgggagcggattgacaagaaagtggaaggcctgagcaagcacatcaagctggaagaggaacggagaagcgaggacgcccagagcaaggccgccctgaccgactggctgcgggctaaggccagcttcgtgatcgagggcctgaaggaggccgacaaggacgagttctgcagatgcgagctgaagctgcagaagtggtacggggacctgcggggaaagcccttcgccatcgaagccgagaacagcatcctggacatcagcggcttcagcaagcagtacaactgtgccttcatctggcagaaggacggcgtgaagaagctgaacctgtacctgatcatcaactacttcaagggcggcaagctgcggttcaagaagatcaaacctgaagccttcgaagccaacagattctacaccgtgatcaacaaaaagagcggcgagatcgtgcccatggaggtgaacttcaacttcgacgaccccaacctgatcatcctgcctctggcctttggcaagagacagggcagagaattcatctggaacgacctgctgtccctggaaaccggcagcctgaagctggccaacggaagagtgatcgagaagacactgtacaacagaagaacccggcaggatgagcctgccctgttcgtggccctgaccttcgagcggcgggaggtcctggactcctccaatatcaaaccaatgaacctgatcggcgtggcaagaggcgaaaacatccccgccgtgatcgccctgaccgaccccgagggctgcccactgagccggtttaaggatagcctgggaaacccaacccacatcctgagaatcggcgagagctataaggagaagcagcggaccatccaggccaagaaggaggtggagcagcggagagccggcggctacagccggaagtacgccagcaaagccaagaatctggcagacgatatggtgagaaacaccgctagagatctgctgtactacgccgtgacccaggatgccatgctgatcttcgccaacctgagccggggcttcggccggcagggcaagcggaccttcatggccgagagacagtacacacggatggaggactggctgaccgccaagctggcctacgagggcctgagcaagacctacctgtccaagacactggcccagtacacctccaagacatgcagcaactgtgggtttaccatcaccagcgccgactacgacagggtgctggagaagctgaagaagacagcaacaggctggatgaccacaattaacggcaaggagctgaaggtggagggccagattacctactacaacagatacaagagacagaacgtagtcaaggacctgtccgtcgagctggatagactgagcgaagaatctgtgaacaacgacatctcctcctggacaaagggcagaagcggagaagctctgagcctcctgaagaaaagattctcccatagacccgtgcaggagaagttcgtgtgcctgaactgcggcttcgagacacacgcagccgagcaagccgccctgaacatcgccagatcctggctgttcctgcggagccaggagtacaagaaataccagacaaacaagacaaccggcaacaccgataagagagccttcgtcgagacctggcagtccttttaccggaagaagcttaaggaggtgtggaaacctgccgtgcggtctggcggatctggcggaggctcctttccagcacctggtgatgttcagggacgtggccgtggacttcagccaggaggagtgggagtgcctgaacagctaccagaggaacctgtacagggacgtgatcctggagaactacagcaacctggtgagcgtggccggctgcagcatcagcaagcccgacgtgatcaccctgctggagcagggcaaggagccctggatggtggtgagggacgagaggaggaggagcctggacctggagagcaggggatctggctccggcagcggccccaagaaaaagagaaaagtctaagctgccttctgcggggcttgccttctggccatgcccttcttctctcccttgcacctgtacctcttggtctttgaataaagcctgagtaggaaggctagcaaaaaaaaaaaaaaaaaaaaaaaaaaaaaaaaaaaaaaaaaaaaaaaaaaaaaaaaaaaaaaaaaaaaaaaaaaaaaaaa

SEQ ID NO: 15492 - RNA, 9485 nt, synthetic construct
  source 1..9485: mol_type = other RNA
aggaaataagagagaaaagaagagtaagaagaaatataagagccaccatggcccctaagaagaagcgtaaagtgagccggatggaacgcctcgtctacgaggtgcggcagaagtgcagaaacatcgaggacatctgcatctcctgcggatctctgaacgtgaccctggagcacccactgttcatcggcggcatgtgccagaactgtaaaaactgttttctggagtgtgcctatcaatacgacgatgacggctaccagagctactgcaccatctgttgcggcggaagagaggtgctgatgtgtggaaataacaactgctgccggtgcttctgcgtggaatgcgtggacctgctggtgggccccggcgccgcccaggccgctattaaggaagatccttggaactgctacatgtgcggccacaagggcacatacggcctgctgagacggagagaggactggcctagcagactgcagatgttcttcgccaataaccacgaccaggagttcgacccccctaaggtgtaccctcccgtccccgccgagaagagaaagcccatccgggtcctgagcctgttcgatggcatcgccaccggtctgctggtgctgaaggacctgggcatccaggtggataggtacattgcctccgaggtgtgcgaggactccatcaccgtgggaatggtgcgtcatcagggcaagatcatgtacgtgggcgacgtgcggagcgtgacacagaagcatatccaggagtggggccctttcgacctggtgatcggcggcagcccttgcaatgacctgagcatcgtgaacccagcccggaagggcctgtacgagggaaccggcagactgttcttcgagttttacagactgctgcacgacgcccggcctaaggaaggcgacgaccggcccttcttttggctgttcgagaatgtggtggccatgggagtcagcgacaagcgggatattagccggttcctggagagcaaccccgtgatgatcgatgccaaggaagtgagcgccgcccaccgggccagatacttctggggcaatctgcctggcatgaacagacccctggccagcaccgtgaacgacaagctggagctgcaggagtgcctggagcacggccggatcgccaagttcagcaaggtgagaaccatcaccacccgaagcaacagcatcaaacaaggcaaggaccagcactttcctgtgttcatgaacgagaaggaggacatcctgtggtgtaccgagatggagagagtgttcgggttcccagtccactacacagatgtcagcaacatgtctagactggccagacagagactgctgggaagaagctggtccgtccctgtgatcagacacctgttcgcccctctgaaggagtacttcgcctgcgtgagcagcggcaacagcaacgccaacagccggggccccagcttctctagcggcctggtgccactgtccctgagagggagccacatgggccccatggagatctacaaaaccgtgagcgcctggaagcggcagcctgtgcgcgtgctgagcctgtttcggaatatcgataaagtcctgaaaagcctgggattcctggagagcggctctggctccggcggtggcaccctgaagtacgtggaggatgtgacaaacgtggtcagacgggatgtggagaagtggggccccttcgatctggtgtacggcagcacccaacccctgggcagctcttgtgaccggtgccctggctggtacatgtttcagttccaccggatcctgcagtacgccctgccgagacaggagtcccagcggccattcttttggattttcatggacaacttgctgctgaccgaggatgaccaggaaactaccactcggttcctgcagaccgaagccgtgaccctgcaggacgtgagaggccgggactaccagaacgccatgcgggtgtggtccaacatccctggactgaaaagcaagcacgcacctctgacccctaaagaagaggagtacctgcaggcccaggtgcggagcagaagcaagctggacgcccctaaggtggatctgctggtgaagaattgcctcctgcccctgagagagtacttcaagtatttcagccagaatagtctgcccctgggaggcagcggcggcggcgccctggtgacatttgaggacgtcgccgtgcggttcacccaggaggaatgggctctgctggatccttctcagaaaatcctgtaccgggacgtgatgagagagacataccggaatctgacctccgtgggcatcaactgggaatgttgggaccttgaagcctgcttcagaagcctgggaagaaacctgagagtgcaggtggtgaagagaaagtgcgagctgaccaacagcggcccctgcgccgagggcggcccaagcagcggcgcccctcctcccagcggcggcagcccagccggctccccaacctctaccgaggagggcacctctgagtccgccacccccgagagcggccctggcacctccaccgagcccagcgagggcagcgcacccggcagccctgccggcagccccacctccacagaggagggaaccagcaccgagcccagcgaaggcagcgccccaggcaccagcaccgagcctagtgagcaggagattaaacggatcaacaagatcagaagaagacttgtgaaagacagcaacaccaagaaggccggcaagacaggccccatgaaaaccctgctggttagagtgatgacacccgatctgagagagcggctggaaaacctgagaaagaagcctgaaaatatcccccagcccatcagcaatacatctagagccaacctgaataagctgctgaccgattacaccgaaatgaagaaggcgatcctgcatgtgtactgggaagagttccagaaggaccctgtgggcctgatgagccgggtggcccagcctgccagcaagaagatcgatcagaacaagctgaaacctgagatggacgagaagggcaacctgaccaccgccggctttgcctgctctcagtgtggccagcccctgttcgtgtacaagctggagcaggtgtctgagaagggcaaggcttacaccaactacttcggacggtgcaatgtggccgagcacgaaaagctgatcctgctggcccagctgaagcccgagaaggatagcgacgaagccgtgacatatagcctgggaaagtttgggcagagggccctggatttctacagcattcatgtgaccaaggagtccacccaccccgtgaagcccctggcccagatcgccggaaacagatacgcctccggacctgtgggaaaggccctgagcgacgcatgtatgggcacaatcgcctccttcctgtctaagtaccaggacatcatcatcgaacaccagaaggtggtgaagggcaaccagaagagactggagagcctgcgggagctggccggcaaggaaaacctggaataccctagcgtgaccctgccacctcagcctcacaccaaggagggcgttgatgcctacaacgaagtgatcgcccgggtgcgaatgtgggtgaacctgaacctgtggcagaagctgaagctaagcagagatgatgccaagcctctgctgagactgaagggattcccttcctttcctctggtcgagagacaggccaacgaagtggactggtgggacatggtgtgtaacgtgaagaagctgatcaacgagaaaaaggaggatggcaaggtgttttggcagaatctggctggctacaagagacaggaagccctgagaccatacctgagcagcgaggaagatcggaagaagggaaagaaattcgctcggtaccagctgggcgacctgctgctgcacctggaaaagaagcacggcgaggactggggaaaggtgtacgacgaggcctgggagcggattgacaagaaagtggaaggcctgagcaagcacatcaagctggaagaggaacggagaagcgaggacgcccagagcaaggccgccctgaccgactggctgcgggctaaggccagcttcgtgatcgagggcctgaaggaggccgacaaggacgagttctgcagatgcgagctgaagctgcagaagtggtacggggacctgcggggaaagcccttcgccatcgaagccgagaacagcatcctggacatcagcggcttcagcaagcagtacaactgtgccttcatctggcagaaggacggcgtgaagaagctgaacctgtacctgatcatcaactacttcaagggcggcaagctgcggttcaagaagatcaaacctgaagccttcgaagccaacagattctacaccgtgatcaacaaaaagagcggcgagatcgtgcccatggaggtgaacttcaacttcgacgaccccaacctgatcatcctgcctctggcctttggcaagagacagggcagagaattcatctggaacgacctgctgtccctggaaaccggcagcctgaagctggccaacggaagagtgatcgagaagacactgtacaacagaagaacccggcaggatgagcctgccctgttcgtggccctgaccttcgagcggcgggaggtcctggactcctccaatatcaaaccaatgaacctgatcggcgtggcaagaggcgaaaacatccccgccgtgatcgccctgaccgaccccgagggctgcccactgagccggtttaaggatagcctgggaaacccaacccacatcctgagaatcggcgagagctataaggagaagcagcggaccatccaggccaagaaggaggtggagcagcggagagccggcggctacagccggaagtacgccagcaaagccaagaatctggcagacgatatggtgagaaacaccgctagagatctgctgtactacgccgtgacccaggatgccatgctgatcttcgccaacctgagccggggcttcggccggcagggcaagcggaccttcatggccgagagacagtacacacggatggaggactggctgaccgccaagctggcctacgagggcctgagcaagacctacctgtccaagacactggcccagtacacctccaagacatgcagcaactgtgggtttaccatcaccagcgccgactacgacagggtgctggagaagctgaagaagacagcaacaggctggatgaccacaattaacggcaaggagctgaaggtggagggccagattacctactacaacagatacaagagacagaacgtagtcaaggacctgtccgtcgagctggatagactgagcgaagaatctgtgaacaacgacatctcctcctggacaaagggcagaagcggagaagctctgagcctcctgaagaaaagattctcccatagacccgtgcaggagaagttcgtgtgcctgaactgcggcttcgagacacacgcagccgagcaagccgccctgaacatcgccagatcctggctgttcctgcggagccaggagtacaagaaataccagacaaacaagacaaccggcaacaccgataagagagccttcgtcgagacctggcagtccttttaccggaagaagcttaaggaggtgtggaaacctgccgtgcggtctggcggatctggcggaggctccccccaggagcccgtgaccttcaaggacgtggccgtggacttcagccaggaggagtggggcctgctgggccccgcccagaggcacctgtacagggacgtgatgctggagaactacaggaacctggtgagcctgggcctgatcctggccaagcccgaggtggtgtgccacctggagcagggcggcgagctgtggaagcccgagcacggcgtgctgtgcagcggcgacggcgagctgtgggtgaggggcggcccaagcagcggcgcccctcctcccagcggcggcagcccagccggctccccaacctctaccgaggagggcacctctgagtccgccacccccgagagcggccctggcacctccaccgagcccagcgagggcagcgcacccggcagccctgccggcagccccacctccacagaggagggaaccagcaccgagcccagcgaaggcagcgccccaggcaccagcaccgagcctagtgagcaggagattaaacggatcaacaagatcagaagaagacttgtgaaagacagcaacaccaagaaggccggcaagacaggccccatgaaaaccctgctggttagagtgatgacacccgatctgagagagcggctggaaaacctgagaaagaagcctgaaaatatcccccagcccatcagcaatacatctagagccaacctgaataagctgctgaccgattacaccgaaatgaagaaggcgatcctgcatgtgtactgggaagagttccagaaggaccctgtgggcctgatgagccgggtggcccagcctgccagcaagaagatcgatcagaacaagctgaaacctgagatggacgagaagggcaacctgaccaccgccggctttgcctgctctcagtgtggccagcccctgttcgtgtacaagctggagcaggtgtctgagaagggcaaggcttacaccaactacttcggacggtgcaatgtggccgagcacgaaaagctgatcctgctggcccagctgaagcccgagaaggatagcgacgaagccgtgacatatagcctgggaaagtttgggcagagggccctggatttctacagcattcatgtgaccaaggagtccacccaccccgtgaagcccctggcccagatcgccggaaacagatacgcctccggacctgtgggaaaggccctgagcgacgcatgtatgggcacaatcgcctccttcctgtctaagtaccaggacatcatcatcgaacaccagaaggtggtgaagggcaaccagaagagactggagagcctgcgggagctggccggcaaggaaaacctggaataccctagcgtgaccctgccacctcagcctcacaccaaggagggcgttgatgcctacaacgaagtgatcgcccgggtgcgaatgtgggtgaacctgaacctgtggcagaagctgaagctaagcagagatgatgccaagcctctgctgagactgaagggattcccttcctttcctctggtcgagagacaggccaacgaagtggactggtgggacatggtgtgtaacgtgaagaagctgatcaacgagaaaaaggaggatggcaaggtgttttggcagaatctggctggctacaagagacaggaagccctgagaccatacctgagcagcgaggaagatcggaagaagggaaagaaattcgctcggtaccagctgggcgacctgctgctgcacctggaaaagaagcacggcgaggactggggaaaggtgtacgacgaggcctgggagcggattgacaagaaagtggaaggcctgagcaagcacatcaagctggaagaggaacggagaagcgaggacgcccagagcaaggccgccctgaccgactggctgcgggctaaggccagcttcgtgatcgagggcctgaaggaggccgacaaggacgagttctgcagatgcgagctgaagctgcagaagtggtacggggacctgcggggaaagcccttcgccatcgaagccgagaacagcatcctggacatcagcggcttcagcaagcagtacaactgtgccttcatctggcagaaggacggcgtgaagaagctgaacctgtacctgatcatcaactacttcaagggcggcaagctgcggttcaagaagatcaaacctgaagccttcgaagccaacagattctacaccgtgatcaacaaaaagagcggcgagatcgtgcccatggaggtgaacttcaacttcgacgaccccaacctgatcatcctgcctctggcctttggcaagagacagggcagagaattcatctggaacgacctgctgtccctggaaaccggcagcctgaagctggccaacggaagagtgatcgagaagacactgtacaacagaagaacccggcaggatgagcctgccctgttcgtggccctgaccttcgagcggcgggaggtcctggactcctccaatatcaaaccaatgaacctgatcggcgtggcaagaggcgaaaacatccccgccgtgatcgccctgaccgaccccgagggctgcccactgagccggtttaaggatagcctgggaaacccaacccacatcctgagaatcggcgagagctataaggagaagcagcggaccatccaggccaagaaggaggtggagcagcggagagccggcggctacagccggaagtacgccagcaaagccaagaatctggcagacgatatggtgagaaacaccgctagagatctgctgtactacgccgtgacccaggatgccatgctgatcttcgccaacctgagccggggcttcggccggcagggcaagcggaccttcatggccgagagacagtacacacggatggaggactggctgaccgccaagctggcctacgagggcctgagcaagacctacctgtccaagacactggcccagtacacctccaagacatgcagcaactgtgggtttaccatcaccagcgccgactacgacagggtgctggagaagctgaagaagacagcaacaggctggatgaccacaattaacggcaaggagctgaaggtggagggccagattacctactacaacagatacaagagacagaacgtagtcaaggacctgtccgtcgagctggatagactgagcgaagaatctgtgaacaacgacatctcctcctggacaaagggcagaagcggagaagctctgagcctcctgaagaaaagattctcccatagacccgtgcaggagaagttcgtgtgcctgaactgcggcttcgagacacacgcagccgagcaagccgccctgaacatcgccagatcctggctgttcctgcggagccaggagtacaagaaataccagacaaacaagacaaccggcaacaccgataagagagccttcgtcgagacctggcagtccttttaccggaagaagcttaaggaggtgtggaaacctgccgtgcggtctggcggatctggcggaggctcctccccaggagcccgtgaccttcaaggacgtggccgtggacttcagccaggaggagtggggcctgctgggccccgcccagaggcacctgtacagggacgtgatgctggagaactacaggaacctggtgagcctgggcctgatcctggccaagcccgaggtggtgtgccacctggagcagggcggcgagctgtggaagcccgagcacggcgtgctgtgcagcggcgacggcgagctgtgggtgaggggatctggctccggcagcggccccaagaaaaagagaaaagtctaagctgccttctgcggggcttgccttctggccatgcccttcttctctcccttgcacctgtacctcttggtctttgaataaagcctgagtaggaaggctagcaaaaaaaaaaaaaaaaaaaaaaaaaaaaaaaaaaaaaaaaaaaaaaaaaaaaaaaaaaaaaaaaaaaaaaaaaaaaaaaa

SEQ ID NO: 15493 - RNA, 9485 nt, synthetic construct
  source 1..9485: mol_type = other RNA
aggaaataagagagaaaagaagagtaagaagaaatataagagccaccatggcccctaagaagaagcgtaaagtgagccggatggaacgcctcgtctacgaggtgcggcagaagtgcagaaacatcgaggacatctgcatctcctgcggatctctgaacgtgaccctggagcacccactgttcatcggcggcatgtgccagaactgtaaaaactgttttctggagtgtgcctatcaatacgacgatgacggctaccagagctactgcaccatctgttgcggcggaagagaggtgctgatgtgtggaaataacaactgctgccggtgcttctgcgtggaatgcgtggacctgctggtgggccccggcgccgcccaggccgctattaaggaagatccttggaactgctacatgtgcggccacaagggcacatacggcctgctgagacggagagaggactggcctagcagactgcagatgttcttcgccaataaccacgaccaggagttcgacccccctaaggtgtaccctcccgtccccgccgagaagagaaagcccatccgggtcctgagcctgttcgatggcatcgccaccggtctgctggtgctgaaggacctgggcatccaggtggataggtacattgcctccgaggtgtgcgaggactccatcaccgtgggaatggtgcgtcatcagggcaagatcatgtacgtgggcgacgtgcggagcgtgacacagaagcatatccaggagtggggccctttcgacctggtgatcggcggcagcccttgcaatgacctgagcatcgtgaacccagcccggaagggcctgtacgagggaaccggcagactgttcttcgagttttacagactgctgcacgacgcccggcctaaggaaggcgacgaccggcccttcttttggctgttcgagaatgtggtggccatgggagtcagcgacaagcgggatattagccggttcctggagagcaaccccgtgatgatcgatgccaaggaagtgagcgccgcccaccgggccagatacttctggggcaatctgcctggcatgaacagacccctggccagcaccgtgaacgacaagctggagctgcaggagtgcctggagcacggccggatcgccaagttcagcaaggtgagaaccatcaccacccgaagcaacagcatcaaacaaggcaaggaccagcactttcctgtgttcatgaacgagaaggaggacatcctgtggtgtaccgagatggagagagtgttcgggttcccagtccactacacagatgtcagcaacatgtctagactggccagacagagactgctgggaagaagctggtccgtccctgtgatcagacacctgttcgcccctctgaaggagtacttcgcctgcgtgagcagcggcaacagcaacgccaacagccggggccccagcttctctagcggcctggtgccactgtccctgagagggagccacatgggccccatggagatctacaaaaccgtgagcgcctggaagcggcagcctgtgcgcgtgctgagcctgtttcggaatatcgataaagtcctgaaaagcctgggattcctggagagcggctctggctccggcggtggcaccctgaagtacgtggaggatgtgacaaacgtggtcagacgggatgtggagaagtggggccccttcgatctggtgtacggcagcacccaacccctgggcagctcttgtgaccggtgccctggctggtacatgtttcagttccaccggatcctgcagtacgccctgccgagacaggagtcccagcggccattcttttggattttcatggacaacttgctgctgaccgaggatgaccaggaaactaccactcggttcctgcagaccgaagccgtgaccctgcaggacgtgagaggccgggactaccagaacgccatgcgggtgtggtccaacatccctggactgaaaagcaagcacgcacctctgacccctaaagaagaggagtacctgcaggcccaggtgcggagcagaagcaagctggacgcccctaaggtggatctgctggtgaagaattgcctcctgcccctgagagagtacttcaagtatttcagccagaatagtctgcccctgggaggcagcggcggcggcgccctggtgacatttgaggacgtcgccgtgcggttcacccaggaggaatgggctctgctggatccttctcagaaaatcctgtaccgggacgtgatgagagagacataccggaatctgacctccgtgggcatcaactgggaatgttgggaccttgaagcctgcttcagaagcctgggaagaaacctgagagtgcaggtggtgaagagaaagtgcgagctgaccaacagcggcccctgcgccgagggcggcccaagcagcggcgcccctcctcccagcggcggcagcccagccggctccccaacctctaccgaggagggcacctctgagtccgccacccccgagagcggccctggcacctccaccgagcccagcgagggcagcgcacccggcagccctgccggcagccccacctccacagaggagggaaccagcaccgagcccagcgaaggcagcgccccaggcaccagcaccgagcctagtgagcaggagattaaacggatcaacaagatcagaagaagacttgtgaaagacagcaacaccaagaaggccggcaagacaggccccatgaaaaccctgctggttagagtgatgacacccgatctgagagagcggctggaaaacctgagaaagaagcctgaaaatatcccccagcccatcagcaatacatctagagccaacctgaataagctgctgaccgattacaccgaaatgaagaaggcgatcctgcatgtgtactgggaagagttccagaaggaccctgtgggcctgatgagccgggtggcccagcctgccagcaagaagatcgatcagaacaagctgaaacctgagatggacgagaagggcaacctgaccaccgccggctttgcctgctctcagtgtggccagcccctgttcgtgtacaagctggagcaggtgtctgagaagggcaaggcttacaccaactacttcggacggtgcaatgtggccgagcacgaaaagctgatcctgctggcccagctgaagcccgagaaggatagcgacgaagccgtgacatatagcctgggaaagtttgggcagagggccctggatttctacagcattcatgtgaccaaggagtccacccaccccgtgaagcccctggcccagatcgccggaaacagatacgcctccggacctgtgggaaaggccctgagcgacgcatgtatgggcacaatcgcctccttcctgtctaagtaccaggacatcatcatcgaacaccagaaggtggtgaagggcaaccagaagagactggagagcctgcgggagctggccggcaaggaaaacctggaataccctagcgtgaccctgccacctcagcctcacaccaaggagggcgttgatgcctacaacgaagtgatcgcccgggtgcgaatgtgggtgaacctgaacctgtggcagaagctgaagctaagcagagatgatgccaagcctctgctgagactgaagggattcccttcctttcctctggtcgagagacaggccaacgaagtggactggtgggacatggtgtgtaacgtgaagaagctgatcaacgagaaaaaggaggatggcaaggtgttttggcagaatctggctggctacaagagacaggaagccctgagaccatacctgagcagcgaggaagatcggaagaagggaaagaaattcgctcggtaccagctgggcgacctgctgctgcacctggaaaagaagcacggcgaggactggggaaaggtgtacgacgaggcctgggagcggattgacaagaaagtggaaggcctgagcaagcacatcaagctggaagaggaacggagaagcgaggacgcccagagcaaggccgccctgaccgactggctgcgggctaaggccagcttcgtgatcgagggcctgaaggaggccgacaaggacgagttctgcagatgcgagctgaagctgcagaagtggtacggggacctgcggggaaagcccttcgccatcgaagccgagaacagcatcctggacatcagcggcttcagcaagcagtacaactgtgccttcatctggcagaaggacggcgtgaagaagctgaacctgtacctgatcatcaactacttcaagggcggcaagctgcggttcaagaagatcaaacctgaagccttcgaagccaacagattctacaccgtgatcaacaaaaagagcggcgagatcgtgcccatggaggtgaacttcaacttcgacgaccccaacctgatcatcctgcctctggcctttggcaagagacagggcagagaattcatctggaacgacctgctgtccctggaaaccggcagcctgaagctggccaacggaagagtgatcgagaagacactgtacaacagaagaacccggcaggatgagcctgccctgttcgtggccctgaccttcgagcggcgggaggtcctggactcctccaatatcaaaccaatgaacctgatcggcgtggcaagaggcgaaaacatccccgccgtgatcgccctgaccgaccccgagggctgcccactgagccggtttaaggatagcctgggaaacccaacccacatcctgagaatcggcgagagctataaggagaagcagcggaccatccaggccaagaaggaggtggagcagcggagagccggcggctacagccggaagtacgccagcaaagccaagaatctggcagacgatatggtgagaaacaccgctagagatctgctgtactacgccgtgacccaggatgccatgctgatcttcgccaacctgagccggggcttcggccggcagggcaagcggaccttcatggccgagagacagtacacacggatggaggactggctgaccgccaagctggcctacgagggcctgagcaagacctacctgtccaagacactggcccagtacacctccaagacatgcagcaactgtgggtttaccatcaccagcgccgactacgacagggtgctggagaagctgaagaagacagcaacaggctggatgaccacaattaacggcaaggagctgaaggtggagggccagattacctactacaacagatacaagagacagaacgtagtcaaggacctgtccgtcgagctggatagactgagcgaagaatctgtgaacaacgacatctcctcctggacaaagggcagaagcggagaagctctgagcctcctgaagaaaagattctcccatagacccgtgcaggagaagttcgtgtgcctgaactgcggcttcgagacacacgcagccgagcaagccgccctgaacatcgccagatcctggctgttcctgcggagccaggagtacaagaaataccagacaaacaagacaaccggcaacaccgataagagagccttcgtcgagacctggcagtccttttaccggaagaagcttaaggaggtgtggaaacctgccgtgcggtctggcggatctggcggaggctccaagcccaggaccgtgagcttcgccgacgtggccgtgtacttcagcagggaggagtggggctgcctgaggcccgcccagagggccctgtacagggacgtgatgagggagacctacggccacctgggcgccctgggcttccccggccccaagcccgccctgatcagctggatggagcaggagaccgaggcctggagccccgccgcccaggaccccgagaagggcgagaggctgggcggcgccaggggcggcccaagcagcggcgcccctcctcccagcggcggcagcccagccggctccccaacctctaccgaggagggcacctctgagtccgccacccccgagagcggccctggcacctccaccgagcccagcgagggcagcgcacccggcagccctgccggcagccccacctccacagaggagggaaccagcaccgagcccagcgaaggcagcgccccaggcaccagcaccgagcctagtgagcaggagattaaacggatcaacaagatcagaagaagacttgtgaaagacagcaacaccaagaaggccggcaagacaggccccatgaaaaccctgctggttagagtgatgacacccgatctgagagagcggctggaaaacctgagaaagaagcctgaaaatatcccccagcccatcagcaatacatctagagccaacctgaataagctgctgaccgattacaccgaaatgaagaaggcgatcctgcatgtgtactgggaagagttccagaaggaccctgtgggcctgatgagccgggtggcccagcctgccagcaagaagatcgatcagaacaagctgaaacctgagatggacgagaagggcaacctgaccaccgccggctttgcctgctctcagtgtggccagcccctgttcgtgtacaagctggagcaggtgtctgagaagggcaaggcttacaccaactacttcggacggtgcaatgtggccgagcacgaaaagctgatcctgctggcccagctgaagcccgagaaggatagcgacgaagccgtgacatatagcctgggaaagtttgggcagagggccctggatttctacagcattcatgtgaccaaggagtccacccaccccgtgaagcccctggcccagatcgccggaaacagatacgcctccggacctgtgggaaaggccctgagcgacgcatgtatgggcacaatcgcctccttcctgtctaagtaccaggacatcatcatcgaacaccagaaggtggtgaagggcaaccagaagagactggagagcctgcgggagctggccggcaaggaaaacctggaataccctagcgtgaccctgccacctcagcctcacaccaaggagggcgttgatgcctacaacgaagtgatcgcccgggtgcgaatgtgggtgaacctgaacctgtggcagaagctgaagctaagcagagatgatgccaagcctctgctgagactgaagggattcccttcctttcctctggtcgagagacaggccaacgaagtggactggtgggacatggtgtgtaacgtgaagaagctgatcaacgagaaaaaggaggatggcaaggtgttttggcagaatctggctggctacaagagacaggaagccctgagaccatacctgagcagcgaggaagatcggaagaagggaaagaaattcgctcggtaccagctgggcgacctgctgctgcacctggaaaagaagcacggcgaggactggggaaaggtgtacgacgaggcctgggagcggattgacaagaaagtggaaggcctgagcaagcacatcaagctggaagaggaacggagaagcgaggacgcccagagcaaggccgccctgaccgactggctgcgggctaaggccagcttcgtgatcgagggcctgaaggaggccgacaaggacgagttctgcagatgcgagctgaagctgcagaagtggtacggggacctgcggggaaagcccttcgccatcgaagccgagaacagcatcctggacatcagcggcttcagcaagcagtacaactgtgccttcatctggcagaaggacggcgtgaagaagctgaacctgtacctgatcatcaactacttcaagggcggcaagctgcggttcaagaagatcaaacctgaagccttcgaagccaacagattctacaccgtgatcaacaaaaagagcggcgagatcgtgcccatggaggtgaacttcaacttcgacgaccccaacctgatcatcctgcctctggcctttggcaagagacagggcagagaattcatctggaacgacctgctgtccctggaaaccggcagcctgaagctggccaacggaagagtgatcgagaagacactgtacaacagaagaacccggcaggatgagcctgccctgttcgtggccctgaccttcgagcggcgggaggtcctggactcctccaatatcaaaccaatgaacctgatcggcgtggcaagaggcgaaaacatccccgccgtgatcgccctgaccgaccccgagggctgcccactgagccggtttaaggatagcctgggaaacccaacccacatcctgagaatcggcgagagctataaggagaagcagcggaccatccaggccaagaaggaggtggagcagcggagagccggcggctacagccggaagtacgccagcaaagccaagaatctggcagacgatatggtgagaaacaccgctagagatctgctgtactacgccgtgacccaggatgccatgctgatcttcgccaacctgagccggggcttcggccggcagggcaagcggaccttcatggccgagagacagtacacacggatggaggactggctgaccgccaagctggcctacgagggcctgagcaagacctacctgtccaagacactggcccagtacacctccaagacatgcagcaactgtgggtttaccatcaccagcgccgactacgacagggtgctggagaagctgaagaagacagcaacaggctggatgaccacaattaacggcaaggagctgaaggtggagggccagattacctactacaacagatacaagagacagaacgtagtcaaggacctgtccgtcgagctggatagactgagcgaagaatctgtgaacaacgacatctcctcctggacaaagggcagaagcggagaagctctgagcctcctgaagaaaagattctcccatagacccgtgcaggagaagttcgtgtgcctgaactgcggcttcgagacacacgcagccgagcaagccgccctgaacatcgccagatcctggctgttcctgcggagccaggagtacaagaaataccagacaaacaagacaaccggcaacaccgataagagagccttcgtcgagacctggcagtccttttaccggaagaagcttaaggaggtgtggaaacctgccgtgcggtctggcggatctggcggaggctcctaagcccaggaccgtgagcttcgccgacgtggccgtgtacttcagcagggaggagtggggctgcctgaggcccgcccagagggccctgtacagggacgtgatgagggagacctacggccacctgggcgccctgggcttccccggccccaagcccgccctgatcagctggatggagcaggagaccgaggcctggagccccgccgcccaggaccccgagaagggcgagaggctgggcggcgccaggggatctggctccggcagcggccccaagaaaaagagaaaagtctaagctgccttctgcggggcttgccttctggccatgcccttcttctctcccttgcacctgtacctcttggtctttgaataaagcctgagtaggaaggctagcaaaaaaaaaaaaaaaaaaaaaaaaaaaaaaaaaaaaaaaaaaaaaaaaaaaaaaaaaaaaaaaaaaaaaaaaaaaaaaaa

SEQ ID NO: 15494 - RNA, 9485 nt, synthetic construct
  source 1..9485: mol_type = other RNA
aggaaataagagagaaaagaagagtaagaagaaatataagagccaccatggcccctaagaagaagcgtaaagtgagccggatggaacgcctcgtctacgaggtgcggcagaagtgcagaaacatcgaggacatctgcatctcctgcggatctctgaacgtgaccctggagcacccactgttcatcggcggcatgtgccagaactgtaaaaactgttttctggagtgtgcctatcaatacgacgatgacggctaccagagctactgcaccatctgttgcggcggaagagaggtgctgatgtgtggaaataacaactgctgccggtgcttctgcgtggaatgcgtggacctgctggtgggccccggcgccgcccaggccgctattaaggaagatccttggaactgctacatgtgcggccacaagggcacatacggcctgctgagacggagagaggactggcctagcagactgcagatgttcttcgccaataaccacgaccaggagttcgacccccctaaggtgtaccctcccgtccccgccgagaagagaaagcccatccgggtcctgagcctgttcgatggcatcgccaccggtctgctggtgctgaaggacctgggcatccaggtggataggtacattgcctccgaggtgtgcgaggactccatcaccgtgggaatggtgcgtcatcagggcaagatcatgtacgtgggcgacgtgcggagcgtgacacagaagcatatccaggagtggggccctttcgacctggtgatcggcggcagcccttgcaatgacctgagcatcgtgaacccagcccggaagggcctgtacgagggaaccggcagactgttcttcgagttttacagactgctgcacgacgcccggcctaaggaaggcgacgaccggcccttcttttggctgttcgagaatgtggtggccatgggagtcagcgacaagcgggatattagccggttcctggagagcaaccccgtgatgatcgatgccaaggaagtgagcgccgcccaccgggccagatacttctggggcaatctgcctggcatgaacagacccctggccagcaccgtgaacgacaagctggagctgcaggagtgcctggagcacggccggatcgccaagttcagcaaggtgagaaccatcaccacccgaagcaacagcatcaaacaaggcaaggaccagcactttcctgtgttcatgaacgagaaggaggacatcctgtggtgtaccgagatggagagagtgttcgggttcccagtccactacacagatgtcagcaacatgtctagactggccagacagagactgctgggaagaagctggtccgtccctgtgatcagacacctgttcgcccctctgaaggagtacttcgcctgcgtgagcagcggcaacagcaacgccaacagccggggccccagcttctctagcggcctggtgccactgtccctgagagggagccacatgggccccatggagatctacaaaaccgtgagcgcctggaagcggcagcctgtgcgcgtgctgagcctgtttcggaatatcgataaagtcctgaaaagcctgggattcctggagagcggctctggctccggcggtggcaccctgaagtacgtggaggatgtgacaaacgtggtcagacgggatgtggagaagtggggccccttcgatctggtgtacggcagcacccaacccctgggcagctcttgtgaccggtgccctggctggtacatgtttcagttccaccggatcctgcagtacgccctgccgagacaggagtcccagcggccattcttttggattttcatggacaacttgctgctgaccgaggatgaccaggaaactaccactcggttcctgcagaccgaagccgtgaccctgcaggacgtgagaggccgggactaccagaacgccatgcgggtgtggtccaacatccctggactgaaaagcaagcacgcacctctgacccctaaagaagaggagtacctgcaggcccaggtgcggagcagaagcaagctggacgcccctaaggtggatctgctggtgaagaattgcctcctgcccctgagagagtacttcaagtatttcagccagaatagtctgcccctgggaggcagcggcggcggcgccctggtgacatttgaggacgtcgccgtgcggttcacccaggaggaatgggctctgctggatccttctcagaaaatcctgtaccgggacgtgatgagagagacataccggaatctgacctccgtgggcatcaactgggaatgttgggaccttgaagcctgcttcagaagcctgggaagaaacctgagagtgcaggtggtgaagagaaagtgcgagctgaccaacagcggcccctgcgccgagggcggcccaagcagcggcgcccctcctcccagcggcggcagcccagccggctccccaacctctaccgaggagggcacctctgagtccgccacccccgagagcggccctggcacctccaccgagcccagcgagggcagcgcacccggcagccctgccggcagccccacctccacagaggagggaaccagcaccgagcccagcgaaggcagcgccccaggcaccagcaccgagcctagtgagcaggagattaaacggatcaacaagatcagaagaagacttgtgaaagacagcaacaccaagaaggccggcaagacaggccccatgaaaaccctgctggttagagtgatgacacccgatctgagagagcggctggaaaacctgagaaagaagcctgaaaatatcccccagcccatcagcaatacatctagagccaacctgaataagctgctgaccgattacaccgaaatgaagaaggcgatcctgcatgtgtactgggaagagttccagaaggaccctgtgggcctgatgagccgggtggcccagcctgccagcaagaagatcgatcagaacaagctgaaacctgagatggacgagaagggcaacctgaccaccgccggctttgcctgctctcagtgtggccagcccctgttcgtgtacaagctggagcaggtgtctgagaagggcaaggcttacaccaactacttcggacggtgcaatgtggccgagcacgaaaagctgatcctgctggcccagctgaagcccgagaaggatagcgacgaagccgtgacatatagcctgggaaagtttgggcagagggccctggatttctacagcattcatgtgaccaaggagtccacccaccccgtgaagcccctggcccagatcgccggaaacagatacgcctccggacctgtgggaaaggccctgagcgacgcatgtatgggcacaatcgcctccttcctgtctaagtaccaggacatcatcatcgaacaccagaaggtggtgaagggcaaccagaagagactggagagcctgcgggagctggccggcaaggaaaacctggaataccctagcgtgaccctgccacctcagcctcacaccaaggagggcgttgatgcctacaacgaagtgatcgcccgggtgcgaatgtgggtgaacctgaacctgtggcagaagctgaagctaagcagagatgatgccaagcctctgctgagactgaagggattcccttcctttcctctggtcgagagacaggccaacgaagtggactggtgggacatggtgtgtaacgtgaagaagctgatcaacgagaaaaaggaggatggcaaggtgttttggcagaatctggctggctacaagagacaggaagccctgagaccatacctgagcagcgaggaagatcggaagaagggaaagaaattcgctcggtaccagctgggcgacctgctgctgcacctggaaaagaagcacggcgaggactggggaaaggtgtacgacgaggcctgggagcggattgacaagaaagtggaaggcctgagcaagcacatcaagctggaagaggaacggagaagcgaggacgcccagagcaaggccgccctgaccgactggctgcgggctaaggccagcttcgtgatcgagggcctgaaggaggccgacaaggacgagttctgcagatgcgagctgaagctgcagaagtggtacggggacctgcggggaaagcccttcgccatcgaagccgagaacagcatcctggacatcagcggcttcagcaagcagtacaactgtgccttcatctggcagaaggacggcgtgaagaagctgaacctgtacctgatcatcaactacttcaagggcggcaagctgcggttcaagaagatcaaacctgaagccttcgaagccaacagattctacaccgtgatcaacaaaaagagcggcgagatcgtgcccatggaggtgaacttcaacttcgacgaccccaacctgatcatcctgcctctggcctttggcaagagacagggcagagaattcatctggaacgacctgctgtccctggaaaccggcagcctgaagctggccaacggaagagtgatcgagaagacactgtacaacagaagaacccggcaggatgagcctgccctgttcgtggccctgaccttcgagcggcgggaggtcctggactcctccaatatcaaaccaatgaacctgatcggcgtggcaagaggcgaaaacatccccgccgtgatcgccctgaccgaccccgagggctgcccactgagccggtttaaggatagcctgggaaacccaacccacatcctgagaatcggcgagagctataaggagaagcagcggaccatccaggccaagaaggaggtggagcagcggagagccggcggctacagccggaagtacgccagcaaagccaagaatctggcagacgatatggtgagaaacaccgctagagatctgctgtactacgccgtgacccaggatgccatgctgatcttcgccaacctgagccggggcttcggccggcagggcaagcggaccttcatggccgagagacagtacacacggatggaggactggctgaccgccaagctggcctacgagggcctgagcaagacctacctgtccaagacactggcccagtacacctccaagacatgcagcaactgtgggtttaccatcaccagcgccgactacgacagggtgctggagaagctgaagaagacagcaacaggctggatgaccacaattaacggcaaggagctgaaggtggagggccagattacctactacaacagatacaagagacagaacgtagtcaaggacctgtccgtcgagctggatagactgagcgaagaatctgtgaacaacgacatctcctcctggacaaagggcagaagcggagaagctctgagcctcctgaagaaaagattctcccatagacccgtgcaggagaagttcgtgtgcctgaactgcggcttcgagacacacgcagccgagcaagccgccctgaacatcgccagatcctggctgttcctgcggagccaggagtacaagaaataccagacaaacaagacaaccggcaacaccgataagagagccttcgtcgagacctggcagtccttttaccggaagaagcttaaggaggtgtggaaacctgccgtgcggtctggcggatctggcggaggctcctgccaggccctggtgaccttcgaggacgtggccgtgaccttcaccgacgacgagtggaagaggctggtgcccgtgcagagggccctgtacaaggccgtgatgctggagaactacgagagcatcatcagcctgggcctgcccgtgcccaggcccgacctgatcctgcagttcaagaggaggggcgagccctggatgaggggcttccacggcagcgaggagaaggcctggcccgagagcgtgagcggcggcccaagcagcggcgcccctcctcccagcggcggcagcccagccggctccccaacctctaccgaggagggcacctctgagtccgccacccccgagagcggccctggcacctccaccgagcccagcgagggcagcgcacccggcagccctgccggcagccccacctccacagaggagggaaccagcaccgagcccagcgaaggcagcgccccaggcaccagcaccgagcctagtgagcaggagattaaacggatcaacaagatcagaagaagacttgtgaaagacagcaacaccaagaaggccggcaagacaggccccatgaaaaccctgctggttagagtgatgacacccgatctgagagagcggctggaaaacctgagaaagaagcctgaaaatatcccccagcccatcagcaatacatctagagccaacctgaataagctgctgaccgattacaccgaaatgaagaaggcgatcctgcatgtgtactgggaagagttccagaaggaccctgtgggcctgatgagccgggtggcccagcctgccagcaagaagatcgatcagaacaagctgaaacctgagatggacgagaagggcaacctgaccaccgccggctttgcctgctctcagtgtggccagcccctgttcgtgtacaagctggagcaggtgtctgagaagggcaaggcttacaccaactacttcggacggtgcaatgtggccgagcacgaaaagctgatcctgctggcccagctgaagcccgagaaggatagcgacgaagccgtgacatatagcctgggaaagtttgggcagagggccctggatttctacagcattcatgtgaccaaggagtccacccaccccgtgaagcccctggcccagatcgccggaaacagatacgcctccggacctgtgggaaaggccctgagcgacgcatgtatgggcacaatcgcctccttcctgtctaagtaccaggacatcatcatcgaacaccagaaggtggtgaagggcaaccagaagagactggagagcctgcgggagctggccggcaaggaaaacctggaataccctagcgtgaccctgccacctcagcctcacaccaaggagggcgttgatgcctacaacgaagtgatcgcccgggtgcgaatgtgggtgaacctgaacctgtggcagaagctgaagctaagcagagatgatgccaagcctctgctgagactgaagggattcccttcctttcctctggtcgagagacaggccaacgaagtggactggtgggacatggtgtgtaacgtgaagaagctgatcaacgagaaaaaggaggatggcaaggtgttttggcagaatctggctggctacaagagacaggaagccctgagaccatacctgagcagcgaggaagatcggaagaagggaaagaaattcgctcggtaccagctgggcgacctgctgctgcacctggaaaagaagcacggcgaggactggggaaaggtgtacgacgaggcctgggagcggattgacaagaaagtggaaggcctgagcaagcacatcaagctggaagaggaacggagaagcgaggacgcccagagcaaggccgccctgaccgactggctgcgggctaaggccagcttcgtgatcgagggcctgaaggaggccgacaaggacgagttctgcagatgcgagctgaagctgcagaagtggtacggggacctgcggggaaagcccttcgccatcgaagccgagaacagcatcctggacatcagcggcttcagcaagcagtacaactgtgccttcatctggcagaaggacggcgtgaagaagctgaacctgtacctgatcatcaactacttcaagggcggcaagctgcggttcaagaagatcaaacctgaagccttcgaagccaacagattctacaccgtgatcaacaaaaagagcggcgagatcgtgcccatggaggtgaacttcaacttcgacgaccccaacctgatcatcctgcctctggcctttggcaagagacagggcagagaattcatctggaacgacctgctgtccctggaaaccggcagcctgaagctggccaacggaagagtgatcgagaagacactgtacaacagaagaacccggcaggatgagcctgccctgttcgtggccctgaccttcgagcggcgggaggtcctggactcctccaatatcaaaccaatgaacctgatcggcgtggcaagaggcgaaaacatccccgccgtgatcgccctgaccgaccccgagggctgcccactgagccggtttaaggatagcctgggaaacccaacccacatcctgagaatcggcgagagctataaggagaagcagcggaccatccaggccaagaaggaggtggagcagcggagagccggcggctacagccggaagtacgccagcaaagccaagaatctggcagacgatatggtgagaaacaccgctagagatctgctgtactacgccgtgacccaggatgccatgctgatcttcgccaacctgagccggggcttcggccggcagggcaagcggaccttcatggccgagagacagtacacacggatggaggactggctgaccgccaagctggcctacgagggcctgagcaagacctacctgtccaagacactggcccagtacacctccaagacatgcagcaactgtgggtttaccatcaccagcgccgactacgacagggtgctggagaagctgaagaagacagcaacaggctggatgaccacaattaacggcaaggagctgaaggtggagggccagattacctactacaacagatacaagagacagaacgtagtcaaggacctgtccgtcgagctggatagactgagcgaagaatctgtgaacaacgacatctcctcctggacaaagggcagaagcggagaagctctgagcctcctgaagaaaagattctcccatagacccgtgcaggagaagttcgtgtgcctgaactgcggcttcgagacacacgcagccgagcaagccgccctgaacatcgccagatcctggctgttcctgcggagccaggagtacaagaaataccagacaaacaagacaaccggcaacaccgataagagagccttcgtcgagacctggcagtccttttaccggaagaagcttaaggaggtgtggaaacctgccgtgcggtctggcggatctggcggaggctccttgccaggccctggtgaccttcgaggacgtggccgtgaccttcaccgacgacgagtggaagaggctggtgcccgtgcagagggccctgtacaaggccgtgatgctggagaactacgagagcatcatcagcctgggcctgcccgtgcccaggcccgacctgatcctgcagttcaagaggaggggcgagccctggatgaggggcttccacggcagcgaggagaaggcctggcccgagagcgtgagcggatctggctccggcagcggccccaagaaaaagagaaaagtctaagctgccttctgcggggcttgccttctggccatgcccttcttctctcccttgcacctgtacctcttggtctttgaataaagcctgagtaggaaggctagcaaaaaaaaaaaaaaaaaaaaaaaaaaaaaaaaaaaaaaaaaaaaaaaaaaaaaaaaaaaaaaaaaaaaaaaaaaaaaaaa

SEQ ID NO: 15495 - RNA, 9485 nt, synthetic construct
  source 1..9485: mol_type = other RNA
aggaaataagagagaaaagaagagtaagaagaaatataagagccaccatggcccctaagaagaagcgtaaagtgagccggatggaacgcctcgtctacgaggtgcggcagaagtgcagaaacatcgaggacatctgcatctcctgcggatctctgaacgtgaccctggagcacccactgttcatcggcggcatgtgccagaactgtaaaaactgttttctggagtgtgcctatcaatacgacgatgacggctaccagagctactgcaccatctgttgcggcggaagagaggtgctgatgtgtggaaataacaactgctgccggtgcttctgcgtggaatgcgtggacctgctggtgggccccggcgccgcccaggccgctattaaggaagatccttggaactgctacatgtgcggccacaagggcacatacggcctgctgagacggagagaggactggcctagcagactgcagatgttcttcgccaataaccacgaccaggagttcgacccccctaaggtgtaccctcccgtccccgccgagaagagaaagcccatccgggtcctgagcctgttcgatggcatcgccaccggtctgctggtgctgaaggacctgggcatccaggtggataggtacattgcctccgaggtgtgcgaggactccatcaccgtgggaatggtgcgtcatcagggcaagatcatgtacgtgggcgacgtgcggagcgtgacacagaagcatatccaggagtggggccctttcgacctggtgatcggcggcagcccttgcaatgacctgagcatcgtgaacccagcccggaagggcctgtacgagggaaccggcagactgttcttcgagttttacagactgctgcacgacgcccggcctaaggaaggcgacgaccggcccttcttttggctgttcgagaatgtggtggccatgggagtcagcgacaagcgggatattagccggttcctggagagcaaccccgtgatgatcgatgccaaggaagtgagcgccgcccaccgggccagatacttctggggcaatctgcctggcatgaacagacccctggccagcaccgtgaacgacaagctggagctgcaggagtgcctggagcacggccggatcgccaagttcagcaaggtgagaaccatcaccacccgaagcaacagcatcaaacaaggcaaggaccagcactttcctgtgttcatgaacgagaaggaggacatcctgtggtgtaccgagatggagagagtgttcgggttcccagtccactacacagatgtcagcaacatgtctagactggccagacagagactgctgggaagaagctggtccgtccctgtgatcagacacctgttcgcccctctgaaggagtacttcgcctgcgtgagcagcggcaacagcaacgccaacagccggggccccagcttctctagcggcctggtgccactgtccctgagagggagccacatgggccccatggagatctacaaaaccgtgagcgcctggaagcggcagcctgtgcgcgtgctgagcctgtttcggaatatcgataaagtcctgaaaagcctgggattcctggagagcggctctggctccggcggtggcaccctgaagtacgtggaggatgtgacaaacgtggtcagacgggatgtggagaagtggggccccttcgatctggtgtacggcagcacccaacccctgggcagctcttgtgaccggtgccctggctggtacatgtttcagttccaccggatcctgcagtacgccctgccgagacaggagtcccagcggccattcttttggattttcatggacaacttgctgctgaccgaggatgaccaggaaactaccactcggttcctgcagaccgaagccgtgaccctgcaggacgtgagaggccgggactaccagaacgccatgcgggtgtggtccaacatccctggactgaaaagcaagcacgcacctctgacccctaaagaagaggagtacctgcaggcccaggtgcggagcagaagcaagctggacgcccctaaggtggatctgctggtgaagaattgcctcctgcccctgagagagtacttcaagtatttcagccagaatagtctgcccctgggaggcagcggcggcggcgccctggtgacatttgaggacgtcgccgtgcggttcacccaggaggaatgggctctgctggatccttctcagaaaatcctgtaccgggacgtgatgagagagacataccggaatctgacctccgtgggcatcaactgggaatgttgggaccttgaagcctgcttcagaagcctgggaagaaacctgagagtgcaggtggtgaagagaaagtgcgagctgaccaacagcggcccctgcgccgagggcggcccaagcagcggcgcccctcctcccagcggcggcagcccagccggctccccaacctctaccgaggagggcacctctgagtccgccacccccgagagcggccctggcacctccaccgagcccagcgagggcagcgcacccggcagccctgccggcagccccacctccacagaggagggaaccagcaccgagcccagcgaaggcagcgccccaggcaccagcaccgagcctagtgagcaggagattaaacggatcaacaagatcagaagaagacttgtgaaagacagcaacaccaagaaggccggcaagacaggccccatgaaaaccctgctggttagagtgatgacacccgatctgagagagcggctggaaaacctgagaaagaagcctgaaaatatcccccagcccatcagcaatacatctagagccaacctgaataagctgctgaccgattacaccgaaatgaagaaggcgatcctgcatgtgtactgggaagagttccagaaggaccctgtgggcctgatgagccgggtggcccagcctgccagcaagaagatcgatcagaacaagctgaaacctgagatggacgagaagggcaacctgaccaccgccggctttgcctgctctcagtgtggccagcccctgttcgtgtacaagctggagcaggtgtctgagaagggcaaggcttacaccaactacttcggacggtgcaatgtggccgagcacgaaaagctgatcctgctggcccagctgaagcccgagaaggatagcgacgaagccgtgacatatagcctgggaaagtttgggcagagggccctggatttctacagcattcatgtgaccaaggagtccacccaccccgtgaagcccctggcccagatcgccggaaacagatacgcctccggacctgtgggaaaggccctgagcgacgcatgtatgggcacaatcgcctccttcctgtctaagtaccaggacatcatcatcgaacaccagaaggtggtgaagggcaaccagaagagactggagagcctgcgggagctggccggcaaggaaaacctggaataccctagcgtgaccctgccacctcagcctcacaccaaggagggcgttgatgcctacaacgaagtgatcgcccgggtgcgaatgtgggtgaacctgaacctgtggcagaagctgaagctaagcagagatgatgccaagcctctgctgagactgaagggattcccttcctttcctctggtcgagagacaggccaacgaagtggactggtgggacatggtgtgtaacgtgaagaagctgatcaacgagaaaaaggaggatggcaaggtgttttggcagaatctggctggctacaagagacaggaagccctgagaccatacctgagcagcgaggaagatcggaagaagggaaagaaattcgctcggtaccagctgggcgacctgctgctgcacctggaaaagaagcacggcgaggactggggaaaggtgtacgacgaggcctgggagcggattgacaagaaagtggaaggcctgagcaagcacatcaagctggaagaggaacggagaagcgaggacgcccagagcaaggccgccctgaccgactggctgcgggctaaggccagcttcgtgatcgagggcctgaaggaggccgacaaggacgagttctgcagatgcgagctgaagctgcagaagtggtacggggacctgcggggaaagcccttcgccatcgaagccgagaacagcatcctggacatcagcggcttcagcaagcagtacaactgtgccttcatctggcagaaggacggcgtgaagaagctgaacctgtacctgatcatcaactacttcaagggcggcaagctgcggttcaagaagatcaaacctgaagccttcgaagccaacagattctacaccgtgatcaacaaaaagagcggcgagatcgtgcccatggaggtgaacttcaacttcgacgaccccaacctgatcatcctgcctctggcctttggcaagagacagggcagagaattcatctggaacgacctgctgtccctggaaaccggcagcctgaagctggccaacggaagagtgatcgagaagacactgtacaacagaagaacccggcaggatgagcctgccctgttcgtggccctgaccttcgagcggcgggaggtcctggactcctccaatatcaaaccaatgaacctgatcggcgtggcaagaggcgaaaacatccccgccgtgatcgccctgaccgaccccgagggctgcccactgagccggtttaaggatagcctgggaaacccaacccacatcctgagaatcggcgagagctataaggagaagcagcggaccatccaggccaagaaggaggtggagcagcggagagccggcggctacagccggaagtacgccagcaaagccaagaatctggcagacgatatggtgagaaacaccgctagagatctgctgtactacgccgtgacccaggatgccatgctgatcttcgccaacctgagccggggcttcggccggcagggcaagcggaccttcatggccgagagacagtacacacggatggaggactggctgaccgccaagctggcctacgagggcctgagcaagacctacctgtccaagacactggcccagtacacctccaagacatgcagcaactgtgggtttaccatcaccagcgccgactacgacagggtgctggagaagctgaagaagacagcaacaggctggatgaccacaattaacggcaaggagctgaaggtggagggccagattacctactacaacagatacaagagacagaacgtagtcaaggacctgtccgtcgagctggatagactgagcgaagaatctgtgaacaacgacatctcctcctggacaaagggcagaagcggagaagctctgagcctcctgaagaaaagattctcccatagacccgtgcaggagaagttcgtgtgcctgaactgcggcttcgagacacacgcagccgagcaagccgccctgaacatcgccagatcctggctgttcctgcggagccaggagtacaagaaataccagacaaacaagacaaccggcaacaccgataagagagccttcgtcgagacctggcagtccttttaccggaagaagcttaaggaggtgtggaaacctgccgtgcggtctggcggatctggcggaggctcccaggccgaggtgaccttcgaggacgtggccgtgctgttcagcagggaggagtggggcaggctgggccccgcccagaggggcctgtacagggacgtgatgctggagacctacaggaacctggtgagcctgggcgccggccccgccggccccaagcccggcgtgatcacccagctggagaggggcgacgagccctgggtgctggacacccagggcgccaagggcaaggagaggctgagggtgagcggcggcccaagcagcggcgcccctcctcccagcggcggcagcccagccggctccccaacctctaccgaggagggcacctctgagtccgccacccccgagagcggccctggcacctccaccgagcccagcgagggcagcgcacccggcagccctgccggcagccccacctccacagaggagggaaccagcaccgagcccagcgaaggcagcgccccaggcaccagcaccgagcctagtgagcaggagattaaacggatcaacaagatcagaagaagacttgtgaaagacagcaacaccaagaaggccggcaagacaggccccatgaaaaccctgctggttagagtgatgacacccgatctgagagagcggctggaaaacctgagaaagaagcctgaaaatatcccccagcccatcagcaatacatctagagccaacctgaataagctgctgaccgattacaccgaaatgaagaaggcgatcctgcatgtgtactgggaagagttccagaaggaccctgtgggcctgatgagccgggtggcccagcctgccagcaagaagatcgatcagaacaagctgaaacctgagatggacgagaagggcaacctgaccaccgccggctttgcctgctctcagtgtggccagcccctgttcgtgtacaagctggagcaggtgtctgagaagggcaaggcttacaccaactacttcggacggtgcaatgtggccgagcacgaaaagctgatcctgctggcccagctgaagcccgagaaggatagcgacgaagccgtgacatatagcctgggaaagtttgggcagagggccctggatttctacagcattcatgtgaccaaggagtccacccaccccgtgaagcccctggcccagatcgccggaaacagatacgcctccggacctgtgggaaaggccctgagcgacgcatgtatgggcacaatcgcctccttcctgtctaagtaccaggacatcatcatcgaacaccagaaggtggtgaagggcaaccagaagagactggagagcctgcgggagctggccggcaaggaaaacctggaataccctagcgtgaccctgccacctcagcctcacaccaaggagggcgttgatgcctacaacgaagtgatcgcccgggtgcgaatgtgggtgaacctgaacctgtggcagaagctgaagctaagcagagatgatgccaagcctctgctgagactgaagggattcccttcctttcctctggtcgagagacaggccaacgaagtggactggtgggacatggtgtgtaacgtgaagaagctgatcaacgagaaaaaggaggatggcaaggtgttttggcagaatctggctggctacaagagacaggaagccctgagaccatacctgagcagcgaggaagatcggaagaagggaaagaaattcgctcggtaccagctgggcgacctgctgctgcacctggaaaagaagcacggcgaggactggggaaaggtgtacgacgaggcctgggagcggattgacaagaaagtggaaggcctgagcaagcacatcaagctggaagaggaacggagaagcgaggacgcccagagcaaggccgccctgaccgactggctgcgggctaaggccagcttcgtgatcgagggcctgaaggaggccgacaaggacgagttctgcagatgcgagctgaagctgcagaagtggtacggggacctgcggggaaagcccttcgccatcgaagccgagaacagcatcctggacatcagcggcttcagcaagcagtacaactgtgccttcatctggcagaaggacggcgtgaagaagctgaacctgtacctgatcatcaactacttcaagggcggcaagctgcggttcaagaagatcaaacctgaagccttcgaagccaacagattctacaccgtgatcaacaaaaagagcggcgagatcgtgcccatggaggtgaacttcaacttcgacgaccccaacctgatcatcctgcctctggcctttggcaagagacagggcagagaattcatctggaacgacctgctgtccctggaaaccggcagcctgaagctggccaacggaagagtgatcgagaagacactgtacaacagaagaacccggcaggatgagcctgccctgttcgtggccctgaccttcgagcggcgggaggtcctggactcctccaatatcaaaccaatgaacctgatcggcgtggcaagaggcgaaaacatccccgccgtgatcgccctgaccgaccccgagggctgcccactgagccggtttaaggatagcctgggaaacccaacccacatcctgagaatcggcgagagctataaggagaagcagcggaccatccaggccaagaaggaggtggagcagcggagagccggcggctacagccggaagtacgccagcaaagccaagaatctggcagacgatatggtgagaaacaccgctagagatctgctgtactacgccgtgacccaggatgccatgctgatcttcgccaacctgagccggggcttcggccggcagggcaagcggaccttcatggccgagagacagtacacacggatggaggactggctgaccgccaagctggcctacgagggcctgagcaagacctacctgtccaagacactggcccagtacacctccaagacatgcagcaactgtgggtttaccatcaccagcgccgactacgacagggtgctggagaagctgaagaagacagcaacaggctggatgaccacaattaacggcaaggagctgaaggtggagggccagattacctactacaacagatacaagagacagaacgtagtcaaggacctgtccgtcgagctggatagactgagcgaagaatctgtgaacaacgacatctcctcctggacaaagggcagaagcggagaagctctgagcctcctgaagaaaagattctcccatagacccgtgcaggagaagttcgtgtgcctgaactgcggcttcgagacacacgcagccgagcaagccgccctgaacatcgccagatcctggctgttcctgcggagccaggagtacaagaaataccagacaaacaagacaaccggcaacaccgataagagagccttcgtcgagacctggcagtccttttaccggaagaagcttaaggaggtgtggaaacctgccgtgcggtctggcggatctggcggaggctcctcaggccgaggtgaccttcgaggacgtggccgtgctgttcagcagggaggagtggggcaggctgggccccgcccagaggggcctgtacagggacgtgatgctggagacctacaggaacctggtgagcctgggcgccggccccgccggccccaagcccggcgtgatcacccagctggagaggggcgacgagccctgggtgctggacacccagggcgccaagggcaaggagaggctgagggtgagcggatctggctccggcagcggccccaagaaaaagagaaaagtctaagctgccttctgcggggcttgccttctggccatgcccttcttctctcccttgcacctgtacctcttggtctttgaataaagcctgagtaggaaggctagcaaaaaaaaaaaaaaaaaaaaaaaaaaaaaaaaaaaaaaaaaaaaaaaaaaaaaaaaaaaaaaaaaaaaaaaaaaaaaaaa

SEQ ID NO: 15496 - RNA, 9485 nt, synthetic construct
  source 1..9485: mol_type = other RNA
aggaaataagagagaaaagaagagtaagaagaaatataagagccaccatggcccctaagaagaagcgtaaagtgagccggatggaacgcctcgtctacgaggtgcggcagaagtgcagaaacatcgaggacatctgcatctcctgcggatctctgaacgtgaccctggagcacccactgttcatcggcggcatgtgccagaactgtaaaaactgttttctggagtgtgcctatcaatacgacgatgacggctaccagagctactgcaccatctgttgcggcggaagagaggtgctgatgtgtggaaataacaactgctgccggtgcttctgcgtggaatgcgtggacctgctggtgggccccggcgccgcccaggccgctattaaggaagatccttggaactgctacatgtgcggccacaagggcacatacggcctgctgagacggagagaggactggcctagcagactgcagatgttcttcgccaataaccacgaccaggagttcgacccccctaaggtgtaccctcccgtccccgccgagaagagaaagcccatccgggtcctgagcctgttcgatggcatcgccaccggtctgctggtgctgaaggacctgggcatccaggtggataggtacattgcctccgaggtgtgcgaggactccatcaccgtgggaatggtgcgtcatcagggcaagatcatgtacgtgggcgacgtgcggagcgtgacacagaagcatatccaggagtggggccctttcgacctggtgatcggcggcagcccttgcaatgacctgagcatcgtgaacccagcccggaagggcctgtacgagggaaccggcagactgttcttcgagttttacagactgctgcacgacgcccggcctaaggaaggcgacgaccggcccttcttttggctgttcgagaatgtggtggccatgggagtcagcgacaagcgggatattagccggttcctggagagcaaccccgtgatgatcgatgccaaggaagtgagcgccgcccaccgggccagatacttctggggcaatctgcctggcatgaacagacccctggccagcaccgtgaacgacaagctggagctgcaggagtgcctggagcacggccggatcgccaagttcagcaaggtgagaaccatcaccacccgaagcaacagcatcaaacaaggcaaggaccagcactttcctgtgttcatgaacgagaaggaggacatcctgtggtgtaccgagatggagagagtgttcgggttcccagtccactacacagatgtcagcaacatgtctagactggccagacagagactgctgggaagaagctggtccgtccctgtgatcagacacctgttcgcccctctgaaggagtacttcgcctgcgtgagcagcggcaacagcaacgccaacagccggggccccagcttctctagcggcctggtgccactgtccctgagagggagccacatgggccccatggagatctacaaaaccgtgagcgcctggaagcggcagcctgtgcgcgtgctgagcctgtttcggaatatcgataaagtcctgaaaagcctgggattcctggagagcggctctggctccggcggtggcaccctgaagtacgtggaggatgtgacaaacgtggtcagacgggatgtggagaagtggggccccttcgatctggtgtacggcagcacccaacccctgggcagctcttgtgaccggtgccctggctggtacatgtttcagttccaccggatcctgcagtacgccctgccgagacaggagtcccagcggccattcttttggattttcatggacaacttgctgctgaccgaggatgaccaggaaactaccactcggttcctgcagaccgaagccgtgaccctgcaggacgtgagaggccgggactaccagaacgccatgcgggtgtggtccaacatccctggactgaaaagcaagcacgcacctctgacccctaaagaagaggagtacctgcaggcccaggtgcggagcagaagcaagctggacgcccctaaggtggatctgctggtgaagaattgcctcctgcccctgagagagtacttcaagtatttcagccagaatagtctgcccctgggaggcagcggcggcggcgccctggtgacatttgaggacgtcgccgtgcggttcacccaggaggaatgggctctgctggatccttctcagaaaatcctgtaccgggacgtgatgagagagacataccggaatctgacctccgtgggcatcaactgggaatgttgggaccttgaagcctgcttcagaagcctgggaagaaacctgagagtgcaggtggtgaagagaaagtgcgagctgaccaacagcggcccctgcgccgagggcggcccaagcagcggcgcccctcctcccagcggcggcagcccagccggctccccaacctctaccgaggagggcacctctgagtccgccacccccgagagcggccctggcacctccaccgagcccagcgagggcagcgcacccggcagccctgccggcagccccacctccacagaggagggaaccagcaccgagcccagcgaaggcagcgccccaggcaccagcaccgagcctagtgagcaggagattaaacggatcaacaagatcagaagaagacttgtgaaagacagcaacaccaagaaggccggcaagacaggccccatgaaaaccctgctggttagagtgatgacacccgatctgagagagcggctggaaaacctgagaaagaagcctgaaaatatcccccagcccatcagcaatacatctagagccaacctgaataagctgctgaccgattacaccgaaatgaagaaggcgatcctgcatgtgtactgggaagagttccagaaggaccctgtgggcctgatgagccgggtggcccagcctgccagcaagaagatcgatcagaacaagctgaaacctgagatggacgagaagggcaacctgaccaccgccggctttgcctgctctcagtgtggccagcccctgttcgtgtacaagctggagcaggtgtctgagaagggcaaggcttacaccaactacttcggacggtgcaatgtggccgagcacgaaaagctgatcctgctggcccagctgaagcccgagaaggatagcgacgaagccgtgacatatagcctgggaaagtttgggcagagggccctggatttctacagcattcatgtgaccaaggagtccacccaccccgtgaagcccctggcccagatcgccggaaacagatacgcctccggacctgtgggaaaggccctgagcgacgcatgtatgggcacaatcgcctccttcctgtctaagtaccaggacatcatcatcgaacaccagaaggtggtgaagggcaaccagaagagactggagagcctgcgggagctggccggcaaggaaaacctggaataccctagcgtgaccctgccacctcagcctcacaccaaggagggcgttgatgcctacaacgaagtgatcgcccgggtgcgaatgtgggtgaacctgaacctgtggcagaagctgaagctaagcagagatgatgccaagcctctgctgagactgaagggattcccttcctttcctctggtcgagagacaggccaacgaagtggactggtgggacatggtgtgtaacgtgaagaagctgatcaacgagaaaaaggaggatggcaaggtgttttggcagaatctggctggctacaagagacaggaagccctgagaccatacctgagcagcgaggaagatcggaagaagggaaagaaattcgctcggtaccagctgggcgacctgctgctgcacctggaaaagaagcacggcgaggactggggaaaggtgtacgacgaggcctgggagcggattgacaagaaagtggaaggcctgagcaagcacatcaagctggaagaggaacggagaagcgaggacgcccagagcaaggccgccctgaccgactggctgcgggctaaggccagcttcgtgatcgagggcctgaaggaggccgacaaggacgagttctgcagatgcgagctgaagctgcagaagtggtacggggacctgcggggaaagcccttcgccatcgaagccgagaacagcatcctggacatcagcggcttcagcaagcagtacaactgtgccttcatctggcagaaggacggcgtgaagaagctgaacctgtacctgatcatcaactacttcaagggcggcaagctgcggttcaagaagatcaaacctgaagccttcgaagccaacagattctacaccgtgatcaacaaaaagagcggcgagatcgtgcccatggaggtgaacttcaacttcgacgaccccaacctgatcatcctgcctctggcctttggcaagagacagggcagagaattcatctggaacgacctgctgtccctggaaaccggcagcctgaagctggccaacggaagagtgatcgagaagacactgtacaacagaagaacccggcaggatgagcctgccctgttcgtggccctgaccttcgagcggcgggaggtcctggactcctccaatatcaaaccaatgaacctgatcggcgtggcaagaggcgaaaacatccccgccgtgatcgccctgaccgaccccgagggctgcccactgagccggtttaaggatagcctgggaaacccaacccacatcctgagaatcggcgagagctataaggagaagcagcggaccatccaggccaagaaggaggtggagcagcggagagccggcggctacagccggaagtacgccagcaaagccaagaatctggcagacgatatggtgagaaacaccgctagagatctgctgtactacgccgtgacccaggatgccatgctgatcttcgccaacctgagccggggcttcggccggcagggcaagcggaccttcatggccgagagacagtacacacggatggaggactggctgaccgccaagctggcctacgagggcctgagcaagacctacctgtccaagacactggcccagtacacctccaagacatgcagcaactgtgggtttaccatcaccagcgccgactacgacagggtgctggagaagctgaagaagacagcaacaggctggatgaccacaattaacggcaaggagctgaaggtggagggccagattacctactacaacagatacaagagacagaacgtagtcaaggacctgtccgtcgagctggatagactgagcgaagaatctgtgaacaacgacatctcctcctggacaaagggcagaagcggagaagctctgagcctcctgaagaaaagattctcccatagacccgtgcaggagaagttcgtgtgcctgaactgcggcttcgagacacacgcagccgagcaagccgccctgaacatcgccagatcctggctgttcctgcggagccaggagtacaagaaataccagacaaacaagacaaccggcaacaccgataagagagccttcgtcgagacctggcagtccttttaccggaagaagcttaaggaggtgtggaaacctgccgtgcggtctggcggatctggcggaggctccaagcccggcgccctgagcttcgccgacgtggccgtgtacttcagcagcgaggagtggggctgcctgaggcccgcccagagggccctgtacagggacgtgatgagggagacctacggccacctgggcgccctgggcttcgccggccccaagcccgccctgatcagctggatggagaggaagaaggaggcctggagccccgaggccgaggaccccgaggacagggccagcaggatcagggccaagggcggcccaagcagcggcgcccctcctcccagcggcggcagcccagccggctccccaacctctaccgaggagggcacctctgagtccgccacccccgagagcggccctggcacctccaccgagcccagcgagggcagcgcacccggcagccctgccggcagccccacctccacagaggagggaaccagcaccgagcccagcgaaggcagcgccccaggcaccagcaccgagcctagtgagcaggagattaaacggatcaacaagatcagaagaagacttgtgaaagacagcaacaccaagaaggccggcaagacaggccccatgaaaaccctgctggttagagtgatgacacccgatctgagagagcggctggaaaacctgagaaagaagcctgaaaatatcccccagcccatcagcaatacatctagagccaacctgaataagctgctgaccgattacaccgaaatgaagaaggcgatcctgcatgtgtactgggaagagttccagaaggaccctgtgggcctgatgagccgggtggcccagcctgccagcaagaagatcgatcagaacaagctgaaacctgagatggacgagaagggcaacctgaccaccgccggctttgcctgctctcagtgtggccagcccctgttcgtgtacaagctggagcaggtgtctgagaagggcaaggcttacaccaactacttcggacggtgcaatgtggccgagcacgaaaagctgatcctgctggcccagctgaagcccgagaaggatagcgacgaagccgtgacatatagcctgggaaagtttgggcagagggccctggatttctacagcattcatgtgaccaaggagtccacccaccccgtgaagcccctggcccagatcgccggaaacagatacgcctccggacctgtgggaaaggccctgagcgacgcatgtatgggcacaatcgcctccttcctgtctaagtaccaggacatcatcatcgaacaccagaaggtggtgaagggcaaccagaagagactggagagcctgcgggagctggccggcaaggaaaacctggaataccctagcgtgaccctgccacctcagcctcacaccaaggagggcgttgatgcctacaacgaagtgatcgcccgggtgcgaatgtgggtgaacctgaacctgtggcagaagctgaagctaagcagagatgatgccaagcctctgctgagactgaagggattcccttcctttcctctggtcgagagacaggccaacgaagtggactggtgggacatggtgtgtaacgtgaagaagctgatcaacgagaaaaaggaggatggcaaggtgttttggcagaatctggctggctacaagagacaggaagccctgagaccatacctgagcagcgaggaagatcggaagaagggaaagaaattcgctcggtaccagctgggcgacctgctgctgcacctggaaaagaagcacggcgaggactggggaaaggtgtacgacgaggcctgggagcggattgacaagaaagtggaaggcctgagcaagcacatcaagctggaagaggaacggagaagcgaggacgcccagagcaaggccgccctgaccgactggctgcgggctaaggccagcttcgtgatcgagggcctgaaggaggccgacaaggacgagttctgcagatgcgagctgaagctgcagaagtggtacggggacctgcggggaaagcccttcgccatcgaagccgagaacagcatcctggacatcagcggcttcagcaagcagtacaactgtgccttcatctggcagaaggacggcgtgaagaagctgaacctgtacctgatcatcaactacttcaagggcggcaagctgcggttcaagaagatcaaacctgaagccttcgaagccaacagattctacaccgtgatcaacaaaaagagcggcgagatcgtgcccatggaggtgaacttcaacttcgacgaccccaacctgatcatcctgcctctggcctttggcaagagacagggcagagaattcatctggaacgacctgctgtccctggaaaccggcagcctgaagctggccaacggaagagtgatcgagaagacactgtacaacagaagaacccggcaggatgagcctgccctgttcgtggccctgaccttcgagcggcgggaggtcctggactcctccaatatcaaaccaatgaacctgatcggcgtggcaagaggcgaaaacatccccgccgtgatcgccctgaccgaccccgagggctgcccactgagccggtttaaggatagcctgggaaacccaacccacatcctgagaatcggcgagagctataaggagaagcagcggaccatccaggccaagaaggaggtggagcagcggagagccggcggctacagccggaagtacgccagcaaagccaagaatctggcagacgatatggtgagaaacaccgctagagatctgctgtactacgccgtgacccaggatgccatgctgatcttcgccaacctgagccggggcttcggccggcagggcaagcggaccttcatggccgagagacagtacacacggatggaggactggctgaccgccaagctggcctacgagggcctgagcaagacctacctgtccaagacactggcccagtacacctccaagacatgcagcaactgtgggtttaccatcaccagcgccgactacgacagggtgctggagaagctgaagaagacagcaacaggctggatgaccacaattaacggcaaggagctgaaggtggagggccagattacctactacaacagatacaagagacagaacgtagtcaaggacctgtccgtcgagctggatagactgagcgaagaatctgtgaacaacgacatctcctcctggacaaagggcagaagcggagaagctctgagcctcctgaagaaaagattctcccatagacccgtgcaggagaagttcgtgtgcctgaactgcggcttcgagacacacgcagccgagcaagccgccctgaacatcgccagatcctggctgttcctgcggagccaggagtacaagaaataccagacaaacaagacaaccggcaacaccgataagagagccttcgtcgagacctggcagtccttttaccggaagaagcttaaggaggtgtggaaacctgccgtgcggtctggcggatctggcggaggctcctaagcccggcgccctgagcttcgccgacgtggccgtgtacttcagcagcgaggagtggggctgcctgaggcccgcccagagggccctgtacagggacgtgatgagggagacctacggccacctgggcgccctgggcttcgccggccccaagcccgccctgatcagctggatggagaggaagaaggaggcctggagccccgaggccgaggaccccgaggacagggccagcaggatcagggccaagggatctggctccggcagcggccccaagaaaaagagaaaagtctaagctgccttctgcggggcttgccttctggccatgcccttcttctctcccttgcacctgtacctcttggtctttgaataaagcctgagtaggaaggctagcaaaaaaaaaaaaaaaaaaaaaaaaaaaaaaaaaaaaaaaaaaaaaaaaaaaaaaaaaaaaaaaaaaaaaaaaaaaaaaaa

SEQ ID NO: 15497 - RNA, 9485 nt, synthetic construct
  source 1..9485: mol_type = other RNA
aggaaataagagagaaaagaagagtaagaagaaatataagagccaccatggcccctaagaagaagcgtaaagtgagccggatggaacgcctcgtctacgaggtgcggcagaagtgcagaaacatcgaggacatctgcatctcctgcggatctctgaacgtgaccctggagcacccactgttcatcggcggcatgtgccagaactgtaaaaactgttttctggagtgtgcctatcaatacgacgatgacggctaccagagctactgcaccatctgttgcggcggaagagaggtgctgatgtgtggaaataacaactgctgccggtgcttctgcgtggaatgcgtggacctgctggtgggccccggcgccgcccaggccgctattaaggaagatccttggaactgctacatgtgcggccacaagggcacatacggcctgctgagacggagagaggactggcctagcagactgcagatgttcttcgccaataaccacgaccaggagttcgacccccctaaggtgtaccctcccgtccccgccgagaagagaaagcccatccgggtcctgagcctgttcgatggcatcgccaccggtctgctggtgctgaaggacctgggcatccaggtggataggtacattgcctccgaggtgtgcgaggactccatcaccgtgggaatggtgcgtcatcagggcaagatcatgtacgtgggcgacgtgcggagcgtgacacagaagcatatccaggagtggggccctttcgacctggtgatcggcggcagcccttgcaatgacctgagcatcgtgaacccagcccggaagggcctgtacgagggaaccggcagactgttcttcgagttttacagactgctgcacgacgcccggcctaaggaaggcgacgaccggcccttcttttggctgttcgagaatgtggtggccatgggagtcagcgacaagcgggatattagccggttcctggagagcaaccccgtgatgatcgatgccaaggaagtgagcgccgcccaccgggccagatacttctggggcaatctgcctggcatgaacagacccctggccagcaccgtgaacgacaagctggagctgcaggagtgcctggagcacggccggatcgccaagttcagcaaggtgagaaccatcaccacccgaagcaacagcatcaaacaaggcaaggaccagcactttcctgtgttcatgaacgagaaggaggacatcctgtggtgtaccgagatggagagagtgttcgggttcccagtccactacacagatgtcagcaacatgtctagactggccagacagagactgctgggaagaagctggtccgtccctgtgatcagacacctgttcgcccctctgaaggagtacttcgcctgcgtgagcagcggcaacagcaacgccaacagccggggccccagcttctctagcggcctggtgccactgtccctgagagggagccacatgggccccatggagatctacaaaaccgtgagcgcctggaagcggcagcctgtgcgcgtgctgagcctgtttcggaatatcgataaagtcctgaaaagcctgggattcctggagagcggctctggctccggcggtggcaccctgaagtacgtggaggatgtgacaaacgtggtcagacgggatgtggagaagtggggccccttcgatctggtgtacggcagcacccaacccctgggcagctcttgtgaccggtgccctggctggtacatgtttcagttccaccggatcctgcagtacgccctgccgagacaggagtcccagcggccattcttttggattttcatggacaacttgctgctgaccgaggatgaccaggaaactaccactcggttcctgcagaccgaagccgtgaccctgcaggacgtgagaggccgggactaccagaacgccatgcgggtgtggtccaacatccctggactgaaaagcaagcacgcacctctgacccctaaagaagaggagtacctgcaggcccaggtgcggagcagaagcaagctggacgcccctaaggtggatctgctggtgaagaattgcctcctgcccctgagagagtacttcaagtatttcagccagaatagtctgcccctgggaggcagcggcggcggcgccctggtgacatttgaggacgtcgccgtgcggttcacccaggaggaatgggctctgctggatccttctcagaaaatcctgtaccgggacgtgatgagagagacataccggaatctgacctccgtgggcatcaactgggaatgttgggaccttgaagcctgcttcagaagcctgggaagaaacctgagagtgcaggtggtgaagagaaagtgcgagctgaccaacagcggcccctgcgccgagggcggcccaagcagcggcgcccctcctcccagcggcggcagcccagccggctccccaacctctaccgaggagggcacctctgagtccgccacccccgagagcggccctggcacctccaccgagcccagcgagggcagcgcacccggcagccctgccggcagccccacctccacagaggagggaaccagcaccgagcccagcgaaggcagcgccccaggcaccagcaccgagcctagtgagcaggagattaaacggatcaacaagatcagaagaagacttgtgaaagacagcaacaccaagaaggccggcaagacaggccccatgaaaaccctgctggttagagtgatgacacccgatctgagagagcggctggaaaacctgagaaagaagcctgaaaatatcccccagcccatcagcaatacatctagagccaacctgaataagctgctgaccgattacaccgaaatgaagaaggcgatcctgcatgtgtactgggaagagttccagaaggaccctgtgggcctgatgagccgggtggcccagcctgccagcaagaagatcgatcagaacaagctgaaacctgagatggacgagaagggcaacctgaccaccgccggctttgcctgctctcagtgtggccagcccctgttcgtgtacaagctggagcaggtgtctgagaagggcaaggcttacaccaactacttcggacggtgcaatgtggccgagcacgaaaagctgatcctgctggcccagctgaagcccgagaaggatagcgacgaagccgtgacatatagcctgggaaagtttgggcagagggccctggatttctacagcattcatgtgaccaaggagtccacccaccccgtgaagcccctggcccagatcgccggaaacagatacgcctccggacctgtgggaaaggccctgagcgacgcatgtatgggcacaatcgcctccttcctgtctaagtaccaggacatcatcatcgaacaccagaaggtggtgaagggcaaccagaagagactggagagcctgcgggagctggccggcaaggaaaacctggaataccctagcgtgaccctgccacctcagcctcacaccaaggagggcgttgatgcctacaacgaagtgatcgcccgggtgcgaatgtgggtgaacctgaacctgtggcagaagctgaagctaagcagagatgatgccaagcctctgctgagactgaagggattcccttcctttcctctggtcgagagacaggccaacgaagtggactggtgggacatggtgtgtaacgtgaagaagctgatcaacgagaaaaaggaggatggcaaggtgttttggcagaatctggctggctacaagagacaggaagccctgagaccatacctgagcagcgaggaagatcggaagaagggaaagaaattcgctcggtaccagctgggcgacctgctgctgcacctggaaaagaagcacggcgaggactggggaaaggtgtacgacgaggcctgggagcggattgacaagaaagtggaaggcctgagcaagcacatcaagctggaagaggaacggagaagcgaggacgcccagagcaaggccgccctgaccgactggctgcgggctaaggccagcttcgtgatcgagggcctgaaggaggccgacaaggacgagttctgcagatgcgagctgaagctgcagaagtggtacggggacctgcggggaaagcccttcgccatcgaagccgagaacagcatcctggacatcagcggcttcagcaagcagtacaactgtgccttcatctggcagaaggacggcgtgaagaagctgaacctgtacctgatcatcaactacttcaagggcggcaagctgcggttcaagaagatcaaacctgaagccttcgaagccaacagattctacaccgtgatcaacaaaaagagcggcgagatcgtgcccatggaggtgaacttcaacttcgacgaccccaacctgatcatcctgcctctggcctttggcaagagacagggcagagaattcatctggaacgacctgctgtccctggaaaccggcagcctgaagctggccaacggaagagtgatcgagaagacactgtacaacagaagaacccggcaggatgagcctgccctgttcgtggccctgaccttcgagcggcgggaggtcctggactcctccaatatcaaaccaatgaacctgatcggcgtggcaagaggcgaaaacatccccgccgtgatcgccctgaccgaccccgagggctgcccactgagccggtttaaggatagcctgggaaacccaacccacatcctgagaatcggcgagagctataaggagaagcagcggaccatccaggccaagaaggaggtggagcagcggagagccggcggctacagccggaagtacgccagcaaagccaagaatctggcagacgatatggtgagaaacaccgctagagatctgctgtactacgccgtgacccaggatgccatgctgatcttcgccaacctgagccggggcttcggccggcagggcaagcggaccttcatggccgagagacagtacacacggatggaggactggctgaccgccaagctggcctacgagggcctgagcaagacctacctgtccaagacactggcccagtacacctccaagacatgcagcaactgtgggtttaccatcaccagcgccgactacgacagggtgctggagaagctgaagaagacagcaacaggctggatgaccacaattaacggcaaggagctgaaggtggagggccagattacctactacaacagatacaagagacagaacgtagtcaaggacctgtccgtcgagctggatagactgagcgaagaatctgtgaacaacgacatctcctcctggacaaagggcagaagcggagaagctctgagcctcctgaagaaaagattctcccatagacccgtgcaggagaagttcgtgtgcctgaactgcggcttcgagacacacgcagccgagcaagccgccctgaacatcgccagatcctggctgttcctgcggagccaggagtacaagaaataccagacaaacaagacaaccggcaacaccgataagagagccttcgtcgagacctggcagtccttttaccggaagaagcttaaggaggtgtggaaacctgccgtgcggtctggcggatctggcggaggctccttccaggagagcgtgaccttcgaggacgtggccgtgtacttcacccagagccagtgggccagcctgggccccctgcagagggccctgtacagggaggtgatgctggagaactacgccaacgtggccagcctggccttccccttccccaagcccgtgctgatcagccagctggagagggaggaggcccccctgggccccgacccctgggagaccgaggtgctgagggacatctgccccggcggcggcggcccaagcagcggcgcccctcctcccagcggcggcagcccagccggctccccaacctctaccgaggagggcacctctgagtccgccacccccgagagcggccctggcacctccaccgagcccagcgagggcagcgcacccggcagccctgccggcagccccacctccacagaggagggaaccagcaccgagcccagcgaaggcagcgccccaggcaccagcaccgagcctagtgagcaggagattaaacggatcaacaagatcagaagaagacttgtgaaagacagcaacaccaagaaggccggcaagacaggccccatgaaaaccctgctggttagagtgatgacacccgatctgagagagcggctggaaaacctgagaaagaagcctgaaaatatcccccagcccatcagcaatacatctagagccaacctgaataagctgctgaccgattacaccgaaatgaagaaggcgatcctgcatgtgtactgggaagagttccagaaggaccctgtgggcctgatgagccgggtggcccagcctgccagcaagaagatcgatcagaacaagctgaaacctgagatggacgagaagggcaacctgaccaccgccggctttgcctgctctcagtgtggccagcccctgttcgtgtacaagctggagcaggtgtctgagaagggcaaggcttacaccaactacttcggacggtgcaatgtggccgagcacgaaaagctgatcctgctggcccagctgaagcccgagaaggatagcgacgaagccgtgacatatagcctgggaaagtttgggcagagggccctggatttctacagcattcatgtgaccaaggagtccacccaccccgtgaagcccctggcccagatcgccggaaacagatacgcctccggacctgtgggaaaggccctgagcgacgcatgtatgggcacaatcgcctccttcctgtctaagtaccaggacatcatcatcgaacaccagaaggtggtgaagggcaaccagaagagactggagagcctgcgggagctggccggcaaggaaaacctggaataccctagcgtgaccctgccacctcagcctcacaccaaggagggcgttgatgcctacaacgaagtgatcgcccgggtgcgaatgtgggtgaacctgaacctgtggcagaagctgaagctaagcagagatgatgccaagcctctgctgagactgaagggattcccttcctttcctctggtcgagagacaggccaacgaagtggactggtgggacatggtgtgtaacgtgaagaagctgatcaacgagaaaaaggaggatggcaaggtgttttggcagaatctggctggctacaagagacaggaagccctgagaccatacctgagcagcgaggaagatcggaagaagggaaagaaattcgctcggtaccagctgggcgacctgctgctgcacctggaaaagaagcacggcgaggactggggaaaggtgtacgacgaggcctgggagcggattgacaagaaagtggaaggcctgagcaagcacatcaagctggaagaggaacggagaagcgaggacgcccagagcaaggccgccctgaccgactggctgcgggctaaggccagcttcgtgatcgagggcctgaaggaggccgacaaggacgagttctgcagatgcgagctgaagctgcagaagtggtacggggacctgcggggaaagcccttcgccatcgaagccgagaacagcatcctggacatcagcggcttcagcaagcagtacaactgtgccttcatctggcagaaggacggcgtgaagaagctgaacctgtacctgatcatcaactacttcaagggcggcaagctgcggttcaagaagatcaaacctgaagccttcgaagccaacagattctacaccgtgatcaacaaaaagagcggcgagatcgtgcccatggaggtgaacttcaacttcgacgaccccaacctgatcatcctgcctctggcctttggcaagagacagggcagagaattcatctggaacgacctgctgtccctggaaaccggcagcctgaagctggccaacggaagagtgatcgagaagacactgtacaacagaagaacccggcaggatgagcctgccctgttcgtggccctgaccttcgagcggcgggaggtcctggactcctccaatatcaaaccaatgaacctgatcggcgtggcaagaggcgaaaacatccccgccgtgatcgccctgaccgaccccgagggctgcccactgagccggtttaaggatagcctgggaaacccaacccacatcctgagaatcggcgagagctataaggagaagcagcggaccatccaggccaagaaggaggtggagcagcggagagccggcggctacagccggaagtacgccagcaaagccaagaatctggcagacgatatggtgagaaacaccgctagagatctgctgtactacgccgtgacccaggatgccatgctgatcttcgccaacctgagccggggcttcggccggcagggcaagcggaccttcatggccgagagacagtacacacggatggaggactggctgaccgccaagctggcctacgagggcctgagcaagacctacctgtccaagacactggcccagtacacctccaagacatgcagcaactgtgggtttaccatcaccagcgccgactacgacagggtgctggagaagctgaagaagacagcaacaggctggatgaccacaattaacggcaaggagctgaaggtggagggccagattacctactacaacagatacaagagacagaacgtagtcaaggacctgtccgtcgagctggatagactgagcgaagaatctgtgaacaacgacatctcctcctggacaaagggcagaagcggagaagctctgagcctcctgaagaaaagattctcccatagacccgtgcaggagaagttcgtgtgcctgaactgcggcttcgagacacacgcagccgagcaagccgccctgaacatcgccagatcctggctgttcctgcggagccaggagtacaagaaataccagacaaacaagacaaccggcaacaccgataagagagccttcgtcgagacctggcagtccttttaccggaagaagcttaaggaggtgtggaaacctgccgtgcggtctggcggatctggcggaggctcctttccaggagagcgtgaccttcgaggacgtggccgtgtacttcacccagagccagtgggccagcctgggccccctgcagagggccctgtacagggaggtgatgctggagaactacgccaacgtggccagcctggccttccccttccccaagcccgtgctgatcagccagctggagagggaggaggcccccctgggccccgacccctgggagaccgaggtgctgagggacatctgccccggcggcggatctggctccggcagcggccccaagaaaaagagaaaagtctaagctgccttctgcggggcttgccttctggccatgcccttcttctctcccttgcacctgtacctcttggtctttgaataaagcctgagtaggaaggctagcaaaaaaaaaaaaaaaaaaaaaaaaaaaaaaaaaaaaaaaaaaaaaaaaaaaaaaaaaaaaaaaaaaaaaaaaaaaaaaaa

SEQ ID NO: 15498 - RNA, 9485 nt, synthetic construct
  source 1..9485: mol_type = other RNA
aggaaataagagagaaaagaagagtaagaagaaatataagagccaccatggcccctaagaagaagcgtaaagtgagccggatggaacgcctcgtctacgaggtgcggcagaagtgcagaaacatcgaggacatctgcatctcctgcggatctctgaacgtgaccctggagcacccactgttcatcggcggcatgtgccagaactgtaaaaactgttttctggagtgtgcctatcaatacgacgatgacggctaccagagctactgcaccatctgttgcggcggaagagaggtgctgatgtgtggaaataacaactgctgccggtgcttctgcgtggaatgcgtggacctgctggtgggccccggcgccgcccaggccgctattaaggaagatccttggaactgctacatgtgcggccacaagggcacatacggcctgctgagacggagagaggactggcctagcagactgcagatgttcttcgccaataaccacgaccaggagttcgacccccctaaggtgtaccctcccgtccccgccgagaagagaaagcccatccgggtcctgagcctgttcgatggcatcgccaccggtctgctggtgctgaaggacctgggcatccaggtggataggtacattgcctccgaggtgtgcgaggactccatcaccgtgggaatggtgcgtcatcagggcaagatcatgtacgtgggcgacgtgcggagcgtgacacagaagcatatccaggagtggggccctttcgacctggtgatcggcggcagcccttgcaatgacctgagcatcgtgaacccagcccggaagggcctgtacgagggaaccggcagactgttcttcgagttttacagactgctgcacgacgcccggcctaaggaaggcgacgaccggcccttcttttggctgttcgagaatgtggtggccatgggagtcagcgacaagcgggatattagccggttcctggagagcaaccccgtgatgatcgatgccaaggaagtgagcgccgcccaccgggccagatacttctggggcaatctgcctggcatgaacagacccctggccagcaccgtgaacgacaagctggagctgcaggagtgcctggagcacggccggatcgccaagttcagcaaggtgagaaccatcaccacccgaagcaacagcatcaaacaaggcaaggaccagcactttcctgtgttcatgaacgagaaggaggacatcctgtggtgtaccgagatggagagagtgttcgggttcccagtccactacacagatgtcagcaacatgtctagactggccagacagagactgctgggaagaagctggtccgtccctgtgatcagacacctgttcgcccctctgaaggagtacttcgcctgcgtgagcagcggcaacagcaacgccaacagccggggccccagcttctctagcggcctggtgccactgtccctgagagggagccacatgggccccatggagatctacaaaaccgtgagcgcctggaagcggcagcctgtgcgcgtgctgagcctgtttcggaatatcgataaagtcctgaaaagcctgggattcctggagagcggctctggctccggcggtggcaccctgaagtacgtggaggatgtgacaaacgtggtcagacgggatgtggagaagtggggccccttcgatctggtgtacggcagcacccaacccctgggcagctcttgtgaccggtgccctggctggtacatgtttcagttccaccggatcctgcagtacgccctgccgagacaggagtcccagcggccattcttttggattttcatggacaacttgctgctgaccgaggatgaccaggaaactaccactcggttcctgcagaccgaagccgtgaccctgcaggacgtgagaggccgggactaccagaacgccatgcgggtgtggtccaacatccctggactgaaaagcaagcacgcacctctgacccctaaagaagaggagtacctgcaggcccaggtgcggagcagaagcaagctggacgcccctaaggtggatctgctggtgaagaattgcctcctgcccctgagagagtacttcaagtatttcagccagaatagtctgcccctgggaggcagcggcggcggcgccctggtgacatttgaggacgtcgccgtgcggttcacccaggaggaatgggctctgctggatccttctcagaaaatcctgtaccgggacgtgatgagagagacataccggaatctgacctccgtgggcatcaactgggaatgttgggaccttgaagcctgcttcagaagcctgggaagaaacctgagagtgcaggtggtgaagagaaagtgcgagctgaccaacagcggcccctgcgccgagggcggcccaagcagcggcgcccctcctcccagcggcggcagcccagccggctccccaacctctaccgaggagggcacctctgagtccgccacccccgagagcggccctggcacctccaccgagcccagcgagggcagcgcacccggcagccctgccggcagccccacctccacagaggagggaaccagcaccgagcccagcgaaggcagcgccccaggcaccagcaccgagcctagtgagcaggagattaaacggatcaacaagatcagaagaagacttgtgaaagacagcaacaccaagaaggccggcaagacaggccccatgaaaaccctgctggttagagtgatgacacccgatctgagagagcggctggaaaacctgagaaagaagcctgaaaatatcccccagcccatcagcaatacatctagagccaacctgaataagctgctgaccgattacaccgaaatgaagaaggcgatcctgcatgtgtactgggaagagttccagaaggaccctgtgggcctgatgagccgggtggcccagcctgccagcaagaagatcgatcagaacaagctgaaacctgagatggacgagaagggcaacctgaccaccgccggctttgcctgctctcagtgtggccagcccctgttcgtgtacaagctggagcaggtgtctgagaagggcaaggcttacaccaactacttcggacggtgcaatgtggccgagcacgaaaagctgatcctgctggcccagctgaagcccgagaaggatagcgacgaagccgtgacatatagcctgggaaagtttgggcagagggccctggatttctacagcattcatgtgaccaaggagtccacccaccccgtgaagcccctggcccagatcgccggaaacagatacgcctccggacctgtgggaaaggccctgagcgacgcatgtatgggcacaatcgcctccttcctgtctaagtaccaggacatcatcatcgaacaccagaaggtggtgaagggcaaccagaagagactggagagcctgcgggagctggccggcaaggaaaacctggaataccctagcgtgaccctgccacctcagcctcacaccaaggagggcgttgatgcctacaacgaagtgatcgcccgggtgcgaatgtgggtgaacctgaacctgtggcagaagctgaagctaagcagagatgatgccaagcctctgctgagactgaagggattcccttcctttcctctggtcgagagacaggccaacgaagtggactggtgggacatggtgtgtaacgtgaagaagctgatcaacgagaaaaaggaggatggcaaggtgttttggcagaatctggctggctacaagagacaggaagccctgagaccatacctgagcagcgaggaagatcggaagaagggaaagaaattcgctcggtaccagctgggcgacctgctgctgcacctggaaaagaagcacggcgaggactggggaaaggtgtacgacgaggcctgggagcggattgacaagaaagtggaaggcctgagcaagcacatcaagctggaagaggaacggagaagcgaggacgcccagagcaaggccgccctgaccgactggctgcgggctaaggccagcttcgtgatcgagggcctgaaggaggccgacaaggacgagttctgcagatgcgagctgaagctgcagaagtggtacggggacctgcggggaaagcccttcgccatcgaagccgagaacagcatcctggacatcagcggcttcagcaagcagtacaactgtgccttcatctggcagaaggacggcgtgaagaagctgaacctgtacctgatcatcaactacttcaagggcggcaagctgcggttcaagaagatcaaacctgaagccttcgaagccaacagattctacaccgtgatcaacaaaaagagcggcgagatcgtgcccatggaggtgaacttcaacttcgacgaccccaacctgatcatcctgcctctggcctttggcaagagacagggcagagaattcatctggaacgacctgctgtccctggaaaccggcagcctgaagctggccaacggaagagtgatcgagaagacactgtacaacagaagaacccggcaggatgagcctgccctgttcgtggccctgaccttcgagcggcgggaggtcctggactcctccaatatcaaaccaatgaacctgatcggcgtggcaagaggcgaaaacatccccgccgtgatcgccctgaccgaccccgagggctgcccactgagccggtttaaggatagcctgggaaacccaacccacatcctgagaatcggcgagagctataaggagaagcagcggaccatccaggccaagaaggaggtggagcagcggagagccggcggctacagccggaagtacgccagcaaagccaagaatctggcagacgatatggtgagaaacaccgctagagatctgctgtactacgccgtgacccaggatgccatgctgatcttcgccaacctgagccggggcttcggccggcagggcaagcggaccttcatggccgagagacagtacacacggatggaggactggctgaccgccaagctggcctacgagggcctgagcaagacctacctgtccaagacactggcccagtacacctccaagacatgcagcaactgtgggtttaccatcaccagcgccgactacgacagggtgctggagaagctgaagaagacagcaacaggctggatgaccacaattaacggcaaggagctgaaggtggagggccagattacctactacaacagatacaagagacagaacgtagtcaaggacctgtccgtcgagctggatagactgagcgaagaatctgtgaacaacgacatctcctcctggacaaagggcagaagcggagaagctctgagcctcctgaagaaaagattctcccatagacccgtgcaggagaagttcgtgtgcctgaactgcggcttcgagacacacgcagccgagcaagccgccctgaacatcgccagatcctggctgttcctgcggagccaggagtacaagaaataccagacaaacaagacaaccggcaacaccgataagagagccttcgtcgagacctggcagtccttttaccggaagaagcttaaggaggtgtggaaacctgccgtgcggtctggcggatctggcggaggctccctgaacagcgccgtgacctacgacgacgtgaacgtgaacttcaccagggaggagtgggccctgctggacagcagccagaagagcctgtacaaggacgtgatgctggagacctacaggaacctgaccgccatcggctacaactgggagggccacaacatcgaggagcactgccagagcagcaggaggcacgccaggacccacaagaggacccacaccggcgagaagagctacgagtgcgaccagggcggcccaagcagcggcgcccctcctcccagcggcggcagcccagccggctccccaacctctaccgaggagggcacctctgagtccgccacccccgagagcggccctggcacctccaccgagcccagcgagggcagcgcacccggcagccctgccggcagccccacctccacagaggagggaaccagcaccgagcccagcgaaggcagcgccccaggcaccagcaccgagcctagtgagcaggagattaaacggatcaacaagatcagaagaagacttgtgaaagacagcaacaccaagaaggccggcaagacaggccccatgaaaaccctgctggttagagtgatgacacccgatctgagagagcggctggaaaacctgagaaagaagcctgaaaatatcccccagcccatcagcaatacatctagagccaacctgaataagctgctgaccgattacaccgaaatgaagaaggcgatcctgcatgtgtactgggaagagttccagaaggaccctgtgggcctgatgagccgggtggcccagcctgccagcaagaagatcgatcagaacaagctgaaacctgagatggacgagaagggcaacctgaccaccgccggctttgcctgctctcagtgtggccagcccctgttcgtgtacaagctggagcaggtgtctgagaagggcaaggcttacaccaactacttcggacggtgcaatgtggccgagcacgaaaagctgatcctgctggcccagctgaagcccgagaaggatagcgacgaagccgtgacatatagcctgggaaagtttgggcagagggccctggatttctacagcattcatgtgaccaaggagtccacccaccccgtgaagcccctggcccagatcgccggaaacagatacgcctccggacctgtgggaaaggccctgagcgacgcatgtatgggcacaatcgcctccttcctgtctaagtaccaggacatcatcatcgaacaccagaaggtggtgaagggcaaccagaagagactggagagcctgcgggagctggccggcaaggaaaacctggaataccctagcgtgaccctgccacctcagcctcacaccaaggagggcgttgatgcctacaacgaagtgatcgcccgggtgcgaatgtgggtgaacctgaacctgtggcagaagctgaagctaagcagagatgatgccaagcctctgctgagactgaagggattcccttcctttcctctggtcgagagacaggccaacgaagtggactggtgggacatggtgtgtaacgtgaagaagctgatcaacgagaaaaaggaggatggcaaggtgttttggcagaatctggctggctacaagagacaggaagccctgagaccatacctgagcagcgaggaagatcggaagaagggaaagaaattcgctcggtaccagctgggcgacctgctgctgcacctggaaaagaagcacggcgaggactggggaaaggtgtacgacgaggcctgggagcggattgacaagaaagtggaaggcctgagcaagcacatcaagctggaagaggaacggagaagcgaggacgcccagagcaaggccgccctgaccgactggctgcgggctaaggccagcttcgtgatcgagggcctgaaggaggccgacaaggacgagttctgcagatgcgagctgaagctgcagaagtggtacggggacctgcggggaaagcccttcgccatcgaagccgagaacagcatcctggacatcagcggcttcagcaagcagtacaactgtgccttcatctggcagaaggacggcgtgaagaagctgaacctgtacctgatcatcaactacttcaagggcggcaagctgcggttcaagaagatcaaacctgaagccttcgaagccaacagattctacaccgtgatcaacaaaaagagcggcgagatcgtgcccatggaggtgaacttcaacttcgacgaccccaacctgatcatcctgcctctggcctttggcaagagacagggcagagaattcatctggaacgacctgctgtccctggaaaccggcagcctgaagctggccaacggaagagtgatcgagaagacactgtacaacagaagaacccggcaggatgagcctgccctgttcgtggccctgaccttcgagcggcgggaggtcctggactcctccaatatcaaaccaatgaacctgatcggcgtggcaagaggcgaaaacatccccgccgtgatcgccctgaccgaccccgagggctgcccactgagccggtttaaggatagcctgggaaacccaacccacatcctgagaatcggcgagagctataaggagaagcagcggaccatccaggccaagaaggaggtggagcagcggagagccggcggctacagccggaagtacgccagcaaagccaagaatctggcagacgatatggtgagaaacaccgctagagatctgctgtactacgccgtgacccaggatgccatgctgatcttcgccaacctgagccggggcttcggccggcagggcaagcggaccttcatggccgagagacagtacacacggatggaggactggctgaccgccaagctggcctacgagggcctgagcaagacctacctgtccaagacactggcccagtacacctccaagacatgcagcaactgtgggtttaccatcaccagcgccgactacgacagggtgctggagaagctgaagaagacagcaacaggctggatgaccacaattaacggcaaggagctgaaggtggagggccagattacctactacaacagatacaagagacagaacgtagtcaaggacctgtccgtcgagctggatagactgagcgaagaatctgtgaacaacgacatctcctcctggacaaagggcagaagcggagaagctctgagcctcctgaagaaaagattctcccatagacccgtgcaggagaagttcgtgtgcctgaactgcggcttcgagacacacgcagccgagcaagccgccctgaacatcgccagatcctggctgttcctgcggagccaggagtacaagaaataccagacaaacaagacaaccggcaacaccgataagagagccttcgtcgagacctggcagtccttttaccggaagaagcttaaggaggtgtggaaacctgccgtgcggtctggcggatctggcggaggctcctctgaacagcgccgtgacctacgacgacgtgaacgtgaacttcaccagggaggagtgggccctgctggacagcagccagaagagcctgtacaaggacgtgatgctggagacctacaggaacctgaccgccatcggctacaactgggagggccacaacatcgaggagcactgccagagcagcaggaggcacgccaggacccacaagaggacccacaccggcgagaagagctacgagtgcgaccagggatctggctccggcagcggccccaagaaaaagagaaaagtctaagctgccttctgcggggcttgccttctggccatgcccttcttctctcccttgcacctgtacctcttggtctttgaataaagcctgagtaggaaggctagcaaaaaaaaaaaaaaaaaaaaaaaaaaaaaaaaaaaaaaaaaaaaaaaaaaaaaaaaaaaaaaaaaaaaaaaaaaaaaaaa

SEQ ID NO: 15499 - RNA, 9479 nt, synthetic construct
  source 1..9479: mol_type = other RNA
aggaaataagagagaaaagaagagtaagaagaaatataagagccaccatggcccctaagaagaagcgtaaagtgagccggatggaacgcctcgtctacgaggtgcggcagaagtgcagaaacatcgaggacatctgcatctcctgcggatctctgaacgtgaccctggagcacccactgttcatcggcggcatgtgccagaactgtaaaaactgttttctggagtgtgcctatcaatacgacgatgacggctaccagagctactgcaccatctgttgcggcggaagagaggtgctgatgtgtggaaataacaactgctgccggtgcttctgcgtggaatgcgtggacctgctggtgggccccggcgccgcccaggccgctattaaggaagatccttggaactgctacatgtgcggccacaagggcacatacggcctgctgagacggagagaggactggcctagcagactgcagatgttcttcgccaataaccacgaccaggagttcgacccccctaaggtgtaccctcccgtccccgccgagaagagaaagcccatccgggtcctgagcctgttcgatggcatcgccaccggtctgctggtgctgaaggacctgggcatccaggtggataggtacattgcctccgaggtgtgcgaggactccatcaccgtgggaatggtgcgtcatcagggcaagatcatgtacgtgggcgacgtgcggagcgtgacacagaagcatatccaggagtggggccctttcgacctggtgatcggcggcagcccttgcaatgacctgagcatcgtgaacccagcccggaagggcctgtacgagggaaccggcagactgttcttcgagttttacagactgctgcacgacgcccggcctaaggaaggcgacgaccggcccttcttttggctgttcgagaatgtggtggccatgggagtcagcgacaagcgggatattagccggttcctggagagcaaccccgtgatgatcgatgccaaggaagtgagcgccgcccaccgggccagatacttctggggcaatctgcctggcatgaacagacccctggccagcaccgtgaacgacaagctggagctgcaggagtgcctggagcacggccggatcgccaagttcagcaaggtgagaaccatcaccacccgaagcaacagcatcaaacaaggcaaggaccagcactttcctgtgttcatgaacgagaaggaggacatcctgtggtgtaccgagatggagagagtgttcgggttcccagtccactacacagatgtcagcaacatgtctagactggccagacagagactgctgggaagaagctggtccgtccctgtgatcagacacctgttcgcccctctgaaggagtacttcgcctgcgtgagcagcggcaacagcaacgccaacagccggggccccagcttctctagcggcctggtgccactgtccctgagagggagccacatgggccccatggagatctacaaaaccgtgagcgcctggaagcggcagcctgtgcgcgtgctgagcctgtttcggaatatcgataaagtcctgaaaagcctgggattcctggagagcggctctggctccggcggtggcaccctgaagtacgtggaggatgtgacaaacgtggtcagacgggatgtggagaagtggggccccttcgatctggtgtacggcagcacccaacccctgggcagctcttgtgaccggtgccctggctggtacatgtttcagttccaccggatcctgcagtacgccctgccgagacaggagtcccagcggccattcttttggattttcatggacaacttgctgctgaccgaggatgaccaggaaactaccactcggttcctgcagaccgaagccgtgaccctgcaggacgtgagaggccgggactaccagaacgccatgcgggtgtggtccaacatccctggactgaaaagcaagcacgcacctctgacccctaaagaagaggagtacctgcaggcccaggtgcggagcagaagcaagctggacgcccctaaggtggatctgctggtgaagaattgcctcctgcccctgagagagtacttcaagtatttcagccagaatagtctgcccctgggaggcagcggcggcggcgccctggtgacatttgaggacgtcgccgtgcggttcacccaggaggaatgggctctgctggatccttctcagaaaatcctgtaccgggacgtgatgagagagacataccggaatctgacctccgtgggcatcaactgggaatgttgggaccttgaagcctgcttcagaagcctgggaagaaacctgagagtgcaggtggtgaagagaaagtgcgagctgaccaacagcggcccctgcgccgagggcggcccaagcagcggcgcccctcctcccagcggcggcagcccagccggctccccaacctctaccgaggagggcacctctgagtccgccacccccgagagcggccctggcacctccaccgagcccagcgagggcagcgcacccggcagccctgccggcagccccacctccacagaggagggaaccagcaccgagcccagcgaaggcagcgccccaggcaccagcaccgagcctagtgagcaggagattaaacggatcaacaagatcagaagaagacttgtgaaagacagcaacaccaagaaggccggcaagacaggccccatgaaaaccctgctggttagagtgatgacacccgatctgagagagcggctggaaaacctgagaaagaagcctgaaaatatcccccagcccatcagcaatacatctagagccaacctgaataagctgctgaccgattacaccgaaatgaagaaggcgatcctgcatgtgtactgggaagagttccagaaggaccctgtgggcctgatgagccgggtggcccagcctgccagcaagaagatcgatcagaacaagctgaaacctgagatggacgagaagggcaacctgaccaccgccggctttgcctgctctcagtgtggccagcccctgttcgtgtacaagctggagcaggtgtctgagaagggcaaggcttacaccaactacttcggacggtgcaatgtggccgagcacgaaaagctgatcctgctggcccagctgaagcccgagaaggatagcgacgaagccgtgacatatagcctgggaaagtttgggcagagggccctggatttctacagcattcatgtgaccaaggagtccacccaccccgtgaagcccctggcccagatcgccggaaacagatacgcctccggacctgtgggaaaggccctgagcgacgcatgtatgggcacaatcgcctccttcctgtctaagtaccaggacatcatcatcgaacaccagaaggtggtgaagggcaaccagaagagactggagagcctgcgggagctggccggcaaggaaaacctggaataccctagcgtgaccctgccacctcagcctcacaccaaggagggcgttgatgcctacaacgaagtgatcgcccgggtgcgaatgtgggtgaacctgaacctgtggcagaagctgaagctaagcagagatgatgccaagcctctgctgagactgaagggattcccttcctttcctctggtcgagagacaggccaacgaagtggactggtgggacatggtgtgtaacgtgaagaagctgatcaacgagaaaaaggaggatggcaaggtgttttggcagaatctggctggctacaagagacaggaagccctgagaccatacctgagcagcgaggaagatcggaagaagggaaagaaattcgctcggtaccagctgggcgacctgctgctgcacctggaaaagaagcacggcgaggactggggaaaggtgtacgacgaggcctgggagcggattgacaagaaagtggaaggcctgagcaagcacatcaagctggaagaggaacggagaagcgaggacgcccagagcaaggccgccctgaccgactggctgcgggctaaggccagcttcgtgatcgagggcctgaaggaggccgacaaggacgagttctgcagatgcgagctgaagctgcagaagtggtacggggacctgcggggaaagcccttcgccatcgaagccgagaacagcatcctggacatcagcggcttcagcaagcagtacaactgtgccttcatctggcagaaggacggcgtgaagaagctgaacctgtacctgatcatcaactacttcaagggcggcaagctgcggttcaagaagatcaaacctgaagccttcgaagccaacagattctacaccgtgatcaacaaaaagagcggcgagatcgtgcccatggaggtgaacttcaacttcgacgaccccaacctgatcatcctgcctctggcctttggcaagagacagggcagagaattcatctggaacgacctgctgtccctggaaaccggcagcctgaagctggccaacggaagagtgatcgagaagacactgtacaacagaagaacccggcaggatgagcctgccctgttcgtggccctgaccttcgagcggcgggaggtcctggactcctccaatatcaaaccaatgaacctgatcggcgtggcaagaggcgaaaacatccccgccgtgatcgccctgaccgaccccgagggctgcccactgagccggtttaaggatagcctgggaaacccaacccacatcctgagaatcggcgagagctataaggagaagcagcggaccatccaggccaagaaggaggtggagcagcggagagccggcggctacagccggaagtacgccagcaaagccaagaatctggcagacgatatggtgagaaacaccgctagagatctgctgtactacgccgtgacccaggatgccatgctgatcttcgccaacctgagccggggcttcggccggcagggcaagcggaccttcatggccgagagacagtacacacggatggaggactggctgaccgccaagctggcctacgagggcctgagcaagacctacctgtccaagacactggcccagtacacctccaagacatgcagcaactgtgggtttaccatcaccagcgccgactacgacagggtgctggagaagctgaagaagacagcaacaggctggatgaccacaattaacggcaaggagctgaaggtggagggccagattacctactacaacagatacaagagacagaacgtagtcaaggacctgtccgtcgagctggatagactgagcgaagaatctgtgaacaacgacatctcctcctggacaaagggcagaagcggagaagctctgagcctcctgaagaaaagattctcccatagacccgtgcaggagaagttcgtgtgcctgaactgcggcttcgagacacacgcagccgagcaagccgccctgaacatcgccagatcctggctgttcctgcggagccaggagtacaagaaataccagacaaacaagacaaccggcaacaccgataagagagccttcgtcgagacctggcagtccttttaccggaagaagcttaaggaggtgtggaaacctgccgtgcggtctggcggatctggcggaggctccgccttcgaggacgtggccgtgtacttcagccaggaggagtggggcctgctggacaccgcccagagagccctgtacagaagagtgatgctggacaacttcgccctggtggccagcctgggcctgagcaccagcagacccagagtggtgatccagctggagagaggcgaggagccctgggtgcccagcggcaccgacaccaccctgagcagaaccacctacagaagaagaaaccccggcagcggcggcccaagcagcggcgcccctcctcccagcggcggcagcccagccggctccccaacctctaccgaggagggcacctctgagtccgccacccccgagagcggccctggcacctccaccgagcccagcgagggcagcgcacccggcagccctgccggcagccccacctccacagaggagggaaccagcaccgagcccagcgaaggcagcgccccaggcaccagcaccgagcctagtgagcaggagattaaacggatcaacaagatcagaagaagacttgtgaaagacagcaacaccaagaaggccggcaagacaggccccatgaaaaccctgctggttagagtgatgacacccgatctgagagagcggctggaaaacctgagaaagaagcctgaaaatatcccccagcccatcagcaatacatctagagccaacctgaataagctgctgaccgattacaccgaaatgaagaaggcgatcctgcatgtgtactgggaagagttccagaaggaccctgtgggcctgatgagccgggtggcccagcctgccagcaagaagatcgatcagaacaagctgaaacctgagatggacgagaagggcaacctgaccaccgccggctttgcctgctctcagtgtggccagcccctgttcgtgtacaagctggagcaggtgtctgagaagggcaaggcttacaccaactacttcggacggtgcaatgtggccgagcacgaaaagctgatcctgctggcccagctgaagcccgagaaggatagcgacgaagccgtgacatatagcctgggaaagtttgggcagagggccctggatttctacagcattcatgtgaccaaggagtccacccaccccgtgaagcccctggcccagatcgccggaaacagatacgcctccggacctgtgggaaaggccctgagcgacgcatgtatgggcacaatcgcctccttcctgtctaagtaccaggacatcatcatcgaacaccagaaggtggtgaagggcaaccagaagagactggagagcctgcgggagctggccggcaaggaaaacctggaataccctagcgtgaccctgccacctcagcctcacaccaaggagggcgttgatgcctacaacgaagtgatcgcccgggtgcgaatgtgggtgaacctgaacctgtggcagaagctgaagctaagcagagatgatgccaagcctctgctgagactgaagggattcccttcctttcctctggtcgagagacaggccaacgaagtggactggtgggacatggtgtgtaacgtgaagaagctgatcaacgagaaaaaggaggatggcaaggtgttttggcagaatctggctggctacaagagacaggaagccctgagaccatacctgagcagcgaggaagatcggaagaagggaaagaaattcgctcggtaccagctgggcgacctgctgctgcacctggaaaagaagcacggcgaggactggggaaaggtgtacgacgaggcctgggagcggattgacaagaaagtggaaggcctgagcaagcacatcaagctggaagaggaacggagaagcgaggacgcccagagcaaggccgccctgaccgactggctgcgggctaaggccagcttcgtgatcgagggcctgaaggaggccgacaaggacgagttctgcagatgcgagctgaagctgcagaagtggtacggggacctgcggggaaagcccttcgccatcgaagccgagaacagcatcctggacatcagcggcttcagcaagcagtacaactgtgccttcatctggcagaaggacggcgtgaagaagctgaacctgtacctgatcatcaactacttcaagggcggcaagctgcggttcaagaagatcaaacctgaagccttcgaagccaacagattctacaccgtgatcaacaaaaagagcggcgagatcgtgcccatggaggtgaacttcaacttcgacgaccccaacctgatcatcctgcctctggcctttggcaagagacagggcagagaattcatctggaacgacctgctgtccctggaaaccggcagcctgaagctggccaacggaagagtgatcgagaagacactgtacaacagaagaacccggcaggatgagcctgccctgttcgtggccctgaccttcgagcggcgggaggtcctggactcctccaatatcaaaccaatgaacctgatcggcgtggcaagaggcgaaaacatccccgccgtgatcgccctgaccgaccccgagggctgcccactgagccggtttaaggatagcctgggaaacccaacccacatcctgagaatcggcgagagctataaggagaagcagcggaccatccaggccaagaaggaggtggagcagcggagagccggcggctacagccggaagtacgccagcaaagccaagaatctggcagacgatatggtgagaaacaccgctagagatctgctgtactacgccgtgacccaggatgccatgctgatcttcgccaacctgagccggggcttcggccggcagggcaagcggaccttcatggccgagagacagtacacacggatggaggactggctgaccgccaagctggcctacgagggcctgagcaagacctacctgtccaagacactggcccagtacacctccaagacatgcagcaactgtgggtttaccatcaccagcgccgactacgacagggtgctggagaagctgaagaagacagcaacaggctggatgaccacaattaacggcaaggagctgaaggtggagggccagattacctactacaacagatacaagagacagaacgtagtcaaggacctgtccgtcgagctggatagactgagcgaagaatctgtgaacaacgacatctcctcctggacaaagggcagaagcggagaagctctgagcctcctgaagaaaagattctcccatagacccgtgcaggagaagttcgtgtgcctgaactgcggcttcgagacacacgcagccgagcaagccgccctgaacatcgccagatcctggctgttcctgcggagccaggagtacaagaaataccagacaaacaagacaaccggcaacaccgataagagagccttcgtcgagacctggcagtccttttaccggaagaagcttaaggaggtgtggaaacctgccgtgcggtctggcggatctggcggaggctcctgccttcgaggacgtggccgtgtacttcagccaggaggagtggggcctgctggacaccgcccagagagccctgtacagaagagtgatgctggacaacttcgccctggtggccagcctgggcctgagcaccagcagacccagagtggtgatccagctggagagaggcgaggagccctgggtgcccagcggcaccgacaccaccctgagcagaaccacctacagaagaagaaaccccggcagcggatctggctccggcagcggccccaagaaaaagagaaaagtctaagctgccttctgcggggcttgccttctggccatgcccttcttctctcccttgcacctgtacctcttggtctttgaataaagcctgagtaggaaggctagcaaaaaaaaaaaaaaaaaaaaaaaaaaaaaaaaaaaaaaaaaaaaaaaaaaaaaaaaaaaaaaaaaaaaaaaaaaaaaaaa

SEQ ID NO: 15500 - RNA, 9485 nt, synthetic construct
  source 1..9485: mol_type = other RNA
aggaaataagagagaaaagaagagtaagaagaaatataagagccaccatggcccctaagaagaagcgtaaagtgagccggatggaacgcctcgtctacgaggtgcggcagaagtgcagaaacatcgaggacatctgcatctcctgcggatctctgaacgtgaccctggagcacccactgttcatcggcggcatgtgccagaactgtaaaaactgttttctggagtgtgcctatcaatacgacgatgacggctaccagagctactgcaccatctgttgcggcggaagagaggtgctgatgtgtggaaataacaactgctgccggtgcttctgcgtggaatgcgtggacctgctggtgggccccggcgccgcccaggccgctattaaggaagatccttggaactgctacatgtgcggccacaagggcacatacggcctgctgagacggagagaggactggcctagcagactgcagatgttcttcgccaataaccacgaccaggagttcgacccccctaaggtgtaccctcccgtccccgccgagaagagaaagcccatccgggtcctgagcctgttcgatggcatcgccaccggtctgctggtgctgaaggacctgggcatccaggtggataggtacattgcctccgaggtgtgcgaggactccatcaccgtgggaatggtgcgtcatcagggcaagatcatgtacgtgggcgacgtgcggagcgtgacacagaagcatatccaggagtggggccctttcgacctggtgatcggcggcagcccttgcaatgacctgagcatcgtgaacccagcccggaagggcctgtacgagggaaccggcagactgttcttcgagttttacagactgctgcacgacgcccggcctaaggaaggcgacgaccggcccttcttttggctgttcgagaatgtggtggccatgggagtcagcgacaagcgggatattagccggttcctggagagcaaccccgtgatgatcgatgccaaggaagtgagcgccgcccaccgggccagatacttctggggcaatctgcctggcatgaacagacccctggccagcaccgtgaacgacaagctggagctgcaggagtgcctggagcacggccggatcgccaagttcagcaaggtgagaaccatcaccacccgaagcaacagcatcaaacaaggcaaggaccagcactttcctgtgttcatgaacgagaaggaggacatcctgtggtgtaccgagatggagagagtgttcgggttcccagtccactacacagatgtcagcaacatgtctagactggccagacagagactgctgggaagaagctggtccgtccctgtgatcagacacctgttcgcccctctgaaggagtacttcgcctgcgtgagcagcggcaacagcaacgccaacagccggggccccagcttctctagcggcctggtgccactgtccctgagagggagccacatgggccccatggagatctacaaaaccgtgagcgcctggaagcggcagcctgtgcgcgtgctgagcctgtttcggaatatcgataaagtcctgaaaagcctgggattcctggagagcggctctggctccggcggtggcaccctgaagtacgtggaggatgtgacaaacgtggtcagacgggatgtggagaagtggggccccttcgatctggtgtacggcagcacccaacccctgggcagctcttgtgaccggtgccctggctggtacatgtttcagttccaccggatcctgcagtacgccctgccgagacaggagtcccagcggccattcttttggattttcatggacaacttgctgctgaccgaggatgaccaggaaactaccactcggttcctgcagaccgaagccgtgaccctgcaggacgtgagaggccgggactaccagaacgccatgcgggtgtggtccaacatccctggactgaaaagcaagcacgcacctctgacccctaaagaagaggagtacctgcaggcccaggtgcggagcagaagcaagctggacgcccctaaggtggatctgctggtgaagaattgcctcctgcccctgagagagtacttcaagtatttcagccagaatagtctgcccctgggaggcagcggcggcggcgccctggtgacatttgaggacgtcgccgtgcggttcacccaggaggaatgggctctgctggatccttctcagaaaatcctgtaccgggacgtgatgagagagacataccggaatctgacctccgtgggcatcaactgggaatgttgggaccttgaagcctgcttcagaagcctgggaagaaacctgagagtgcaggtggtgaagagaaagtgcgagctgaccaacagcggcccctgcgccgagggcggcccaagcagcggcgcccctcctcccagcggcggcagcccagccggctccccaacctctaccgaggagggcacctctgagtccgccacccccgagagcggccctggcacctccaccgagcccagcgagggcagcgcacccggcagccctgccggcagccccacctccacagaggagggaaccagcaccgagcccagcgaaggcagcgccccaggcaccagcaccgagcctagtgagcaggagattaaacggatcaacaagatcagaagaagacttgtgaaagacagcaacaccaagaaggccggcaagacaggccccatgaaaaccctgctggttagagtgatgacacccgatctgagagagcggctggaaaacctgagaaagaagcctgaaaatatcccccagcccatcagcaatacatctagagccaacctgaataagctgctgaccgattacaccgaaatgaagaaggcgatcctgcatgtgtactgggaagagttccagaaggaccctgtgggcctgatgagccgggtggcccagcctgccagcaagaagatcgatcagaacaagctgaaacctgagatggacgagaagggcaacctgaccaccgccggctttgcctgctctcagtgtggccagcccctgttcgtgtacaagctggagcaggtgtctgagaagggcaaggcttacaccaactacttcggacggtgcaatgtggccgagcacgaaaagctgatcctgctggcccagctgaagcccgagaaggatagcgacgaagccgtgacatatagcctgggaaagtttgggcagagggccctggatttctacagcattcatgtgaccaaggagtccacccaccccgtgaagcccctggcccagatcgccggaaacagatacgcctccggacctgtgggaaaggccctgagcgacgcatgtatgggcacaatcgcctccttcctgtctaagtaccaggacatcatcatcgaacaccagaaggtggtgaagggcaaccagaagagactggagagcctgcgggagctggccggcaaggaaaacctggaataccctagcgtgaccctgccacctcagcctcacaccaaggagggcgttgatgcctacaacgaagtgatcgcccgggtgcgaatgtgggtgaacctgaacctgtggcagaagctgaagctaagcagagatgatgccaagcctctgctgagactgaagggattcccttcctttcctctggtcgagagacaggccaacgaagtggactggtgggacatggtgtgtaacgtgaagaagctgatcaacgagaaaaaggaggatggcaaggtgttttggcagaatctggctggctacaagagacaggaagccctgagaccatacctgagcagcgaggaagatcggaagaagggaaagaaattcgctcggtaccagctgggcgacctgctgctgcacctggaaaagaagcacggcgaggactggggaaaggtgtacgacgaggcctgggagcggattgacaagaaagtggaaggcctgagcaagcacatcaagctggaagaggaacggagaagcgaggacgcccagagcaaggccgccctgaccgactggctgcgggctaaggccagcttcgtgatcgagggcctgaaggaggccgacaaggacgagttctgcagatgcgagctgaagctgcagaagtggtacggggacctgcggggaaagcccttcgccatcgaagccgagaacagcatcctggacatcagcggcttcagcaagcagtacaactgtgccttcatctggcagaaggacggcgtgaagaagctgaacctgtacctgatcatcaactacttcaagggcggcaagctgcggttcaagaagatcaaacctgaagccttcgaagccaacagattctacaccgtgatcaacaaaaagagcggcgagatcgtgcccatggaggtgaacttcaacttcgacgaccccaacctgatcatcctgcctctggcctttggcaagagacagggcagagaattcatctggaacgacctgctgtccctggaaaccggcagcctgaagctggccaacggaagagtgatcgagaagacactgtacaacagaagaacccggcaggatgagcctgccctgttcgtggccctgaccttcgagcggcgggaggtcctggactcctccaatatcaaaccaatgaacctgatcggcgtggcaagaggcgaaaacatccccgccgtgatcgccctgaccgaccccgagggctgcccactgagccggtttaaggatagcctgggaaacccaacccacatcctgagaatcggcgagagctataaggagaagcagcggaccatccaggccaagaaggaggtggagcagcggagagccggcggctacagccggaagtacgccagcaaagccaagaatctggcagacgatatggtgagaaacaccgctagagatctgctgtactacgccgtgacccaggatgccatgctgatcttcgccaacctgagccggggcttcggccggcagggcaagcggaccttcatggccgagagacagtacacacggatggaggactggctgaccgccaagctggcctacgagggcctgagcaagacctacctgtccaagacactggcccagtacacctccaagacatgcagcaactgtgggtttaccatcaccagcgccgactacgacagggtgctggagaagctgaagaagacagcaacaggctggatgaccacaattaacggcaaggagctgaaggtggagggccagattacctactacaacagatacaagagacagaacgtagtcaaggacctgtccgtcgagctggatagactgagcgaagaatctgtgaacaacgacatctcctcctggacaaagggcagaagcggagaagctctgagcctcctgaagaaaagattctcccatagacccgtgcaggagaagttcgtgtgcctgaactgcggcttcgagacacacgcagccgagcaagccgccctgaacatcgccagatcctggctgttcctgcggagccaggagtacaagaaataccagacaaacaagacaaccggcaacaccgataagagagccttcgtcgagacctggcagtccttttaccggaagaagcttaaggaggtgtggaaacctgccgtgcggtctggcggatctggcggaggctccttccaggagagcgtgaccttcagggacgtggccatcgccttcagccagcaggagtggcagagcctggacagcagccagagggacctgtacagggacgtgatgctggagaactacaggaacctggtgagcctgggccacagcctgagcaagccccacgtgatcaccctgctggagcagtggaaggacccctgggagaccggcaggaaggacaagaggaggaggtgcgccgacctgcagctggagggcggcccaagcagcggcgcccctcctcccagcggcggcagcccagccggctccccaacctctaccgaggagggcacctctgagtccgccacccccgagagcggccctggcacctccaccgagcccagcgagggcagcgcacccggcagccctgccggcagccccacctccacagaggagggaaccagcaccgagcccagcgaaggcagcgccccaggcaccagcaccgagcctagtgagcaggagattaaacggatcaacaagatcagaagaagacttgtgaaagacagcaacaccaagaaggccggcaagacaggccccatgaaaaccctgctggttagagtgatgacacccgatctgagagagcggctggaaaacctgagaaagaagcctgaaaatatcccccagcccatcagcaatacatctagagccaacctgaataagctgctgaccgattacaccgaaatgaagaaggcgatcctgcatgtgtactgggaagagttccagaaggaccctgtgggcctgatgagccgggtggcccagcctgccagcaagaagatcgatcagaacaagctgaaacctgagatggacgagaagggcaacctgaccaccgccggctttgcctgctctcagtgtggccagcccctgttcgtgtacaagctggagcaggtgtctgagaagggcaaggcttacaccaactacttcggacggtgcaatgtggccgagcacgaaaagctgatcctgctggcccagctgaagcccgagaaggatagcgacgaagccgtgacatatagcctgggaaagtttgggcagagggccctggatttctacagcattcatgtgaccaaggagtccacccaccccgtgaagcccctggcccagatcgccggaaacagatacgcctccggacctgtgggaaaggccctgagcgacgcatgtatgggcacaatcgcctccttcctgtctaagtaccaggacatcatcatcgaacaccagaaggtggtgaagggcaaccagaagagactggagagcctgcgggagctggccggcaaggaaaacctggaataccctagcgtgaccctgccacctcagcctcacaccaaggagggcgttgatgcctacaacgaagtgatcgcccgggtgcgaatgtgggtgaacctgaacctgtggcagaagctgaagctaagcagagatgatgccaagcctctgctgagactgaagggattcccttcctttcctctggtcgagagacaggccaacgaagtggactggtgggacatggtgtgtaacgtgaagaagctgatcaacgagaaaaaggaggatggcaaggtgttttggcagaatctggctggctacaagagacaggaagccctgagaccatacctgagcagcgaggaagatcggaagaagggaaagaaattcgctcggtaccagctgggcgacctgctgctgcacctggaaaagaagcacggcgaggactggggaaaggtgtacgacgaggcctgggagcggattgacaagaaagtggaaggcctgagcaagcacatcaagctggaagaggaacggagaagcgaggacgcccagagcaaggccgccctgaccgactggctgcgggctaaggccagcttcgtgatcgagggcctgaaggaggccgacaaggacgagttctgcagatgcgagctgaagctgcagaagtggtacggggacctgcggggaaagcccttcgccatcgaagccgagaacagcatcctggacatcagcggcttcagcaagcagtacaactgtgccttcatctggcagaaggacggcgtgaagaagctgaacctgtacctgatcatcaactacttcaagggcggcaagctgcggttcaagaagatcaaacctgaagccttcgaagccaacagattctacaccgtgatcaacaaaaagagcggcgagatcgtgcccatggaggtgaacttcaacttcgacgaccccaacctgatcatcctgcctctggcctttggcaagagacagggcagagaattcatctggaacgacctgctgtccctggaaaccggcagcctgaagctggccaacggaagagtgatcgagaagacactgtacaacagaagaacccggcaggatgagcctgccctgttcgtggccctgaccttcgagcggcgggaggtcctggactcctccaatatcaaaccaatgaacctgatcggcgtggcaagaggcgaaaacatccccgccgtgatcgccctgaccgaccccgagggctgcccactgagccggtttaaggatagcctgggaaacccaacccacatcctgagaatcggcgagagctataaggagaagcagcggaccatccaggccaagaaggaggtggagcagcggagagccggcggctacagccggaagtacgccagcaaagccaagaatctggcagacgatatggtgagaaacaccgctagagatctgctgtactacgccgtgacccaggatgccatgctgatcttcgccaacctgagccggggcttcggccggcagggcaagcggaccttcatggccgagagacagtacacacggatggaggactggctgaccgccaagctggcctacgagggcctgagcaagacctacctgtccaagacactggcccagtacacctccaagacatgcagcaactgtgggtttaccatcaccagcgccgactacgacagggtgctggagaagctgaagaagacagcaacaggctggatgaccacaattaacggcaaggagctgaaggtggagggccagattacctactacaacagatacaagagacagaacgtagtcaaggacctgtccgtcgagctggatagactgagcgaagaatctgtgaacaacgacatctcctcctggacaaagggcagaagcggagaagctctgagcctcctgaagaaaagattctcccatagacccgtgcaggagaagttcgtgtgcctgaactgcggcttcgagacacacgcagccgagcaagccgccctgaacatcgccagatcctggctgttcctgcggagccaggagtacaagaaataccagacaaacaagacaaccggcaacaccgataagagagccttcgtcgagacctggcagtccttttaccggaagaagcttaaggaggtgtggaaacctgccgtgcggtctggcggatctggcggaggctcctttccaggagagcgtgaccttcagggacgtggccatcgccttcagccagcaggagtggcagagcctggacagcagccagagggacctgtacagggacgtgatgctggagaactacaggaacctggtgagcctgggccacagcctgagcaagccccacgtgatcaccctgctggagcagtggaaggacccctgggagaccggcaggaaggacaagaggaggaggtgcgccgacctgcagctggagggatctggctccggcagcggccccaagaaaaagagaaaagtctaagctgccttctgcggggcttgccttctggccatgcccttcttctctcccttgcacctgtacctcttggtctttgaataaagcctgagtaggaaggctagcaaaaaaaaaaaaaaaaaaaaaaaaaaaaaaaaaaaaaaaaaaaaaaaaaaaaaaaaaaaaaaaaaaaaaaaaaaaaaaaa

SEQ ID NO: 15501 - RNA, 9485 nt, synthetic construct
  source 1..9485: mol_type = other RNA
aggaaataagagagaaaagaagagtaagaagaaatataagagccaccatggcccctaagaagaagcgtaaagtgagccggatggaacgcctcgtctacgaggtgcggcagaagtgcagaaacatcgaggacatctgcatctcctgcggatctctgaacgtgaccctggagcacccactgttcatcggcggcatgtgccagaactgtaaaaactgttttctggagtgtgcctatcaatacgacgatgacggctaccagagctactgcaccatctgttgcggcggaagagaggtgctgatgtgtggaaataacaactgctgccggtgcttctgcgtggaatgcgtggacctgctggtgggccccggcgccgcccaggccgctattaaggaagatccttggaactgctacatgtgcggccacaagggcacatacggcctgctgagacggagagaggactggcctagcagactgcagatgttcttcgccaataaccacgaccaggagttcgacccccctaaggtgtaccctcccgtccccgccgagaagagaaagcccatccgggtcctgagcctgttcgatggcatcgccaccggtctgctggtgctgaaggacctgggcatccaggtggataggtacattgcctccgaggtgtgcgaggactccatcaccgtgggaatggtgcgtcatcagggcaagatcatgtacgtgggcgacgtgcggagcgtgacacagaagcatatccaggagtggggccctttcgacctggtgatcggcggcagcccttgcaatgacctgagcatcgtgaacccagcccggaagggcctgtacgagggaaccggcagactgttcttcgagttttacagactgctgcacgacgcccggcctaaggaaggcgacgaccggcccttcttttggctgttcgagaatgtggtggccatgggagtcagcgacaagcgggatattagccggttcctggagagcaaccccgtgatgatcgatgccaaggaagtgagcgccgcccaccgggccagatacttctggggcaatctgcctggcatgaacagacccctggccagcaccgtgaacgacaagctggagctgcaggagtgcctggagcacggccggatcgccaagttcagcaaggtgagaaccatcaccacccgaagcaacagcatcaaacaaggcaaggaccagcactttcctgtgttcatgaacgagaaggaggacatcctgtggtgtaccgagatggagagagtgttcgggttcccagtccactacacagatgtcagcaacatgtctagactggccagacagagactgctgggaagaagctggtccgtccctgtgatcagacacctgttcgcccctctgaaggagtacttcgcctgcgtgagcagcggcaacagcaacgccaacagccggggccccagcttctctagcggcctggtgccactgtccctgagagggagccacatgggccccatggagatctacaaaaccgtgagcgcctggaagcggcagcctgtgcgcgtgctgagcctgtttcggaatatcgataaagtcctgaaaagcctgggattcctggagagcggctctggctccggcggtggcaccctgaagtacgtggaggatgtgacaaacgtggtcagacgggatgtggagaagtggggccccttcgatctggtgtacggcagcacccaacccctgggcagctcttgtgaccggtgccctggctggtacatgtttcagttccaccggatcctgcagtacgccctgccgagacaggagtcccagcggccattcttttggattttcatggacaacttgctgctgaccgaggatgaccaggaaactaccactcggttcctgcagaccgaagccgtgaccctgcaggacgtgagaggccgggactaccagaacgccatgcgggtgtggtccaacatccctggactgaaaagcaagcacgcacctctgacccctaaagaagaggagtacctgcaggcccaggtgcggagcagaagcaagctggacgcccctaaggtggatctgctggtgaagaattgcctcctgcccctgagagagtacttcaagtatttcagccagaatagtctgcccctgggaggcagcggcggcggcgccctggtgacatttgaggacgtcgccgtgcggttcacccaggaggaatgggctctgctggatccttctcagaaaatcctgtaccgggacgtgatgagagagacataccggaatctgacctccgtgggcatcaactgggaatgttgggaccttgaagcctgcttcagaagcctgggaagaaacctgagagtgcaggtggtgaagagaaagtgcgagctgaccaacagcggcccctgcgccgagggcggcccaagcagcggcgcccctcctcccagcggcggcagcccagccggctccccaacctctaccgaggagggcacctctgagtccgccacccccgagagcggccctggcacctccaccgagcccagcgagggcagcgcacccggcagccctgccggcagccccacctccacagaggagggaaccagcaccgagcccagcgaaggcagcgccccaggcaccagcaccgagcctagtgagcaggagattaaacggatcaacaagatcagaagaagacttgtgaaagacagcaacaccaagaaggccggcaagacaggccccatgaaaaccctgctggttagagtgatgacacccgatctgagagagcggctggaaaacctgagaaagaagcctgaaaatatcccccagcccatcagcaatacatctagagccaacctgaataagctgctgaccgattacaccgaaatgaagaaggcgatcctgcatgtgtactgggaagagttccagaaggaccctgtgggcctgatgagccgggtggcccagcctgccagcaagaagatcgatcagaacaagctgaaacctgagatggacgagaagggcaacctgaccaccgccggctttgcctgctctcagtgtggccagcccctgttcgtgtacaagctggagcaggtgtctgagaagggcaaggcttacaccaactacttcggacggtgcaatgtggccgagcacgaaaagctgatcctgctggcccagctgaagcccgagaaggatagcgacgaagccgtgacatatagcctgggaaagtttgggcagagggccctggatttctacagcattcatgtgaccaaggagtccacccaccccgtgaagcccctggcccagatcgccggaaacagatacgcctccggacctgtgggaaaggccctgagcgacgcatgtatgggcacaatcgcctccttcctgtctaagtaccaggacatcatcatcgaacaccagaaggtggtgaagggcaaccagaagagactggagagcctgcgggagctggccggcaaggaaaacctggaataccctagcgtgaccctgccacctcagcctcacaccaaggagggcgttgatgcctacaacgaagtgatcgcccgggtgcgaatgtgggtgaacctgaacctgtggcagaagctgaagctaagcagagatgatgccaagcctctgctgagactgaagggattcccttcctttcctctggtcgagagacaggccaacgaagtggactggtgggacatggtgtgtaacgtgaagaagctgatcaacgagaaaaaggaggatggcaaggtgttttggcagaatctggctggctacaagagacaggaagccctgagaccatacctgagcagcgaggaagatcggaagaagggaaagaaattcgctcggtaccagctgggcgacctgctgctgcacctggaaaagaagcacggcgaggactggggaaaggtgtacgacgaggcctgggagcggattgacaagaaagtggaaggcctgagcaagcacatcaagctggaagaggaacggagaagcgaggacgcccagagcaaggccgccctgaccgactggctgcgggctaaggccagcttcgtgatcgagggcctgaaggaggccgacaaggacgagttctgcagatgcgagctgaagctgcagaagtggtacggggacctgcggggaaagcccttcgccatcgaagccgagaacagcatcctggacatcagcggcttcagcaagcagtacaactgtgccttcatctggcagaaggacggcgtgaagaagctgaacctgtacctgatcatcaactacttcaagggcggcaagctgcggttcaagaagatcaaacctgaagccttcgaagccaacagattctacaccgtgatcaacaaaaagagcggcgagatcgtgcccatggaggtgaacttcaacttcgacgaccccaacctgatcatcctgcctctggcctttggcaagagacagggcagagaattcatctggaacgacctgctgtccctggaaaccggcagcctgaagctggccaacggaagagtgatcgagaagacactgtacaacagaagaacccggcaggatgagcctgccctgttcgtggccctgaccttcgagcggcgggaggtcctggactcctccaatatcaaaccaatgaacctgatcggcgtggcaagaggcgaaaacatccccgccgtgatcgccctgaccgaccccgagggctgcccactgagccggtttaaggatagcctgggaaacccaacccacatcctgagaatcggcgagagctataaggagaagcagcggaccatccaggccaagaaggaggtggagcagcggagagccggcggctacagccggaagtacgccagcaaagccaagaatctggcagacgatatggtgagaaacaccgctagagatctgctgtactacgccgtgacccaggatgccatgctgatcttcgccaacctgagccggggcttcggccggcagggcaagcggaccttcatggccgagagacagtacacacggatggaggactggctgaccgccaagctggcctacgagggcctgagcaagacctacctgtccaagacactggcccagtacacctccaagacatgcagcaactgtgggtttaccatcaccagcgccgactacgacagggtgctggagaagctgaagaagacagcaacaggctggatgaccacaattaacggcaaggagctgaaggtggagggccagattacctactacaacagatacaagagacagaacgtagtcaaggacctgtccgtcgagctggatagactgagcgaagaatctgtgaacaacgacatctcctcctggacaaagggcagaagcggagaagctctgagcctcctgaagaaaagattctcccatagacccgtgcaggagaagttcgtgtgcctgaactgcggcttcgagacacacgcagccgagcaagccgccctgaacatcgccagatcctggctgttcctgcggagccaggagtacaagaaataccagacaaacaagacaaccggcaacaccgataagagagccttcgtcgagacctggcagtccttttaccggaagaagcttaaggaggtgtggaaacctgccgtgcggtctggcggatctggcggaggctccttccaggagagcgtgaccttcgaggacgtggccgtgtacttcacccagaaccagtgggccagcctggaccccgtgcagagggccctgtacagggacgtgatgctggagaactacgccaacgtggccgccctggtggccttccccgcccccaagcccgacctgatcagccagctggagaggggcagcgccccctggaggcccgacccctgggaggccgaggtgctgaggggcatctgccccggcggcggcccaagcagcggcgcccctcctcccagcggcggcagcccagccggctccccaacctctaccgaggagggcacctctgagtccgccacccccgagagcggccctggcacctccaccgagcccagcgagggcagcgcacccggcagccctgccggcagccccacctccacagaggagggaaccagcaccgagcccagcgaaggcagcgccccaggcaccagcaccgagcctagtgagcaggagattaaacggatcaacaagatcagaagaagacttgtgaaagacagcaacaccaagaaggccggcaagacaggccccatgaaaaccctgctggttagagtgatgacacccgatctgagagagcggctggaaaacctgagaaagaagcctgaaaatatcccccagcccatcagcaatacatctagagccaacctgaataagctgctgaccgattacaccgaaatgaagaaggcgatcctgcatgtgtactgggaagagttccagaaggaccctgtgggcctgatgagccgggtggcccagcctgccagcaagaagatcgatcagaacaagctgaaacctgagatggacgagaagggcaacctgaccaccgccggctttgcctgctctcagtgtggccagcccctgttcgtgtacaagctggagcaggtgtctgagaagggcaaggcttacaccaactacttcggacggtgcaatgtggccgagcacgaaaagctgatcctgctggcccagctgaagcccgagaaggatagcgacgaagccgtgacatatagcctgggaaagtttgggcagagggccctggatttctacagcattcatgtgaccaaggagtccacccaccccgtgaagcccctggcccagatcgccggaaacagatacgcctccggacctgtgggaaaggccctgagcgacgcatgtatgggcacaatcgcctccttcctgtctaagtaccaggacatcatcatcgaacaccagaaggtggtgaagggcaaccagaagagactggagagcctgcgggagctggccggcaaggaaaacctggaataccctagcgtgaccctgccacctcagcctcacaccaaggagggcgttgatgcctacaacgaagtgatcgcccgggtgcgaatgtgggtgaacctgaacctgtggcagaagctgaagctaagcagagatgatgccaagcctctgctgagactgaagggattcccttcctttcctctggtcgagagacaggccaacgaagtggactggtgggacatggtgtgtaacgtgaagaagctgatcaacgagaaaaaggaggatggcaaggtgttttggcagaatctggctggctacaagagacaggaagccctgagaccatacctgagcagcgaggaagatcggaagaagggaaagaaattcgctcggtaccagctgggcgacctgctgctgcacctggaaaagaagcacggcgaggactggggaaaggtgtacgacgaggcctgggagcggattgacaagaaagtggaaggcctgagcaagcacatcaagctggaagaggaacggagaagcgaggacgcccagagcaaggccgccctgaccgactggctgcgggctaaggccagcttcgtgatcgagggcctgaaggaggccgacaaggacgagttctgcagatgcgagctgaagctgcagaagtggtacggggacctgcggggaaagcccttcgccatcgaagccgagaacagcatcctggacatcagcggcttcagcaagcagtacaactgtgccttcatctggcagaaggacggcgtgaagaagctgaacctgtacctgatcatcaactacttcaagggcggcaagctgcggttcaagaagatcaaacctgaagccttcgaagccaacagattctacaccgtgatcaacaaaaagagcggcgagatcgtgcccatggaggtgaacttcaacttcgacgaccccaacctgatcatcctgcctctggcctttggcaagagacagggcagagaattcatctggaacgacctgctgtccctggaaaccggcagcctgaagctggccaacggaagagtgatcgagaagacactgtacaacagaagaacccggcaggatgagcctgccctgttcgtggccctgaccttcgagcggcgggaggtcctggactcctccaatatcaaaccaatgaacctgatcggcgtggcaagaggcgaaaacatccccgccgtgatcgccctgaccgaccccgagggctgcccactgagccggtttaaggatagcctgggaaacccaacccacatcctgagaatcggcgagagctataaggagaagcagcggaccatccaggccaagaaggaggtggagcagcggagagccggcggctacagccggaagtacgccagcaaagccaagaatctggcagacgatatggtgagaaacaccgctagagatctgctgtactacgccgtgacccaggatgccatgctgatcttcgccaacctgagccggggcttcggccggcagggcaagcggaccttcatggccgagagacagtacacacggatggaggactggctgaccgccaagctggcctacgagggcctgagcaagacctacctgtccaagacactggcccagtacacctccaagacatgcagcaactgtgggtttaccatcaccagcgccgactacgacagggtgctggagaagctgaagaagacagcaacaggctggatgaccacaattaacggcaaggagctgaaggtggagggccagattacctactacaacagatacaagagacagaacgtagtcaaggacctgtccgtcgagctggatagactgagcgaagaatctgtgaacaacgacatctcctcctggacaaagggcagaagcggagaagctctgagcctcctgaagaaaagattctcccatagacccgtgcaggagaagttcgtgtgcctgaactgcggcttcgagacacacgcagccgagcaagccgccctgaacatcgccagatcctggctgttcctgcggagccaggagtacaagaaataccagacaaacaagacaaccggcaacaccgataagagagccttcgtcgagacctggcagtccttttaccggaagaagcttaaggaggtgtggaaacctgccgtgcggtctggcggatctggcggaggctcctttccaggagagcgtgaccttcgaggacgtggccgtgtacttcacccagaaccagtgggccagcctggaccccgtgcagagggccctgtacagggacgtgatgctggagaactacgccaacgtggccgccctggtggccttccccgcccccaagcccgacctgatcagccagctggagaggggcagcgccccctggaggcccgacccctgggaggccgaggtgctgaggggcatctgccccggcggatctggctccggcagcggccccaagaaaaagagaaaagtctaagctgccttctgcggggcttgccttctggccatgcccttcttctctcccttgcacctgtacctcttggtctttgaataaagcctgagtaggaaggctagcaaaaaaaaaaaaaaaaaaaaaaaaaaaaaaaaaaaaaaaaaaaaaaaaaaaaaaaaaaaaaaaaaaaaaaaaaaaaaaaa

SEQ ID NO: 15502 - RNA, 9485 nt, synthetic construct
  source 1..9485: mol_type = other RNA
aggaaataagagagaaaagaagagtaagaagaaatataagagccaccatggcccctaagaagaagcgtaaagtgagccggatggaacgcctcgtctacgaggtgcggcagaagtgcagaaacatcgaggacatctgcatctcctgcggatctctgaacgtgaccctggagcacccactgttcatcggcggcatgtgccagaactgtaaaaactgttttctggagtgtgcctatcaatacgacgatgacggctaccagagctactgcaccatctgttgcggcggaagagaggtgctgatgtgtggaaataacaactgctgccggtgcttctgcgtggaatgcgtggacctgctggtgggccccggcgccgcccaggccgctattaaggaagatccttggaactgctacatgtgcggccacaagggcacatacggcctgctgagacggagagaggactggcctagcagactgcagatgttcttcgccaataaccacgaccaggagttcgacccccctaaggtgtaccctcccgtccccgccgagaagagaaagcccatccgggtcctgagcctgttcgatggcatcgccaccggtctgctggtgctgaaggacctgggcatccaggtggataggtacattgcctccgaggtgtgcgaggactccatcaccgtgggaatggtgcgtcatcagggcaagatcatgtacgtgggcgacgtgcggagcgtgacacagaagcatatccaggagtggggccctttcgacctggtgatcggcggcagcccttgcaatgacctgagcatcgtgaacccagcccggaagggcctgtacgagggaaccggcagactgttcttcgagttttacagactgctgcacgacgcccggcctaaggaaggcgacgaccggcccttcttttggctgttcgagaatgtggtggccatgggagtcagcgacaagcgggatattagccggttcctggagagcaaccccgtgatgatcgatgccaaggaagtgagcgccgcccaccgggccagatacttctggggcaatctgcctggcatgaacagacccctggccagcaccgtgaacgacaagctggagctgcaggagtgcctggagcacggccggatcgccaagttcagcaaggtgagaaccatcaccacccgaagcaacagcatcaaacaaggcaaggaccagcactttcctgtgttcatgaacgagaaggaggacatcctgtggtgtaccgagatggagagagtgttcgggttcccagtccactacacagatgtcagcaacatgtctagactggccagacagagactgctgggaagaagctggtccgtccctgtgatcagacacctgttcgcccctctgaaggagtacttcgcctgcgtgagcagcggcaacagcaacgccaacagccggggccccagcttctctagcggcctggtgccactgtccctgagagggagccacatgggccccatggagatctacaaaaccgtgagcgcctggaagcggcagcctgtgcgcgtgctgagcctgtttcggaatatcgataaagtcctgaaaagcctgggattcctggagagcggctctggctccggcggtggcaccctgaagtacgtggaggatgtgacaaacgtggtcagacgggatgtggagaagtggggccccttcgatctggtgtacggcagcacccaacccctgggcagctcttgtgaccggtgccctggctggtacatgtttcagttccaccggatcctgcagtacgccctgccgagacaggagtcccagcggccattcttttggattttcatggacaacttgctgctgaccgaggatgaccaggaaactaccactcggttcctgcagaccgaagccgtgaccctgcaggacgtgagaggccgggactaccagaacgccatgcgggtgtggtccaacatccctggactgaaaagcaagcacgcacctctgacccctaaagaagaggagtacctgcaggcccaggtgcggagcagaagcaagctggacgcccctaaggtggatctgctggtgaagaattgcctcctgcccctgagagagtacttcaagtatttcagccagaatagtctgcccctgggaggcagcggcggcggcgccctggtgacatttgaggacgtcgccgtgcggttcacccaggaggaatgggctctgctggatccttctcagaaaatcctgtaccgggacgtgatgagagagacataccggaatctgacctccgtgggcatcaactgggaatgttgggaccttgaagcctgcttcagaagcctgggaagaaacctgagagtgcaggtggtgaagagaaagtgcgagctgaccaacagcggcccctgcgccgagggcggcccaagcagcggcgcccctcctcccagcggcggcagcccagccggctccccaacctctaccgaggagggcacctctgagtccgccacccccgagagcggccctggcacctccaccgagcccagcgagggcagcgcacccggcagccctgccggcagccccacctccacagaggagggaaccagcaccgagcccagcgaaggcagcgccccaggcaccagcaccgagcctagtgagcaggagattaaacggatcaacaagatcagaagaagacttgtgaaagacagcaacaccaagaaggccggcaagacaggccccatgaaaaccctgctggttagagtgatgacacccgatctgagagagcggctggaaaacctgagaaagaagcctgaaaatatcccccagcccatcagcaatacatctagagccaacctgaataagctgctgaccgattacaccgaaatgaagaaggcgatcctgcatgtgtactgggaagagttccagaaggaccctgtgggcctgatgagccgggtggcccagcctgccagcaagaagatcgatcagaacaagctgaaacctgagatggacgagaagggcaacctgaccaccgccggctttgcctgctctcagtgtggccagcccctgttcgtgtacaagctggagcaggtgtctgagaagggcaaggcttacaccaactacttcggacggtgcaatgtggccgagcacgaaaagctgatcctgctggcccagctgaagcccgagaaggatagcgacgaagccgtgacatatagcctgggaaagtttgggcagagggccctggatttctacagcattcatgtgaccaaggagtccacccaccccgtgaagcccctggcccagatcgccggaaacagatacgcctccggacctgtgggaaaggccctgagcgacgcatgtatgggcacaatcgcctccttcctgtctaagtaccaggacatcatcatcgaacaccagaaggtggtgaagggcaaccagaagagactggagagcctgcgggagctggccggcaaggaaaacctggaataccctagcgtgaccctgccacctcagcctcacaccaaggagggcgttgatgcctacaacgaagtgatcgcccgggtgcgaatgtgggtgaacctgaacctgtggcagaagctgaagctaagcagagatgatgccaagcctctgctgagactgaagggattcccttcctttcctctggtcgagagacaggccaacgaagtggactggtgggacatggtgtgtaacgtgaagaagctgatcaacgagaaaaaggaggatggcaaggtgttttggcagaatctggctggctacaagagacaggaagccctgagaccatacctgagcagcgaggaagatcggaagaagggaaagaaattcgctcggtaccagctgggcgacctgctgctgcacctggaaaagaagcacggcgaggactggggaaaggtgtacgacgaggcctgggagcggattgacaagaaagtggaaggcctgagcaagcacatcaagctggaagaggaacggagaagcgaggacgcccagagcaaggccgccctgaccgactggctgcgggctaaggccagcttcgtgatcgagggcctgaaggaggccgacaaggacgagttctgcagatgcgagctgaagctgcagaagtggtacggggacctgcggggaaagcccttcgccatcgaagccgagaacagcatcctggacatcagcggcttcagcaagcagtacaactgtgccttcatctggcagaaggacggcgtgaagaagctgaacctgtacctgatcatcaactacttcaagggcggcaagctgcggttcaagaagatcaaacctgaagccttcgaagccaacagattctacaccgtgatcaacaaaaagagcggcgagatcgtgcccatggaggtgaacttcaacttcgacgaccccaacctgatcatcctgcctctggcctttggcaagagacagggcagagaattcatctggaacgacctgctgtccctggaaaccggcagcctgaagctggccaacggaagagtgatcgagaagacactgtacaacagaagaacccggcaggatgagcctgccctgttcgtggccctgaccttcgagcggcgggaggtcctggactcctccaatatcaaaccaatgaacctgatcggcgtggcaagaggcgaaaacatccccgccgtgatcgccctgaccgaccccgagggctgcccactgagccggtttaaggatagcctgggaaacccaacccacatcctgagaatcggcgagagctataaggagaagcagcggaccatccaggccaagaaggaggtggagcagcggagagccggcggctacagccggaagtacgccagcaaagccaagaatctggcagacgatatggtgagaaacaccgctagagatctgctgtactacgccgtgacccaggatgccatgctgatcttcgccaacctgagccggggcttcggccggcagggcaagcggaccttcatggccgagagacagtacacacggatggaggactggctgaccgccaagctggcctacgagggcctgagcaagacctacctgtccaagacactggcccagtacacctccaagacatgcagcaactgtgggtttaccatcaccagcgccgactacgacagggtgctggagaagctgaagaagacagcaacaggctggatgaccacaattaacggcaaggagctgaaggtggagggccagattacctactacaacagatacaagagacagaacgtagtcaaggacctgtccgtcgagctggatagactgagcgaagaatctgtgaacaacgacatctcctcctggacaaagggcagaagcggagaagctctgagcctcctgaagaaaagattctcccatagacccgtgcaggagaagttcgtgtgcctgaactgcggcttcgagacacacgcagccgagcaagccgccctgaacatcgccagatcctggctgttcctgcggagccaggagtacaagaaataccagacaaacaagacaaccggcaacaccgataagagagccttcgtcgagacctggcagtccttttaccggaagaagcttaaggaggtgtggaaacctgccgtgcggtctggcggatctggcggaggctccctgctgaccttcgaggacgtggccgtgcacttcagcgaggaggagtggcagctgctggaccccaaccagaagaccctgtacaacgaggtgatgtgggacatctgcgaggccgccagcttcgtgggcctgaagttcaagaacgacaccggcaacgccgagcccagcagcgtgagcgccctggagatccaggccgccgagaggcagggcagcaagaccaggaagaacgtggccaggaagaggaagggcggcccaagcagcggcgcccctcctcccagcggcggcagcccagccggctccccaacctctaccgaggagggcacctctgagtccgccacccccgagagcggccctggcacctccaccgagcccagcgagggcagcgcacccggcagccctgccggcagccccacctccacagaggagggaaccagcaccgagcccagcgaaggcagcgccccaggcaccagcaccgagcctagtgagcaggagattaaacggatcaacaagatcagaagaagacttgtgaaagacagcaacaccaagaaggccggcaagacaggccccatgaaaaccctgctggttagagtgatgacacccgatctgagagagcggctggaaaacctgagaaagaagcctgaaaatatcccccagcccatcagcaatacatctagagccaacctgaataagctgctgaccgattacaccgaaatgaagaaggcgatcctgcatgtgtactgggaagagttccagaaggaccctgtgggcctgatgagccgggtggcccagcctgccagcaagaagatcgatcagaacaagctgaaacctgagatggacgagaagggcaacctgaccaccgccggctttgcctgctctcagtgtggccagcccctgttcgtgtacaagctggagcaggtgtctgagaagggcaaggcttacaccaactacttcggacggtgcaatgtggccgagcacgaaaagctgatcctgctggcccagctgaagcccgagaaggatagcgacgaagccgtgacatatagcctgggaaagtttgggcagagggccctggatttctacagcattcatgtgaccaaggagtccacccaccccgtgaagcccctggcccagatcgccggaaacagatacgcctccggacctgtgggaaaggccctgagcgacgcatgtatgggcacaatcgcctccttcctgtctaagtaccaggacatcatcatcgaacaccagaaggtggtgaagggcaaccagaagagactggagagcctgcgggagctggccggcaaggaaaacctggaataccctagcgtgaccctgccacctcagcctcacaccaaggagggcgttgatgcctacaacgaagtgatcgcccgggtgcgaatgtgggtgaacctgaacctgtggcagaagctgaagctaagcagagatgatgccaagcctctgctgagactgaagggattcccttcctttcctctggtcgagagacaggccaacgaagtggactggtgggacatggtgtgtaacgtgaagaagctgatcaacgagaaaaaggaggatggcaaggtgttttggcagaatctggctggctacaagagacaggaagccctgagaccatacctgagcagcgaggaagatcggaagaagggaaagaaattcgctcggtaccagctgggcgacctgctgctgcacctggaaaagaagcacggcgaggactggggaaaggtgtacgacgaggcctgggagcggattgacaagaaagtggaaggcctgagcaagcacatcaagctggaagaggaacggagaagcgaggacgcccagagcaaggccgccctgaccgactggctgcgggctaaggccagcttcgtgatcgagggcctgaaggaggccgacaaggacgagttctgcagatgcgagctgaagctgcagaagtggtacggggacctgcggggaaagcccttcgccatcgaagccgagaacagcatcctggacatcagcggcttcagcaagcagtacaactgtgccttcatctggcagaaggacggcgtgaagaagctgaacctgtacctgatcatcaactacttcaagggcggcaagctgcggttcaagaagatcaaacctgaagccttcgaagccaacagattctacaccgtgatcaacaaaaagagcggcgagatcgtgcccatggaggtgaacttcaacttcgacgaccccaacctgatcatcctgcctctggcctttggcaagagacagggcagagaattcatctggaacgacctgctgtccctggaaaccggcagcctgaagctggccaacggaagagtgatcgagaagacactgtacaacagaagaacccggcaggatgagcctgccctgttcgtggccctgaccttcgagcggcgggaggtcctggactcctccaatatcaaaccaatgaacctgatcggcgtggcaagaggcgaaaacatccccgccgtgatcgccctgaccgaccccgagggctgcccactgagccggtttaaggatagcctgggaaacccaacccacatcctgagaatcggcgagagctataaggagaagcagcggaccatccaggccaagaaggaggtggagcagcggagagccggcggctacagccggaagtacgccagcaaagccaagaatctggcagacgatatggtgagaaacaccgctagagatctgctgtactacgccgtgacccaggatgccatgctgatcttcgccaacctgagccggggcttcggccggcagggcaagcggaccttcatggccgagagacagtacacacggatggaggactggctgaccgccaagctggcctacgagggcctgagcaagacctacctgtccaagacactggcccagtacacctccaagacatgcagcaactgtgggtttaccatcaccagcgccgactacgacagggtgctggagaagctgaagaagacagcaacaggctggatgaccacaattaacggcaaggagctgaaggtggagggccagattacctactacaacagatacaagagacagaacgtagtcaaggacctgtccgtcgagctggatagactgagcgaagaatctgtgaacaacgacatctcctcctggacaaagggcagaagcggagaagctctgagcctcctgaagaaaagattctcccatagacccgtgcaggagaagttcgtgtgcctgaactgcggcttcgagacacacgcagccgagcaagccgccctgaacatcgccagatcctggctgttcctgcggagccaggagtacaagaaataccagacaaacaagacaaccggcaacaccgataagagagccttcgtcgagacctggcagtccttttaccggaagaagcttaaggaggtgtggaaacctgccgtgcggtctggcggatctggcggaggctcctctgctgaccttcgaggacgtggccgtgcacttcagcgaggaggagtggcagctgctggaccccaaccagaagaccctgtacaacgaggtgatgtgggacatctgcgaggccgccagcttcgtgggcctgaagttcaagaacgacaccggcaacgccgagcccagcagcgtgagcgccctggagatccaggccgccgagaggcagggcagcaagaccaggaagaacgtggccaggaagaggaagggatctggctccggcagcggccccaagaaaaagagaaaagtctaagctgccttctgcggggcttgccttctggccatgcccttcttctctcccttgcacctgtacctcttggtctttgaataaagcctgagtaggaaggctagcaaaaaaaaaaaaaaaaaaaaaaaaaaaaaaaaaaaaaaaaaaaaaaaaaaaaaaaaaaaaaaaaaaaaaaaaaaaaaaaa

SEQ ID NO: 15503 - RNA, 9485 nt, synthetic construct
  source 1..9485: mol_type = other RNA
aggaaataagagagaaaagaagagtaagaagaaatataagagccaccatggcccctaagaagaagcgtaaagtgagccggatggaacgcctcgtctacgaggtgcggcagaagtgcagaaacatcgaggacatctgcatctcctgcggatctctgaacgtgaccctggagcacccactgttcatcggcggcatgtgccagaactgtaaaaactgttttctggagtgtgcctatcaatacgacgatgacggctaccagagctactgcaccatctgttgcggcggaagagaggtgctgatgtgtggaaataacaactgctgccggtgcttctgcgtggaatgcgtggacctgctggtgggccccggcgccgcccaggccgctattaaggaagatccttggaactgctacatgtgcggccacaagggcacatacggcctgctgagacggagagaggactggcctagcagactgcagatgttcttcgccaataaccacgaccaggagttcgacccccctaaggtgtaccctcccgtccccgccgagaagagaaagcccatccgggtcctgagcctgttcgatggcatcgccaccggtctgctggtgctgaaggacctgggcatccaggtggataggtacattgcctccgaggtgtgcgaggactccatcaccgtgggaatggtgcgtcatcagggcaagatcatgtacgtgggcgacgtgcggagcgtgacacagaagcatatccaggagtggggccctttcgacctggtgatcggcggcagcccttgcaatgacctgagcatcgtgaacccagcccggaagggcctgtacgagggaaccggcagactgttcttcgagttttacagactgctgcacgacgcccggcctaaggaaggcgacgaccggcccttcttttggctgttcgagaatgtggtggccatgggagtcagcgacaagcgggatattagccggttcctggagagcaaccccgtgatgatcgatgccaaggaagtgagcgccgcccaccgggccagatacttctggggcaatctgcctggcatgaacagacccctggccagcaccgtgaacgacaagctggagctgcaggagtgcctggagcacggccggatcgccaagttcagcaaggtgagaaccatcaccacccgaagcaacagcatcaaacaaggcaaggaccagcactttcctgtgttcatgaacgagaaggaggacatcctgtggtgtaccgagatggagagagtgttcgggttcccagtccactacacagatgtcagcaacatgtctagactggccagacagagactgctgggaagaagctggtccgtccctgtgatcagacacctgttcgcccctctgaaggagtacttcgcctgcgtgagcagcggcaacagcaacgccaacagccggggccccagcttctctagcggcctggtgccactgtccctgagagggagccacatgggccccatggagatctacaaaaccgtgagcgcctggaagcggcagcctgtgcgcgtgctgagcctgtttcggaatatcgataaagtcctgaaaagcctgggattcctggagagcggctctggctccggcggtggcaccctgaagtacgtggaggatgtgacaaacgtggtcagacgggatgtggagaagtggggccccttcgatctggtgtacggcagcacccaacccctgggcagctcttgtgaccggtgccctggctggtacatgtttcagttccaccggatcctgcagtacgccctgccgagacaggagtcccagcggccattcttttggattttcatggacaacttgctgctgaccgaggatgaccaggaaactaccactcggttcctgcagaccgaagccgtgaccctgcaggacgtgagaggccgggactaccagaacgccatgcgggtgtggtccaacatccctggactgaaaagcaagcacgcacctctgacccctaaagaagaggagtacctgcaggcccaggtgcggagcagaagcaagctggacgcccctaaggtggatctgctggtgaagaattgcctcctgcccctgagagagtacttcaagtatttcagccagaatagtctgcccctgggaggcagcggcggcggcgccctggtgacatttgaggacgtcgccgtgcggttcacccaggaggaatgggctctgctggatccttctcagaaaatcctgtaccgggacgtgatgagagagacataccggaatctgacctccgtgggcatcaactgggaatgttgggaccttgaagcctgcttcagaagcctgggaagaaacctgagagtgcaggtggtgaagagaaagtgcgagctgaccaacagcggcccctgcgccgagggcggcccaagcagcggcgcccctcctcccagcggcggcagcccagccggctccccaacctctaccgaggagggcacctctgagtccgccacccccgagagcggccctggcacctccaccgagcccagcgagggcagcgcacccggcagccctgccggcagccccacctccacagaggagggaaccagcaccgagcccagcgaaggcagcgccccaggcaccagcaccgagcctagtgagcaggagattaaacggatcaacaagatcagaagaagacttgtgaaagacagcaacaccaagaaggccggcaagacaggccccatgaaaaccctgctggttagagtgatgacacccgatctgagagagcggctggaaaacctgagaaagaagcctgaaaatatcccccagcccatcagcaatacatctagagccaacctgaataagctgctgaccgattacaccgaaatgaagaaggcgatcctgcatgtgtactgggaagagttccagaaggaccctgtgggcctgatgagccgggtggcccagcctgccagcaagaagatcgatcagaacaagctgaaacctgagatggacgagaagggcaacctgaccaccgccggctttgcctgctctcagtgtggccagcccctgttcgtgtacaagctggagcaggtgtctgagaagggcaaggcttacaccaactacttcggacggtgcaatgtggccgagcacgaaaagctgatcctgctggcccagctgaagcccgagaaggatagcgacgaagccgtgacatatagcctgggaaagtttgggcagagggccctggatttctacagcattcatgtgaccaaggagtccacccaccccgtgaagcccctggcccagatcgccggaaacagatacgcctccggacctgtgggaaaggccctgagcgacgcatgtatgggcacaatcgcctccttcctgtctaagtaccaggacatcatcatcgaacaccagaaggtggtgaagggcaaccagaagagactggagagcctgcgggagctggccggcaaggaaaacctggaataccctagcgtgaccctgccacctcagcctcacaccaaggagggcgttgatgcctacaacgaagtgatcgcccgggtgcgaatgtgggtgaacctgaacctgtggcagaagctgaagctaagcagagatgatgccaagcctctgctgagactgaagggattcccttcctttcctctggtcgagagacaggccaacgaagtggactggtgggacatggtgtgtaacgtgaagaagctgatcaacgagaaaaaggaggatggcaaggtgttttggcagaatctggctggctacaagagacaggaagccctgagaccatacctgagcagcgaggaagatcggaagaagggaaagaaattcgctcggtaccagctgggcgacctgctgctgcacctggaaaagaagcacggcgaggactggggaaaggtgtacgacgaggcctgggagcggattgacaagaaagtggaaggcctgagcaagcacatcaagctggaagaggaacggagaagcgaggacgcccagagcaaggccgccctgaccgactggctgcgggctaaggccagcttcgtgatcgagggcctgaaggaggccgacaaggacgagttctgcagatgcgagctgaagctgcagaagtggtacggggacctgcggggaaagcccttcgccatcgaagccgagaacagcatcctggacatcagcggcttcagcaagcagtacaactgtgccttcatctggcagaaggacggcgtgaagaagctgaacctgtacctgatcatcaactacttcaagggcggcaagctgcggttcaagaagatcaaacctgaagccttcgaagccaacagattctacaccgtgatcaacaaaaagagcggcgagatcgtgcccatggaggtgaacttcaacttcgacgaccccaacctgatcatcctgcctctggcctttggcaagagacagggcagagaattcatctggaacgacctgctgtccctggaaaccggcagcctgaagctggccaacggaagagtgatcgagaagacactgtacaacagaagaacccggcaggatgagcctgccctgttcgtggccctgaccttcgagcggcgggaggtcctggactcctccaatatcaaaccaatgaacctgatcggcgtggcaagaggcgaaaacatccccgccgtgatcgccctgaccgaccccgagggctgcccactgagccggtttaaggatagcctgggaaacccaacccacatcctgagaatcggcgagagctataaggagaagcagcggaccatccaggccaagaaggaggtggagcagcggagagccggcggctacagccggaagtacgccagcaaagccaagaatctggcagacgatatggtgagaaacaccgctagagatctgctgtactacgccgtgacccaggatgccatgctgatcttcgccaacctgagccggggcttcggccggcagggcaagcggaccttcatggccgagagacagtacacacggatggaggactggctgaccgccaagctggcctacgagggcctgagcaagacctacctgtccaagacactggcccagtacacctccaagacatgcagcaactgtgggtttaccatcaccagcgccgactacgacagggtgctggagaagctgaagaagacagcaacaggctggatgaccacaattaacggcaaggagctgaaggtggagggccagattacctactacaacagatacaagagacagaacgtagtcaaggacctgtccgtcgagctggatagactgagcgaagaatctgtgaacaacgacatctcctcctggacaaagggcagaagcggagaagctctgagcctcctgaagaaaagattctcccatagacccgtgcaggagaagttcgtgtgcctgaactgcggcttcgagacacacgcagccgagcaagccgccctgaacatcgccagatcctggctgttcctgcggagccaggagtacaagaaataccagacaaacaagacaaccggcaacaccgataagagagccttcgtcgagacctggcagtccttttaccggaagaagcttaaggaggtgtggaaacctgccgtgcggtctggcggatctggcggaggctccatggccttcgaggacgtggccgtgcacttcagccaggaggagtggggcctgctggacaccgcccagaggagcctgtacaggagggtgatgctggagaacttcgccctgctggccagcctgggcctgagcgtgagcaggccccacgtggtgacccagctggagaggggcgaggagccctgggtgctgagcggcgtggacgtgaccctgcccagggacgcccagaggaggccccacaggggcagcggcggcccaagcagcggcgcccctcctcccagcggcggcagcccagccggctccccaacctctaccgaggagggcacctctgagtccgccacccccgagagcggccctggcacctccaccgagcccagcgagggcagcgcacccggcagccctgccggcagccccacctccacagaggagggaaccagcaccgagcccagcgaaggcagcgccccaggcaccagcaccgagcctagtgagcaggagattaaacggatcaacaagatcagaagaagacttgtgaaagacagcaacaccaagaaggccggcaagacaggccccatgaaaaccctgctggttagagtgatgacacccgatctgagagagcggctggaaaacctgagaaagaagcctgaaaatatcccccagcccatcagcaatacatctagagccaacctgaataagctgctgaccgattacaccgaaatgaagaaggcgatcctgcatgtgtactgggaagagttccagaaggaccctgtgggcctgatgagccgggtggcccagcctgccagcaagaagatcgatcagaacaagctgaaacctgagatggacgagaagggcaacctgaccaccgccggctttgcctgctctcagtgtggccagcccctgttcgtgtacaagctggagcaggtgtctgagaagggcaaggcttacaccaactacttcggacggtgcaatgtggccgagcacgaaaagctgatcctgctggcccagctgaagcccgagaaggatagcgacgaagccgtgacatatagcctgggaaagtttgggcagagggccctggatttctacagcattcatgtgaccaaggagtccacccaccccgtgaagcccctggcccagatcgccggaaacagatacgcctccggacctgtgggaaaggccctgagcgacgcatgtatgggcacaatcgcctccttcctgtctaagtaccaggacatcatcatcgaacaccagaaggtggtgaagggcaaccagaagagactggagagcctgcgggagctggccggcaaggaaaacctggaataccctagcgtgaccctgccacctcagcctcacaccaaggagggcgttgatgcctacaacgaagtgatcgcccgggtgcgaatgtgggtgaacctgaacctgtggcagaagctgaagctaagcagagatgatgccaagcctctgctgagactgaagggattcccttcctttcctctggtcgagagacaggccaacgaagtggactggtgggacatggtgtgtaacgtgaagaagctgatcaacgagaaaaaggaggatggcaaggtgttttggcagaatctggctggctacaagagacaggaagccctgagaccatacctgagcagcgaggaagatcggaagaagggaaagaaattcgctcggtaccagctgggcgacctgctgctgcacctggaaaagaagcacggcgaggactggggaaaggtgtacgacgaggcctgggagcggattgacaagaaagtggaaggcctgagcaagcacatcaagctggaagaggaacggagaagcgaggacgcccagagcaaggccgccctgaccgactggctgcgggctaaggccagcttcgtgatcgagggcctgaaggaggccgacaaggacgagttctgcagatgcgagctgaagctgcagaagtggtacggggacctgcggggaaagcccttcgccatcgaagccgagaacagcatcctggacatcagcggcttcagcaagcagtacaactgtgccttcatctggcagaaggacggcgtgaagaagctgaacctgtacctgatcatcaactacttcaagggcggcaagctgcggttcaagaagatcaaacctgaagccttcgaagccaacagattctacaccgtgatcaacaaaaagagcggcgagatcgtgcccatggaggtgaacttcaacttcgacgaccccaacctgatcatcctgcctctggcctttggcaagagacagggcagagaattcatctggaacgacctgctgtccctggaaaccggcagcctgaagctggccaacggaagagtgatcgagaagacactgtacaacagaagaacccggcaggatgagcctgccctgttcgtggccctgaccttcgagcggcgggaggtcctggactcctccaatatcaaaccaatgaacctgatcggcgtggcaagaggcgaaaacatccccgccgtgatcgccctgaccgaccccgagggctgcccactgagccggtttaaggatagcctgggaaacccaacccacatcctgagaatcggcgagagctataaggagaagcagcggaccatccaggccaagaaggaggtggagcagcggagagccggcggctacagccggaagtacgccagcaaagccaagaatctggcagacgatatggtgagaaacaccgctagagatctgctgtactacgccgtgacccaggatgccatgctgatcttcgccaacctgagccggggcttcggccggcagggcaagcggaccttcatggccgagagacagtacacacggatggaggactggctgaccgccaagctggcctacgagggcctgagcaagacctacctgtccaagacactggcccagtacacctccaagacatgcagcaactgtgggtttaccatcaccagcgccgactacgacagggtgctggagaagctgaagaagacagcaacaggctggatgaccacaattaacggcaaggagctgaaggtggagggccagattacctactacaacagatacaagagacagaacgtagtcaaggacctgtccgtcgagctggatagactgagcgaagaatctgtgaacaacgacatctcctcctggacaaagggcagaagcggagaagctctgagcctcctgaagaaaagattctcccatagacccgtgcaggagaagttcgtgtgcctgaactgcggcttcgagacacacgcagccgagcaagccgccctgaacatcgccagatcctggctgttcctgcggagccaggagtacaagaaataccagacaaacaagacaaccggcaacaccgataagagagccttcgtcgagacctggcagtccttttaccggaagaagcttaaggaggtgtggaaacctgccgtgcggtctggcggatctggcggaggctcctatggccttcgaggacgtggccgtgcacttcagccaggaggagtggggcctgctggacaccgcccagaggagcctgtacaggagggtgatgctggagaacttcgccctgctggccagcctgggcctgagcgtgagcaggccccacgtggtgacccagctggagaggggcgaggagccctgggtgctgagcggcgtggacgtgaccctgcccagggacgcccagaggaggccccacaggggcagcggatctggctccggcagcggccccaagaaaaagagaaaagtctaagctgccttctgcggggcttgccttctggccatgcccttcttctctcccttgcacctgtacctcttggtctttgaataaagcctgagtaggaaggctagcaaaaaaaaaaaaaaaaaaaaaaaaaaaaaaaaaaaaaaaaaaaaaaaaaaaaaaaaaaaaaaaaaaaaaaaaaaaaaaaa

SEQ ID NO: 15504 - RNA, 9485 nt, synthetic construct
  source 1..9485: mol_type = other RNA
aggaaataagagagaaaagaagagtaagaagaaatataagagccaccatggcccctaagaagaagcgtaaagtgagccggatggaacgcctcgtctacgaggtgcggcagaagtgcagaaacatcgaggacatctgcatctcctgcggatctctgaacgtgaccctggagcacccactgttcatcggcggcatgtgccagaactgtaaaaactgttttctggagtgtgcctatcaatacgacgatgacggctaccagagctactgcaccatctgttgcggcggaagagaggtgctgatgtgtggaaataacaactgctgccggtgcttctgcgtggaatgcgtggacctgctggtgggccccggcgccgcccaggccgctattaaggaagatccttggaactgctacatgtgcggccacaagggcacatacggcctgctgagacggagagaggactggcctagcagactgcagatgttcttcgccaataaccacgaccaggagttcgacccccctaaggtgtaccctcccgtccccgccgagaagagaaagcccatccgggtcctgagcctgttcgatggcatcgccaccggtctgctggtgctgaaggacctgggcatccaggtggataggtacattgcctccgaggtgtgcgaggactccatcaccgtgggaatggtgcgtcatcagggcaagatcatgtacgtgggcgacgtgcggagcgtgacacagaagcatatccaggagtggggccctttcgacctggtgatcggcggcagcccttgcaatgacctgagcatcgtgaacccagcccggaagggcctgtacgagggaaccggcagactgttcttcgagttttacagactgctgcacgacgcccggcctaaggaaggcgacgaccggcccttcttttggctgttcgagaatgtggtggccatgggagtcagcgacaagcgggatattagccggttcctggagagcaaccccgtgatgatcgatgccaaggaagtgagcgccgcccaccgggccagatacttctggggcaatctgcctggcatgaacagacccctggccagcaccgtgaacgacaagctggagctgcaggagtgcctggagcacggccggatcgccaagttcagcaaggtgagaaccatcaccacccgaagcaacagcatcaaacaaggcaaggaccagcactttcctgtgttcatgaacgagaaggaggacatcctgtggtgtaccgagatggagagagtgttcgggttcccagtccactacacagatgtcagcaacatgtctagactggccagacagagactgctgggaagaagctggtccgtccctgtgatcagacacctgttcgcccctctgaaggagtacttcgcctgcgtgagcagcggcaacagcaacgccaacagccggggccccagcttctctagcggcctggtgccactgtccctgagagggagccacatgggccccatggagatctacaaaaccgtgagcgcctggaagcggcagcctgtgcgcgtgctgagcctgtttcggaatatcgataaagtcctgaaaagcctgggattcctggagagcggctctggctccggcggtggcaccctgaagtacgtggaggatgtgacaaacgtggtcagacgggatgtggagaagtggggccccttcgatctggtgtacggcagcacccaacccctgggcagctcttgtgaccggtgccctggctggtacatgtttcagttccaccggatcctgcagtacgccctgccgagacaggagtcccagcggccattcttttggattttcatggacaacttgctgctgaccgaggatgaccaggaaactaccactcggttcctgcagaccgaagccgtgaccctgcaggacgtgagaggccgggactaccagaacgccatgcgggtgtggtccaacatccctggactgaaaagcaagcacgcacctctgacccctaaagaagaggagtacctgcaggcccaggtgcggagcagaagcaagctggacgcccctaaggtggatctgctggtgaagaattgcctcctgcccctgagagagtacttcaagtatttcagccagaatagtctgcccctgggaggcagcggcggcggcgccctggtgacatttgaggacgtcgccgtgcggttcacccaggaggaatgggctctgctggatccttctcagaaaatcctgtaccgggacgtgatgagagagacataccggaatctgacctccgtgggcatcaactgggaatgttgggaccttgaagcctgcttcagaagcctgggaagaaacctgagagtgcaggtggtgaagagaaagtgcgagctgaccaacagcggcccctgcgccgagggcggcccaagcagcggcgcccctcctcccagcggcggcagcccagccggctccccaacctctaccgaggagggcacctctgagtccgccacccccgagagcggccctggcacctccaccgagcccagcgagggcagcgcacccggcagccctgccggcagccccacctccacagaggagggaaccagcaccgagcccagcgaaggcagcgccccaggcaccagcaccgagcctagtgagcaggagattaaacggatcaacaagatcagaagaagacttgtgaaagacagcaacaccaagaaggccggcaagacaggccccatgaaaaccctgctggttagagtgatgacacccgatctgagagagcggctggaaaacctgagaaagaagcctgaaaatatcccccagcccatcagcaatacatctagagccaacctgaataagctgctgaccgattacaccgaaatgaagaaggcgatcctgcatgtgtactgggaagagttccagaaggaccctgtgggcctgatgagccgggtggcccagcctgccagcaagaagatcgatcagaacaagctgaaacctgagatggacgagaagggcaacctgaccaccgccggctttgcctgctctcagtgtggccagcccctgttcgtgtacaagctggagcaggtgtctgagaagggcaaggcttacaccaactacttcggacggtgcaatgtggccgagcacgaaaagctgatcctgctggcccagctgaagcccgagaaggatagcgacgaagccgtgacatatagcctgggaaagtttgggcagagggccctggatttctacagcattcatgtgaccaaggagtccacccaccccgtgaagcccctggcccagatcgccggaaacagatacgcctccggacctgtgggaaaggccctgagcgacgcatgtatgggcacaatcgcctccttcctgtctaagtaccaggacatcatcatcgaacaccagaaggtggtgaagggcaaccagaagagactggagagcctgcgggagctggccggcaaggaaaacctggaataccctagcgtgaccctgccacctcagcctcacaccaaggagggcgttgatgcctacaacgaagtgatcgcccgggtgcgaatgtgggtgaacctgaacctgtggcagaagctgaagctaagcagagatgatgccaagcctctgctgagactgaagggattcccttcctttcctctggtcgagagacaggccaacgaagtggactggtgggacatggtgtgtaacgtgaagaagctgatcaacgagaaaaaggaggatggcaaggtgttttggcagaatctggctggctacaagagacaggaagccctgagaccatacctgagcagcgaggaagatcggaagaagggaaagaaattcgctcggtaccagctgggcgacctgctgctgcacctggaaaagaagcacggcgaggactggggaaaggtgtacgacgaggcctgggagcggattgacaagaaagtggaaggcctgagcaagcacatcaagctggaagaggaacggagaagcgaggacgcccagagcaaggccgccctgaccgactggctgcgggctaaggccagcttcgtgatcgagggcctgaaggaggccgacaaggacgagttctgcagatgcgagctgaagctgcagaagtggtacggggacctgcggggaaagcccttcgccatcgaagccgagaacagcatcctggacatcagcggcttcagcaagcagtacaactgtgccttcatctggcagaaggacggcgtgaagaagctgaacctgtacctgatcatcaactacttcaagggcggcaagctgcggttcaagaagatcaaacctgaagccttcgaagccaacagattctacaccgtgatcaacaaaaagagcggcgagatcgtgcccatggaggtgaacttcaacttcgacgaccccaacctgatcatcctgcctctggcctttggcaagagacagggcagagaattcatctggaacgacctgctgtccctggaaaccggcagcctgaagctggccaacggaagagtgatcgagaagacactgtacaacagaagaacccggcaggatgagcctgccctgttcgtggccctgaccttcgagcggcgggaggtcctggactcctccaatatcaaaccaatgaacctgatcggcgtggcaagaggcgaaaacatccccgccgtgatcgccctgaccgaccccgagggctgcccactgagccggtttaaggatagcctgggaaacccaacccacatcctgagaatcggcgagagctataaggagaagcagcggaccatccaggccaagaaggaggtggagcagcggagagccggcggctacagccggaagtacgccagcaaagccaagaatctggcagacgatatggtgagaaacaccgctagagatctgctgtactacgccgtgacccaggatgccatgctgatcttcgccaacctgagccggggcttcggccggcagggcaagcggaccttcatggccgagagacagtacacacggatggaggactggctgaccgccaagctggcctacgagggcctgagcaagacctacctgtccaagacactggcccagtacacctccaagacatgcagcaactgtgggtttaccatcaccagcgccgactacgacagggtgctggagaagctgaagaagacagcaacaggctggatgaccacaattaacggcaaggagctgaaggtggagggccagattacctactacaacagatacaagagacagaacgtagtcaaggacctgtccgtcgagctggatagactgagcgaagaatctgtgaacaacgacatctcctcctggacaaagggcagaagcggagaagctctgagcctcctgaagaaaagattctcccatagacccgtgcaggagaagttcgtgtgcctgaactgcggcttcgagacacacgcagccgagcaagccgccctgaacatcgccagatcctggctgttcctgcggagccaggagtacaagaaataccagacaaacaagacaaccggcaacaccgataagagagccttcgtcgagacctggcagtccttttaccggaagaagcttaaggaggtgtggaaacctgccgtgcggtctggcggatctggcggaggctccatgatcgagtaccagatccccgtgagcttcaaggacgtggtggtgggcttcacccaggaggagtggcaccagctgagccccgcccagagggccctgtacagggacgtgatgctggagacctacagcaacctggtgagcgtgggctacgagggcaccaagcccgacgtgatcctgaggctggagcaggaggaggccccctggatcggcgaggccgcctgcctgggctgccactgctgggaggacggcggcccaagcagcggcgcccctcctcccagcggcggcagcccagccggctccccaacctctaccgaggagggcacctctgagtccgccacccccgagagcggccctggcacctccaccgagcccagcgagggcagcgcacccggcagccctgccggcagccccacctccacagaggagggaaccagcaccgagcccagcgaaggcagcgccccaggcaccagcaccgagcctagtgagcaggagattaaacggatcaacaagatcagaagaagacttgtgaaagacagcaacaccaagaaggccggcaagacaggccccatgaaaaccctgctggttagagtgatgacacccgatctgagagagcggctggaaaacctgagaaagaagcctgaaaatatcccccagcccatcagcaatacatctagagccaacctgaataagctgctgaccgattacaccgaaatgaagaaggcgatcctgcatgtgtactgggaagagttccagaaggaccctgtgggcctgatgagccgggtggcccagcctgccagcaagaagatcgatcagaacaagctgaaacctgagatggacgagaagggcaacctgaccaccgccggctttgcctgctctcagtgtggccagcccctgttcgtgtacaagctggagcaggtgtctgagaagggcaaggcttacaccaactacttcggacggtgcaatgtggccgagcacgaaaagctgatcctgctggcccagctgaagcccgagaaggatagcgacgaagccgtgacatatagcctgggaaagtttgggcagagggccctggatttctacagcattcatgtgaccaaggagtccacccaccccgtgaagcccctggcccagatcgccggaaacagatacgcctccggacctgtgggaaaggccctgagcgacgcatgtatgggcacaatcgcctccttcctgtctaagtaccaggacatcatcatcgaacaccagaaggtggtgaagggcaaccagaagagactggagagcctgcgggagctggccggcaaggaaaacctggaataccctagcgtgaccctgccacctcagcctcacaccaaggagggcgttgatgcctacaacgaagtgatcgcccgggtgcgaatgtgggtgaacctgaacctgtggcagaagctgaagctaagcagagatgatgccaagcctctgctgagactgaagggattcccttcctttcctctggtcgagagacaggccaacgaagtggactggtgggacatggtgtgtaacgtgaagaagctgatcaacgagaaaaaggaggatggcaaggtgttttggcagaatctggctggctacaagagacaggaagccctgagaccatacctgagcagcgaggaagatcggaagaagggaaagaaattcgctcggtaccagctgggcgacctgctgctgcacctggaaaagaagcacggcgaggactggggaaaggtgtacgacgaggcctgggagcggattgacaagaaagtggaaggcctgagcaagcacatcaagctggaagaggaacggagaagcgaggacgcccagagcaaggccgccctgaccgactggctgcgggctaaggccagcttcgtgatcgagggcctgaaggaggccgacaaggacgagttctgcagatgcgagctgaagctgcagaagtggtacggggacctgcggggaaagcccttcgccatcgaagccgagaacagcatcctggacatcagcggcttcagcaagcagtacaactgtgccttcatctggcagaaggacggcgtgaagaagctgaacctgtacctgatcatcaactacttcaagggcggcaagctgcggttcaagaagatcaaacctgaagccttcgaagccaacagattctacaccgtgatcaacaaaaagagcggcgagatcgtgcccatggaggtgaacttcaacttcgacgaccccaacctgatcatcctgcctctggcctttggcaagagacagggcagagaattcatctggaacgacctgctgtccctggaaaccggcagcctgaagctggccaacggaagagtgatcgagaagacactgtacaacagaagaacccggcaggatgagcctgccctgttcgtggccctgaccttcgagcggcgggaggtcctggactcctccaatatcaaaccaatgaacctgatcggcgtggcaagaggcgaaaacatccccgccgtgatcgccctgaccgaccccgagggctgcccactgagccggtttaaggatagcctgggaaacccaacccacatcctgagaatcggcgagagctataaggagaagcagcggaccatccaggccaagaaggaggtggagcagcggagagccggcggctacagccggaagtacgccagcaaagccaagaatctggcagacgatatggtgagaaacaccgctagagatctgctgtactacgccgtgacccaggatgccatgctgatcttcgccaacctgagccggggcttcggccggcagggcaagcggaccttcatggccgagagacagtacacacggatggaggactggctgaccgccaagctggcctacgagggcctgagcaagacctacctgtccaagacactggcccagtacacctccaagacatgcagcaactgtgggtttaccatcaccagcgccgactacgacagggtgctggagaagctgaagaagacagcaacaggctggatgaccacaattaacggcaaggagctgaaggtggagggccagattacctactacaacagatacaagagacagaacgtagtcaaggacctgtccgtcgagctggatagactgagcgaagaatctgtgaacaacgacatctcctcctggacaaagggcagaagcggagaagctctgagcctcctgaagaaaagattctcccatagacccgtgcaggagaagttcgtgtgcctgaactgcggcttcgagacacacgcagccgagcaagccgccctgaacatcgccagatcctggctgttcctgcggagccaggagtacaagaaataccagacaaacaagacaaccggcaacaccgataagagagccttcgtcgagacctggcagtccttttaccggaagaagcttaaggaggtgtggaaacctgccgtgcggtctggcggatctggcggaggctcctatgatcgagtaccagatccccgtgagcttcaaggacgtggtggtgggcttcacccaggaggagtggcaccagctgagccccgcccagagggccctgtacagggacgtgatgctggagacctacagcaacctggtgagcgtgggctacgagggcaccaagcccgacgtgatcctgaggctggagcaggaggaggccccctggatcggcgaggccgcctgcctgggctgccactgctgggaggacggatctggctccggcagcggccccaagaaaaagagaaaagtctaagctgccttctgcggggcttgccttctggccatgcccttcttctctcccttgcacctgtacctcttggtctttgaataaagcctgagtaggaaggctagcaaaaaaaaaaaaaaaaaaaaaaaaaaaaaaaaaaaaaaaaaaaaaaaaaaaaaaaaaaaaaaaaaaaaaaaaaaaaaaaa

SEQ ID NO: 15505 - RNA, 9485 nt, synthetic construct
  source 1..9485: mol_type = other RNA
aggaaataagagagaaaagaagagtaagaagaaatataagagccaccatggcccctaagaagaagcgtaaagtgagccggatggaacgcctcgtctacgaggtgcggcagaagtgcagaaacatcgaggacatctgcatctcctgcggatctctgaacgtgaccctggagcacccactgttcatcggcggcatgtgccagaactgtaaaaactgttttctggagtgtgcctatcaatacgacgatgacggctaccagagctactgcaccatctgttgcggcggaagagaggtgctgatgtgtggaaataacaactgctgccggtgcttctgcgtggaatgcgtggacctgctggtgggccccggcgccgcccaggccgctattaaggaagatccttggaactgctacatgtgcggccacaagggcacatacggcctgctgagacggagagaggactggcctagcagactgcagatgttcttcgccaataaccacgaccaggagttcgacccccctaaggtgtaccctcccgtccccgccgagaagagaaagcccatccgggtcctgagcctgttcgatggcatcgccaccggtctgctggtgctgaaggacctgggcatccaggtggataggtacattgcctccgaggtgtgcgaggactccatcaccgtgggaatggtgcgtcatcagggcaagatcatgtacgtgggcgacgtgcggagcgtgacacagaagcatatccaggagtggggccctttcgacctggtgatcggcggcagcccttgcaatgacctgagcatcgtgaacccagcccggaagggcctgtacgagggaaccggcagactgttcttcgagttttacagactgctgcacgacgcccggcctaaggaaggcgacgaccggcccttcttttggctgttcgagaatgtggtggccatgggagtcagcgacaagcgggatattagccggttcctggagagcaaccccgtgatgatcgatgccaaggaagtgagcgccgcccaccgggccagatacttctggggcaatctgcctggcatgaacagacccctggccagcaccgtgaacgacaagctggagctgcaggagtgcctggagcacggccggatcgccaagttcagcaaggtgagaaccatcaccacccgaagcaacagcatcaaacaaggcaaggaccagcactttcctgtgttcatgaacgagaaggaggacatcctgtggtgtaccgagatggagagagtgttcgggttcccagtccactacacagatgtcagcaacatgtctagactggccagacagagactgctgggaagaagctggtccgtccctgtgatcagacacctgttcgcccctctgaaggagtacttcgcctgcgtgagcagcggcaacagcaacgccaacagccggggccccagcttctctagcggcctggtgccactgtccctgagagggagccacatgggccccatggagatctacaaaaccgtgagcgcctggaagcggcagcctgtgcgcgtgctgagcctgtttcggaatatcgataaagtcctgaaaagcctgggattcctggagagcggctctggctccggcggtggcaccctgaagtacgtggaggatgtgacaaacgtggtcagacgggatgtggagaagtggggccccttcgatctggtgtacggcagcacccaacccctgggcagctcttgtgaccggtgccctggctggtacatgtttcagttccaccggatcctgcagtacgccctgccgagacaggagtcccagcggccattcttttggattttcatggacaacttgctgctgaccgaggatgaccaggaaactaccactcggttcctgcagaccgaagccgtgaccctgcaggacgtgagaggccgggactaccagaacgccatgcgggtgtggtccaacatccctggactgaaaagcaagcacgcacctctgacccctaaagaagaggagtacctgcaggcccaggtgcggagcagaagcaagctggacgcccctaaggtggatctgctggtgaagaattgcctcctgcccctgagagagtacttcaagtatttcagccagaatagtctgcccctgggaggcagcggcggcggcgccctggtgacatttgaggacgtcgccgtgcggttcacccaggaggaatgggctctgctggatccttctcagaaaatcctgtaccgggacgtgatgagagagacataccggaatctgacctccgtgggcatcaactgggaatgttgggaccttgaagcctgcttcagaagcctgggaagaaacctgagagtgcaggtggtgaagagaaagtgcgagctgaccaacagcggcccctgcgccgagggcggcccaagcagcggcgcccctcctcccagcggcggcagcccagccggctccccaacctctaccgaggagggcacctctgagtccgccacccccgagagcggccctggcacctccaccgagcccagcgagggcagcgcacccggcagccctgccggcagccccacctccacagaggagggaaccagcaccgagcccagcgaaggcagcgccccaggcaccagcaccgagcctagtgagcaggagattaaacggatcaacaagatcagaagaagacttgtgaaagacagcaacaccaagaaggccggcaagacaggccccatgaaaaccctgctggttagagtgatgacacccgatctgagagagcggctggaaaacctgagaaagaagcctgaaaatatcccccagcccatcagcaatacatctagagccaacctgaataagctgctgaccgattacaccgaaatgaagaaggcgatcctgcatgtgtactgggaagagttccagaaggaccctgtgggcctgatgagccgggtggcccagcctgccagcaagaagatcgatcagaacaagctgaaacctgagatggacgagaagggcaacctgaccaccgccggctttgcctgctctcagtgtggccagcccctgttcgtgtacaagctggagcaggtgtctgagaagggcaaggcttacaccaactacttcggacggtgcaatgtggccgagcacgaaaagctgatcctgctggcccagctgaagcccgagaaggatagcgacgaagccgtgacatatagcctgggaaagtttgggcagagggccctggatttctacagcattcatgtgaccaaggagtccacccaccccgtgaagcccctggcccagatcgccggaaacagatacgcctccggacctgtgggaaaggccctgagcgacgcatgtatgggcacaatcgcctccttcctgtctaagtaccaggacatcatcatcgaacaccagaaggtggtgaagggcaaccagaagagactggagagcctgcgggagctggccggcaaggaaaacctggaataccctagcgtgaccctgccacctcagcctcacaccaaggagggcgttgatgcctacaacgaagtgatcgcccgggtgcgaatgtgggtgaacctgaacctgtggcagaagctgaagctaagcagagatgatgccaagcctctgctgagactgaagggattcccttcctttcctctggtcgagagacaggccaacgaagtggactggtgggacatggtgtgtaacgtgaagaagctgatcaacgagaaaaaggaggatggcaaggtgttttggcagaatctggctggctacaagagacaggaagccctgagaccatacctgagcagcgaggaagatcggaagaagggaaagaaattcgctcggtaccagctgggcgacctgctgctgcacctggaaaagaagcacggcgaggactggggaaaggtgtacgacgaggcctgggagcggattgacaagaaagtggaaggcctgagcaagcacatcaagctggaagaggaacggagaagcgaggacgcccagagcaaggccgccctgaccgactggctgcgggctaaggccagcttcgtgatcgagggcctgaaggaggccgacaaggacgagttctgcagatgcgagctgaagctgcagaagtggtacggggacctgcggggaaagcccttcgccatcgaagccgagaacagcatcctggacatcagcggcttcagcaagcagtacaactgtgccttcatctggcagaaggacggcgtgaagaagctgaacctgtacctgatcatcaactacttcaagggcggcaagctgcggttcaagaagatcaaacctgaagccttcgaagccaacagattctacaccgtgatcaacaaaaagagcggcgagatcgtgcccatggaggtgaacttcaacttcgacgaccccaacctgatcatcctgcctctggcctttggcaagagacagggcagagaattcatctggaacgacctgctgtccctggaaaccggcagcctgaagctggccaacggaagagtgatcgagaagacactgtacaacagaagaacccggcaggatgagcctgccctgttcgtggccctgaccttcgagcggcgggaggtcctggactcctccaatatcaaaccaatgaacctgatcggcgtggcaagaggcgaaaacatccccgccgtgatcgccctgaccgaccccgagggctgcccactgagccggtttaaggatagcctgggaaacccaacccacatcctgagaatcggcgagagctataaggagaagcagcggaccatccaggccaagaaggaggtggagcagcggagagccggcggctacagccggaagtacgccagcaaagccaagaatctggcagacgatatggtgagaaacaccgctagagatctgctgtactacgccgtgacccaggatgccatgctgatcttcgccaacctgagccggggcttcggccggcagggcaagcggaccttcatggccgagagacagtacacacggatggaggactggctgaccgccaagctggcctacgagggcctgagcaagacctacctgtccaagacactggcccagtacacctccaagacatgcagcaactgtgggtttaccatcaccagcgccgactacgacagggtgctggagaagctgaagaagacagcaacaggctggatgaccacaattaacggcaaggagctgaaggtggagggccagattacctactacaacagatacaagagacagaacgtagtcaaggacctgtccgtcgagctggatagactgagcgaagaatctgtgaacaacgacatctcctcctggacaaagggcagaagcggagaagctctgagcctcctgaagaaaagattctcccatagacccgtgcaggagaagttcgtgtgcctgaactgcggcttcgagacacacgcagccgagcaagccgccctgaacatcgccagatcctggctgttcctgcggagccaggagtacaagaaataccagacaaacaagacaaccggcaacaccgataagagagccttcgtcgagacctggcagtccttttaccggaagaagcttaaggaggtgtggaaacctgccgtgcggtctggcggatctggcggaggctccatggcccaggtgaccttcagcgacgtggccatcgacttcagccacgaggagtgggcctggctggacagcgcccagagggacctgtacaaggacgtgatggtgcagaactacgagaacctggtgagcgtgggcctgagcgtgaccaagccctacgtgatcaccctgctggaggacggcaaggagccctggatggtggagaagaagctgagcaagggcatgatccccgactgggagagcaggtggggcggcccaagcagcggcgcccctcctcccagcggcggcagcccagccggctccccaacctctaccgaggagggcacctctgagtccgccacccccgagagcggccctggcacctccaccgagcccagcgagggcagcgcacccggcagccctgccggcagccccacctccacagaggagggaaccagcaccgagcccagcgaaggcagcgccccaggcaccagcaccgagcctagtgagcaggagattaaacggatcaacaagatcagaagaagacttgtgaaagacagcaacaccaagaaggccggcaagacaggccccatgaaaaccctgctggttagagtgatgacacccgatctgagagagcggctggaaaacctgagaaagaagcctgaaaatatcccccagcccatcagcaatacatctagagccaacctgaataagctgctgaccgattacaccgaaatgaagaaggcgatcctgcatgtgtactgggaagagttccagaaggaccctgtgggcctgatgagccgggtggcccagcctgccagcaagaagatcgatcagaacaagctgaaacctgagatggacgagaagggcaacctgaccaccgccggctttgcctgctctcagtgtggccagcccctgttcgtgtacaagctggagcaggtgtctgagaagggcaaggcttacaccaactacttcggacggtgcaatgtggccgagcacgaaaagctgatcctgctggcccagctgaagcccgagaaggatagcgacgaagccgtgacatatagcctgggaaagtttgggcagagggccctggatttctacagcattcatgtgaccaaggagtccacccaccccgtgaagcccctggcccagatcgccggaaacagatacgcctccggacctgtgggaaaggccctgagcgacgcatgtatgggcacaatcgcctccttcctgtctaagtaccaggacatcatcatcgaacaccagaaggtggtgaagggcaaccagaagagactggagagcctgcgggagctggccggcaaggaaaacctggaataccctagcgtgaccctgccacctcagcctcacaccaaggagggcgttgatgcctacaacgaagtgatcgcccgggtgcgaatgtgggtgaacctgaacctgtggcagaagctgaagctaagcagagatgatgccaagcctctgctgagactgaagggattcccttcctttcctctggtcgagagacaggccaacgaagtggactggtgggacatggtgtgtaacgtgaagaagctgatcaacgagaaaaaggaggatggcaaggtgttttggcagaatctggctggctacaagagacaggaagccctgagaccatacctgagcagcgaggaagatcggaagaagggaaagaaattcgctcggtaccagctgggcgacctgctgctgcacctggaaaagaagcacggcgaggactggggaaaggtgtacgacgaggcctgggagcggattgacaagaaagtggaaggcctgagcaagcacatcaagctggaagaggaacggagaagcgaggacgcccagagcaaggccgccctgaccgactggctgcgggctaaggccagcttcgtgatcgagggcctgaaggaggccgacaaggacgagttctgcagatgcgagctgaagctgcagaagtggtacggggacctgcggggaaagcccttcgccatcgaagccgagaacagcatcctggacatcagcggcttcagcaagcagtacaactgtgccttcatctggcagaaggacggcgtgaagaagctgaacctgtacctgatcatcaactacttcaagggcggcaagctgcggttcaagaagatcaaacctgaagccttcgaagccaacagattctacaccgtgatcaacaaaaagagcggcgagatcgtgcccatggaggtgaacttcaacttcgacgaccccaacctgatcatcctgcctctggcctttggcaagagacagggcagagaattcatctggaacgacctgctgtccctggaaaccggcagcctgaagctggccaacggaagagtgatcgagaagacactgtacaacagaagaacccggcaggatgagcctgccctgttcgtggccctgaccttcgagcggcgggaggtcctggactcctccaatatcaaaccaatgaacctgatcggcgtggcaagaggcgaaaacatccccgccgtgatcgccctgaccgaccccgagggctgcccactgagccggtttaaggatagcctgggaaacccaacccacatcctgagaatcggcgagagctataaggagaagcagcggaccatccaggccaagaaggaggtggagcagcggagagccggcggctacagccggaagtacgccagcaaagccaagaatctggcagacgatatggtgagaaacaccgctagagatctgctgtactacgccgtgacccaggatgccatgctgatcttcgccaacctgagccggggcttcggccggcagggcaagcggaccttcatggccgagagacagtacacacggatggaggactggctgaccgccaagctggcctacgagggcctgagcaagacctacctgtccaagacactggcccagtacacctccaagacatgcagcaactgtgggtttaccatcaccagcgccgactacgacagggtgctggagaagctgaagaagacagcaacaggctggatgaccacaattaacggcaaggagctgaaggtggagggccagattacctactacaacagatacaagagacagaacgtagtcaaggacctgtccgtcgagctggatagactgagcgaagaatctgtgaacaacgacatctcctcctggacaaagggcagaagcggagaagctctgagcctcctgaagaaaagattctcccatagacccgtgcaggagaagttcgtgtgcctgaactgcggcttcgagacacacgcagccgagcaagccgccctgaacatcgccagatcctggctgttcctgcggagccaggagtacaagaaataccagacaaacaagacaaccggcaacaccgataagagagccttcgtcgagacctggcagtccttttaccggaagaagcttaaggaggtgtggaaacctgccgtgcggtctggcggatctggcggaggctcctatggcccaggtgaccttcagcgacgtggccatcgacttcagccacgaggagtgggcctggctggacagcgcccagagggacctgtacaaggacgtgatggtgcagaactacgagaacctggtgagcgtgggcctgagcgtgaccaagccctacgtgatcaccctgctggaggacggcaaggagccctggatggtggagaagaagctgagcaagggcatgatccccgactgggagagcaggtggggatctggctccggcagcggccccaagaaaaagagaaaagtctaagctgccttctgcggggcttgccttctggccatgcccttcttctctcccttgcacctgtacctcttggtctttgaataaagcctgagtaggaaggctagcaaaaaaaaaaaaaaaaaaaaaaaaaaaaaaaaaaaaaaaaaaaaaaaaaaaaaaaaaaaaaaaaaaaaaaaaaaaaaaaa

SEQ ID NO: 15506 - RNA, 9485 nt, synthetic construct
  source 1..9485: mol_type = other RNA
aggaaataagagagaaaagaagagtaagaagaaatataagagccaccatggcccctaagaagaagcgtaaagtgagccggatggaacgcctcgtctacgaggtgcggcagaagtgcagaaacatcgaggacatctgcatctcctgcggatctctgaacgtgaccctggagcacccactgttcatcggcggcatgtgccagaactgtaaaaactgttttctggagtgtgcctatcaatacgacgatgacggctaccagagctactgcaccatctgttgcggcggaagagaggtgctgatgtgtggaaataacaactgctgccggtgcttctgcgtggaatgcgtggacctgctggtgggccccggcgccgcccaggccgctattaaggaagatccttggaactgctacatgtgcggccacaagggcacatacggcctgctgagacggagagaggactggcctagcagactgcagatgttcttcgccaataaccacgaccaggagttcgacccccctaaggtgtaccctcccgtccccgccgagaagagaaagcccatccgggtcctgagcctgttcgatggcatcgccaccggtctgctggtgctgaaggacctgggcatccaggtggataggtacattgcctccgaggtgtgcgaggactccatcaccgtgggaatggtgcgtcatcagggcaagatcatgtacgtgggcgacgtgcggagcgtgacacagaagcatatccaggagtggggccctttcgacctggtgatcggcggcagcccttgcaatgacctgagcatcgtgaacccagcccggaagggcctgtacgagggaaccggcagactgttcttcgagttttacagactgctgcacgacgcccggcctaaggaaggcgacgaccggcccttcttttggctgttcgagaatgtggtggccatgggagtcagcgacaagcgggatattagccggttcctggagagcaaccccgtgatgatcgatgccaaggaagtgagcgccgcccaccgggccagatacttctggggcaatctgcctggcatgaacagacccctggccagcaccgtgaacgacaagctggagctgcaggagtgcctggagcacggccggatcgccaagttcagcaaggtgagaaccatcaccacccgaagcaacagcatcaaacaaggcaaggaccagcactttcctgtgttcatgaacgagaaggaggacatcctgtggtgtaccgagatggagagagtgttcgggttcccagtccactacacagatgtcagcaacatgtctagactggccagacagagactgctgggaagaagctggtccgtccctgtgatcagacacctgttcgcccctctgaaggagtacttcgcctgcgtgagcagcggcaacagcaacgccaacagccggggccccagcttctctagcggcctggtgccactgtccctgagagggagccacatgggccccatggagatctacaaaaccgtgagcgcctggaagcggcagcctgtgcgcgtgctgagcctgtttcggaatatcgataaagtcctgaaaagcctgggattcctggagagcggctctggctccggcggtggcaccctgaagtacgtggaggatgtgacaaacgtggtcagacgggatgtggagaagtggggccccttcgatctggtgtacggcagcacccaacccctgggcagctcttgtgaccggtgccctggctggtacatgtttcagttccaccggatcctgcagtacgccctgccgagacaggagtcccagcggccattcttttggattttcatggacaacttgctgctgaccgaggatgaccaggaaactaccactcggttcctgcagaccgaagccgtgaccctgcaggacgtgagaggccgggactaccagaacgccatgcgggtgtggtccaacatccctggactgaaaagcaagcacgcacctctgacccctaaagaagaggagtacctgcaggcccaggtgcggagcagaagcaagctggacgcccctaaggtggatctgctggtgaagaattgcctcctgcccctgagagagtacttcaagtatttcagccagaatagtctgcccctgggaggcagcggcggcggcgccctggtgacatttgaggacgtcgccgtgcggttcacccaggaggaatgggctctgctggatccttctcagaaaatcctgtaccgggacgtgatgagagagacataccggaatctgacctccgtgggcatcaactgggaatgttgggaccttgaagcctgcttcagaagcctgggaagaaacctgagagtgcaggtggtgaagagaaagtgcgagctgaccaacagcggcccctgcgccgagggcggcccaagcagcggcgcccctcctcccagcggcggcagcccagccggctccccaacctctaccgaggagggcacctctgagtccgccacccccgagagcggccctggcacctccaccgagcccagcgagggcagcgcacccggcagccctgccggcagccccacctccacagaggagggaaccagcaccgagcccagcgaaggcagcgccccaggcaccagcaccgagcctagtgagcaggagattaaacggatcaacaagatcagaagaagacttgtgaaagacagcaacaccaagaaggccggcaagacaggccccatgaaaaccctgctggttagagtgatgacacccgatctgagagagcggctggaaaacctgagaaagaagcctgaaaatatcccccagcccatcagcaatacatctagagccaacctgaataagctgctgaccgattacaccgaaatgaagaaggcgatcctgcatgtgtactgggaagagttccagaaggaccctgtgggcctgatgagccgggtggcccagcctgccagcaagaagatcgatcagaacaagctgaaacctgagatggacgagaagggcaacctgaccaccgccggctttgcctgctctcagtgtggccagcccctgttcgtgtacaagctggagcaggtgtctgagaagggcaaggcttacaccaactacttcggacggtgcaatgtggccgagcacgaaaagctgatcctgctggcccagctgaagcccgagaaggatagcgacgaagccgtgacatatagcctgggaaagtttgggcagagggccctggatttctacagcattcatgtgaccaaggagtccacccaccccgtgaagcccctggcccagatcgccggaaacagatacgcctccggacctgtgggaaaggccctgagcgacgcatgtatgggcacaatcgcctccttcctgtctaagtaccaggacatcatcatcgaacaccagaaggtggtgaagggcaaccagaagagactggagagcctgcgggagctggccggcaaggaaaacctggaataccctagcgtgaccctgccacctcagcctcacaccaaggagggcgttgatgcctacaacgaagtgatcgcccgggtgcgaatgtgggtgaacctgaacctgtggcagaagctgaagctaagcagagatgatgccaagcctctgctgagactgaagggattcccttcctttcctctggtcgagagacaggccaacgaagtggactggtgggacatggtgtgtaacgtgaagaagctgatcaacgagaaaaaggaggatggcaaggtgttttggcagaatctggctggctacaagagacaggaagccctgagaccatacctgagcagcgaggaagatcggaagaagggaaagaaattcgctcggtaccagctgggcgacctgctgctgcacctggaaaagaagcacggcgaggactggggaaaggtgtacgacgaggcctgggagcggattgacaagaaagtggaaggcctgagcaagcacatcaagctggaagaggaacggagaagcgaggacgcccagagcaaggccgccctgaccgactggctgcgggctaaggccagcttcgtgatcgagggcctgaaggaggccgacaaggacgagttctgcagatgcgagctgaagctgcagaagtggtacggggacctgcggggaaagcccttcgccatcgaagccgagaacagcatcctggacatcagcggcttcagcaagcagtacaactgtgccttcatctggcagaaggacggcgtgaagaagctgaacctgtacctgatcatcaactacttcaagggcggcaagctgcggttcaagaagatcaaacctgaagccttcgaagccaacagattctacaccgtgatcaacaaaaagagcggcgagatcgtgcccatggaggtgaacttcaacttcgacgaccccaacctgatcatcctgcctctggcctttggcaagagacagggcagagaattcatctggaacgacctgctgtccctggaaaccggcagcctgaagctggccaacggaagagtgatcgagaagacactgtacaacagaagaacccggcaggatgagcctgccctgttcgtggccctgaccttcgagcggcgggaggtcctggactcctccaatatcaaaccaatgaacctgatcggcgtggcaagaggcgaaaacatccccgccgtgatcgccctgaccgaccccgagggctgcccactgagccggtttaaggatagcctgggaaacccaacccacatcctgagaatcggcgagagctataaggagaagcagcggaccatccaggccaagaaggaggtggagcagcggagagccggcggctacagccggaagtacgccagcaaagccaagaatctggcagacgatatggtgagaaacaccgctagagatctgctgtactacgccgtgacccaggatgccatgctgatcttcgccaacctgagccggggcttcggccggcagggcaagcggaccttcatggccgagagacagtacacacggatggaggactggctgaccgccaagctggcctacgagggcctgagcaagacctacctgtccaagacactggcccagtacacctccaagacatgcagcaactgtgggtttaccatcaccagcgccgactacgacagggtgctggagaagctgaagaagacagcaacaggctggatgaccacaattaacggcaaggagctgaaggtggagggccagattacctactacaacagatacaagagacagaacgtagtcaaggacctgtccgtcgagctggatagactgagcgaagaatctgtgaacaacgacatctcctcctggacaaagggcagaagcggagaagctctgagcctcctgaagaaaagattctcccatagacccgtgcaggagaagttcgtgtgcctgaactgcggcttcgagacacacgcagccgagcaagccgccctgaacatcgccagatcctggctgttcctgcggagccaggagtacaagaaataccagacaaacaagacaaccggcaacaccgataagagagccttcgtcgagacctggcagtccttttaccggaagaagcttaaggaggtgtggaaacctgccgtgcggtctggcggatctggcggaggctccaggctggagagcgtgaccttcgaggacgtggccgtgtacttcacccagaaccagtgggccagcctggaccccgcccagagggccctgtacggcgaggtgatgctggagaactacgccaacgtggccagcctggtggccttccccttccccaagcccgccctgatcagccacctggagaggggcgaggccccctggggccccgacccctgggacaccaagatccccaggggcatcagccagggcggcggcccaagcagcggcgcccctcctcccagcggcggcagcccagccggctccccaacctctaccgaggagggcacctctgagtccgccacccccgagagcggccctggcacctccaccgagcccagcgagggcagcgcacccggcagccctgccggcagccccacctccacagaggagggaaccagcaccgagcccagcgaaggcagcgccccaggcaccagcaccgagcctagtgagcaggagattaaacggatcaacaagatcagaagaagacttgtgaaagacagcaacaccaagaaggccggcaagacaggccccatgaaaaccctgctggttagagtgatgacacccgatctgagagagcggctggaaaacctgagaaagaagcctgaaaatatcccccagcccatcagcaatacatctagagccaacctgaataagctgctgaccgattacaccgaaatgaagaaggcgatcctgcatgtgtactgggaagagttccagaaggaccctgtgggcctgatgagccgggtggcccagcctgccagcaagaagatcgatcagaacaagctgaaacctgagatggacgagaagggcaacctgaccaccgccggctttgcctgctctcagtgtggccagcccctgttcgtgtacaagctggagcaggtgtctgagaagggcaaggcttacaccaactacttcggacggtgcaatgtggccgagcacgaaaagctgatcctgctggcccagctgaagcccgagaaggatagcgacgaagccgtgacatatagcctgggaaagtttgggcagagggccctggatttctacagcattcatgtgaccaaggagtccacccaccccgtgaagcccctggcccagatcgccggaaacagatacgcctccggacctgtgggaaaggccctgagcgacgcatgtatgggcacaatcgcctccttcctgtctaagtaccaggacatcatcatcgaacaccagaaggtggtgaagggcaaccagaagagactggagagcctgcgggagctggccggcaaggaaaacctggaataccctagcgtgaccctgccacctcagcctcacaccaaggagggcgttgatgcctacaacgaagtgatcgcccgggtgcgaatgtgggtgaacctgaacctgtggcagaagctgaagctaagcagagatgatgccaagcctctgctgagactgaagggattcccttcctttcctctggtcgagagacaggccaacgaagtggactggtgggacatggtgtgtaacgtgaagaagctgatcaacgagaaaaaggaggatggcaaggtgttttggcagaatctggctggctacaagagacaggaagccctgagaccatacctgagcagcgaggaagatcggaagaagggaaagaaattcgctcggtaccagctgggcgacctgctgctgcacctggaaaagaagcacggcgaggactggggaaaggtgtacgacgaggcctgggagcggattgacaagaaagtggaaggcctgagcaagcacatcaagctggaagaggaacggagaagcgaggacgcccagagcaaggccgccctgaccgactggctgcgggctaaggccagcttcgtgatcgagggcctgaaggaggccgacaaggacgagttctgcagatgcgagctgaagctgcagaagtggtacggggacctgcggggaaagcccttcgccatcgaagccgagaacagcatcctggacatcagcggcttcagcaagcagtacaactgtgccttcatctggcagaaggacggcgtgaagaagctgaacctgtacctgatcatcaactacttcaagggcggcaagctgcggttcaagaagatcaaacctgaagccttcgaagccaacagattctacaccgtgatcaacaaaaagagcggcgagatcgtgcccatggaggtgaacttcaacttcgacgaccccaacctgatcatcctgcctctggcctttggcaagagacagggcagagaattcatctggaacgacctgctgtccctggaaaccggcagcctgaagctggccaacggaagagtgatcgagaagacactgtacaacagaagaacccggcaggatgagcctgccctgttcgtggccctgaccttcgagcggcgggaggtcctggactcctccaatatcaaaccaatgaacctgatcggcgtggcaagaggcgaaaacatccccgccgtgatcgccctgaccgaccccgagggctgcccactgagccggtttaaggatagcctgggaaacccaacccacatcctgagaatcggcgagagctataaggagaagcagcggaccatccaggccaagaaggaggtggagcagcggagagccggcggctacagccggaagtacgccagcaaagccaagaatctggcagacgatatggtgagaaacaccgctagagatctgctgtactacgccgtgacccaggatgccatgctgatcttcgccaacctgagccggggcttcggccggcagggcaagcggaccttcatggccgagagacagtacacacggatggaggactggctgaccgccaagctggcctacgagggcctgagcaagacctacctgtccaagacactggcccagtacacctccaagacatgcagcaactgtgggtttaccatcaccagcgccgactacgacagggtgctggagaagctgaagaagacagcaacaggctggatgaccacaattaacggcaaggagctgaaggtggagggccagattacctactacaacagatacaagagacagaacgtagtcaaggacctgtccgtcgagctggatagactgagcgaagaatctgtgaacaacgacatctcctcctggacaaagggcagaagcggagaagctctgagcctcctgaagaaaagattctcccatagacccgtgcaggagaagttcgtgtgcctgaactgcggcttcgagacacacgcagccgagcaagccgccctgaacatcgccagatcctggctgttcctgcggagccaggagtacaagaaataccagacaaacaagacaaccggcaacaccgataagagagccttcgtcgagacctggcagtccttttaccggaagaagcttaaggaggtgtggaaacctgccgtgcggtctggcggatctggcggaggctcctaggctggagagcgtgaccttcgaggacgtggccgtgtacttcacccagaaccagtgggccagcctggaccccgcccagagggccctgtacggcgaggtgatgctggagaactacgccaacgtggccagcctggtggccttccccttccccaagcccgccctgatcagccacctggagaggggcgaggccccctggggccccgacccctgggacaccaagatccccaggggcatcagccagggcggatctggctccggcagcggccccaagaaaaagagaaaagtctaagctgccttctgcggggcttgccttctggccatgcccttcttctctcccttgcacctgtacctcttggtctttgaataaagcctgagtaggaaggctagcaaaaaaaaaaaaaaaaaaaaaaaaaaaaaaaaaaaaaaaaaaaaaaaaaaaaaaaaaaaaaaaaaaaaaaaaaaaaaaaa

SEQ ID NO: 15507 - RNA, 9485 nt, synthetic construct
  source 1..9485: mol_type = other RNA
aggaaataagagagaaaagaagagtaagaagaaatataagagccaccatggcccctaagaagaagcgtaaagtgagccggatggaacgcctcgtctacgaggtgcggcagaagtgcagaaacatcgaggacatctgcatctcctgcggatctctgaacgtgaccctggagcacccactgttcatcggcggcatgtgccagaactgtaaaaactgttttctggagtgtgcctatcaatacgacgatgacggctaccagagctactgcaccatctgttgcggcggaagagaggtgctgatgtgtggaaataacaactgctgccggtgcttctgcgtggaatgcgtggacctgctggtgggccccggcgccgcccaggccgctattaaggaagatccttggaactgctacatgtgcggccacaagggcacatacggcctgctgagacggagagaggactggcctagcagactgcagatgttcttcgccaataaccacgaccaggagttcgacccccctaaggtgtaccctcccgtccccgccgagaagagaaagcccatccgggtcctgagcctgttcgatggcatcgccaccggtctgctggtgctgaaggacctgggcatccaggtggataggtacattgcctccgaggtgtgcgaggactccatcaccgtgggaatggtgcgtcatcagggcaagatcatgtacgtgggcgacgtgcggagcgtgacacagaagcatatccaggagtggggccctttcgacctggtgatcggcggcagcccttgcaatgacctgagcatcgtgaacccagcccggaagggcctgtacgagggaaccggcagactgttcttcgagttttacagactgctgcacgacgcccggcctaaggaaggcgacgaccggcccttcttttggctgttcgagaatgtggtggccatgggagtcagcgacaagcgggatattagccggttcctggagagcaaccccgtgatgatcgatgccaaggaagtgagcgccgcccaccgggccagatacttctggggcaatctgcctggcatgaacagacccctggccagcaccgtgaacgacaagctggagctgcaggagtgcctggagcacggccggatcgccaagttcagcaaggtgagaaccatcaccacccgaagcaacagcatcaaacaaggcaaggaccagcactttcctgtgttcatgaacgagaaggaggacatcctgtggtgtaccgagatggagagagtgttcgggttcccagtccactacacagatgtcagcaacatgtctagactggccagacagagactgctgggaagaagctggtccgtccctgtgatcagacacctgttcgcccctctgaaggagtacttcgcctgcgtgagcagcggcaacagcaacgccaacagccggggccccagcttctctagcggcctggtgccactgtccctgagagggagccacatgggccccatggagatctacaaaaccgtgagcgcctggaagcggcagcctgtgcgcgtgctgagcctgtttcggaatatcgataaagtcctgaaaagcctgggattcctggagagcggctctggctccggcggtggcaccctgaagtacgtggaggatgtgacaaacgtggtcagacgggatgtggagaagtggggccccttcgatctggtgtacggcagcacccaacccctgggcagctcttgtgaccggtgccctggctggtacatgtttcagttccaccggatcctgcagtacgccctgccgagacaggagtcccagcggccattcttttggattttcatggacaacttgctgctgaccgaggatgaccaggaaactaccactcggttcctgcagaccgaagccgtgaccctgcaggacgtgagaggccgggactaccagaacgccatgcgggtgtggtccaacatccctggactgaaaagcaagcacgcacctctgacccctaaagaagaggagtacctgcaggcccaggtgcggagcagaagcaagctggacgcccctaaggtggatctgctggtgaagaattgcctcctgcccctgagagagtacttcaagtatttcagccagaatagtctgcccctgggaggcagcggcggcggcgccctggtgacatttgaggacgtcgccgtgcggttcacccaggaggaatgggctctgctggatccttctcagaaaatcctgtaccgggacgtgatgagagagacataccggaatctgacctccgtgggcatcaactgggaatgttgggaccttgaagcctgcttcagaagcctgggaagaaacctgagagtgcaggtggtgaagagaaagtgcgagctgaccaacagcggcccctgcgccgagggcggcccaagcagcggcgcccctcctcccagcggcggcagcccagccggctccccaacctctaccgaggagggcacctctgagtccgccacccccgagagcggccctggcacctccaccgagcccagcgagggcagcgcacccggcagccctgccggcagccccacctccacagaggagggaaccagcaccgagcccagcgaaggcagcgccccaggcaccagcaccgagcctagtgagcaggagattaaacggatcaacaagatcagaagaagacttgtgaaagacagcaacaccaagaaggccggcaagacaggccccatgaaaaccctgctggttagagtgatgacacccgatctgagagagcggctggaaaacctgagaaagaagcctgaaaatatcccccagcccatcagcaatacatctagagccaacctgaataagctgctgaccgattacaccgaaatgaagaaggcgatcctgcatgtgtactgggaagagttccagaaggaccctgtgggcctgatgagccgggtggcccagcctgccagcaagaagatcgatcagaacaagctgaaacctgagatggacgagaagggcaacctgaccaccgccggctttgcctgctctcagtgtggccagcccctgttcgtgtacaagctggagcaggtgtctgagaagggcaaggcttacaccaactacttcggacggtgcaatgtggccgagcacgaaaagctgatcctgctggcccagctgaagcccgagaaggatagcgacgaagccgtgacatatagcctgggaaagtttgggcagagggccctggatttctacagcattcatgtgaccaaggagtccacccaccccgtgaagcccctggcccagatcgccggaaacagatacgcctccggacctgtgggaaaggccctgagcgacgcatgtatgggcacaatcgcctccttcctgtctaagtaccaggacatcatcatcgaacaccagaaggtggtgaagggcaaccagaagagactggagagcctgcgggagctggccggcaaggaaaacctggaataccctagcgtgaccctgccacctcagcctcacaccaaggagggcgttgatgcctacaacgaagtgatcgcccgggtgcgaatgtgggtgaacctgaacctgtggcagaagctgaagctaagcagagatgatgccaagcctctgctgagactgaagggattcccttcctttcctctggtcgagagacaggccaacgaagtggactggtgggacatggtgtgtaacgtgaagaagctgatcaacgagaaaaaggaggatggcaaggtgttttggcagaatctggctggctacaagagacaggaagccctgagaccatacctgagcagcgaggaagatcggaagaagggaaagaaattcgctcggtaccagctgggcgacctgctgctgcacctggaaaagaagcacggcgaggactggggaaaggtgtacgacgaggcctgggagcggattgacaagaaagtggaaggcctgagcaagcacatcaagctggaagaggaacggagaagcgaggacgcccagagcaaggccgccctgaccgactggctgcgggctaaggccagcttcgtgatcgagggcctgaaggaggccgacaaggacgagttctgcagatgcgagctgaagctgcagaagtggtacggggacctgcggggaaagcccttcgccatcgaagccgagaacagcatcctggacatcagcggcttcagcaagcagtacaactgtgccttcatctggcagaaggacggcgtgaagaagctgaacctgtacctgatcatcaactacttcaagggcggcaagctgcggttcaagaagatcaaacctgaagccttcgaagccaacagattctacaccgtgatcaacaaaaagagcggcgagatcgtgcccatggaggtgaacttcaacttcgacgaccccaacctgatcatcctgcctctggcctttggcaagagacagggcagagaattcatctggaacgacctgctgtccctggaaaccggcagcctgaagctggccaacggaagagtgatcgagaagacactgtacaacagaagaacccggcaggatgagcctgccctgttcgtggccctgaccttcgagcggcgggaggtcctggactcctccaatatcaaaccaatgaacctgatcggcgtggcaagaggcgaaaacatccccgccgtgatcgccctgaccgaccccgagggctgcccactgagccggtttaaggatagcctgggaaacccaacccacatcctgagaatcggcgagagctataaggagaagcagcggaccatccaggccaagaaggaggtggagcagcggagagccggcggctacagccggaagtacgccagcaaagccaagaatctggcagacgatatggtgagaaacaccgctagagatctgctgtactacgccgtgacccaggatgccatgctgatcttcgccaacctgagccggggcttcggccggcagggcaagcggaccttcatggccgagagacagtacacacggatggaggactggctgaccgccaagctggcctacgagggcctgagcaagacctacctgtccaagacactggcccagtacacctccaagacatgcagcaactgtgggtttaccatcaccagcgccgactacgacagggtgctggagaagctgaagaagacagcaacaggctggatgaccacaattaacggcaaggagctgaaggtggagggccagattacctactacaacagatacaagagacagaacgtagtcaaggacctgtccgtcgagctggatagactgagcgaagaatctgtgaacaacgacatctcctcctggacaaagggcagaagcggagaagctctgagcctcctgaagaaaagattctcccatagacccgtgcaggagaagttcgtgtgcctgaactgcggcttcgagacacacgcagccgagcaagccgccctgaacatcgccagatcctggctgttcctgcggagccaggagtacaagaaataccagacaaacaagacaaccggcaacaccgataagagagccttcgtcgagacctggcagtccttttaccggaagaagcttaaggaggtgtggaaacctgccgtgcggtctggcggatctggcggaggctcctgccaggagaccctgaccttcaaggacgtggccgtggacttcaccagggaggagtggggccagctgggccccgcccagagggacctgtacaaggaggtgatgctggacaactacaggaacctgatcagcctgggcctgcagggcagcaagcccgacgtgatcttctggctggagaggggccagagcccctggaccctgaagaggaggaagagcagggactgctgccccgagttccacctgcacggcggcccaagcagcggcgcccctcctcccagcggcggcagcccagccggctccccaacctctaccgaggagggcacctctgagtccgccacccccgagagcggccctggcacctccaccgagcccagcgagggcagcgcacccggcagccctgccggcagccccacctccacagaggagggaaccagcaccgagcccagcgaaggcagcgccccaggcaccagcaccgagcctagtgagcaggagattaaacggatcaacaagatcagaagaagacttgtgaaagacagcaacaccaagaaggccggcaagacaggccccatgaaaaccctgctggttagagtgatgacacccgatctgagagagcggctggaaaacctgagaaagaagcctgaaaatatcccccagcccatcagcaatacatctagagccaacctgaataagctgctgaccgattacaccgaaatgaagaaggcgatcctgcatgtgtactgggaagagttccagaaggaccctgtgggcctgatgagccgggtggcccagcctgccagcaagaagatcgatcagaacaagctgaaacctgagatggacgagaagggcaacctgaccaccgccggctttgcctgctctcagtgtggccagcccctgttcgtgtacaagctggagcaggtgtctgagaagggcaaggcttacaccaactacttcggacggtgcaatgtggccgagcacgaaaagctgatcctgctggcccagctgaagcccgagaaggatagcgacgaagccgtgacatatagcctgggaaagtttgggcagagggccctggatttctacagcattcatgtgaccaaggagtccacccaccccgtgaagcccctggcccagatcgccggaaacagatacgcctccggacctgtgggaaaggccctgagcgacgcatgtatgggcacaatcgcctccttcctgtctaagtaccaggacatcatcatcgaacaccagaaggtggtgaagggcaaccagaagagactggagagcctgcgggagctggccggcaaggaaaacctggaataccctagcgtgaccctgccacctcagcctcacaccaaggagggcgttgatgcctacaacgaagtgatcgcccgggtgcgaatgtgggtgaacctgaacctgtggcagaagctgaagctaagcagagatgatgccaagcctctgctgagactgaagggattcccttcctttcctctggtcgagagacaggccaacgaagtggactggtgggacatggtgtgtaacgtgaagaagctgatcaacgagaaaaaggaggatggcaaggtgttttggcagaatctggctggctacaagagacaggaagccctgagaccatacctgagcagcgaggaagatcggaagaagggaaagaaattcgctcggtaccagctgggcgacctgctgctgcacctggaaaagaagcacggcgaggactggggaaaggtgtacgacgaggcctgggagcggattgacaagaaagtggaaggcctgagcaagcacatcaagctggaagaggaacggagaagcgaggacgcccagagcaaggccgccctgaccgactggctgcgggctaaggccagcttcgtgatcgagggcctgaaggaggccgacaaggacgagttctgcagatgcgagctgaagctgcagaagtggtacggggacctgcggggaaagcccttcgccatcgaagccgagaacagcatcctggacatcagcggcttcagcaagcagtacaactgtgccttcatctggcagaaggacggcgtgaagaagctgaacctgtacctgatcatcaactacttcaagggcggcaagctgcggttcaagaagatcaaacctgaagccttcgaagccaacagattctacaccgtgatcaacaaaaagagcggcgagatcgtgcccatggaggtgaacttcaacttcgacgaccccaacctgatcatcctgcctctggcctttggcaagagacagggcagagaattcatctggaacgacctgctgtccctggaaaccggcagcctgaagctggccaacggaagagtgatcgagaagacactgtacaacagaagaacccggcaggatgagcctgccctgttcgtggccctgaccttcgagcggcgggaggtcctggactcctccaatatcaaaccaatgaacctgatcggcgtggcaagaggcgaaaacatccccgccgtgatcgccctgaccgaccccgagggctgcccactgagccggtttaaggatagcctgggaaacccaacccacatcctgagaatcggcgagagctataaggagaagcagcggaccatccaggccaagaaggaggtggagcagcggagagccggcggctacagccggaagtacgccagcaaagccaagaatctggcagacgatatggtgagaaacaccgctagagatctgctgtactacgccgtgacccaggatgccatgctgatcttcgccaacctgagccggggcttcggccggcagggcaagcggaccttcatggccgagagacagtacacacggatggaggactggctgaccgccaagctggcctacgagggcctgagcaagacctacctgtccaagacactggcccagtacacctccaagacatgcagcaactgtgggtttaccatcaccagcgccgactacgacagggtgctggagaagctgaagaagacagcaacaggctggatgaccacaattaacggcaaggagctgaaggtggagggccagattacctactacaacagatacaagagacagaacgtagtcaaggacctgtccgtcgagctggatagactgagcgaagaatctgtgaacaacgacatctcctcctggacaaagggcagaagcggagaagctctgagcctcctgaagaaaagattctcccatagacccgtgcaggagaagttcgtgtgcctgaactgcggcttcgagacacacgcagccgagcaagccgccctgaacatcgccagatcctggctgttcctgcggagccaggagtacaagaaataccagacaaacaagacaaccggcaacaccgataagagagccttcgtcgagacctggcagtccttttaccggaagaagcttaaggaggtgtggaaacctgccgtgcggtctggcggatctggcggaggctccttgccaggagaccctgaccttcaaggacgtggccgtggacttcaccagggaggagtggggccagctgggccccgcccagagggacctgtacaaggaggtgatgctggacaactacaggaacctgatcagcctgggcctgcagggcagcaagcccgacgtgatcttctggctggagaggggccagagcccctggaccctgaagaggaggaagagcagggactgctgccccgagttccacctgcacggatctggctccggcagcggccccaagaaaaagagaaaagtctaagctgccttctgcggggcttgccttctggccatgcccttcttctctcccttgcacctgtacctcttggtctttgaataaagcctgagtaggaaggctagcaaaaaaaaaaaaaaaaaaaaaaaaaaaaaaaaaaaaaaaaaaaaaaaaaaaaaaaaaaaaaaaaaaaaaaaaaaaaaaaa

SEQ ID NO: 15508 - RNA, 9485 nt, synthetic construct
  source 1..9485: mol_type = other RNA
aggaaataagagagaaaagaagagtaagaagaaatataagagccaccatggcccctaagaagaagcgtaaagtgagccggatggaacgcctcgtctacgaggtgcggcagaagtgcagaaacatcgaggacatctgcatctcctgcggatctctgaacgtgaccctggagcacccactgttcatcggcggcatgtgccagaactgtaaaaactgttttctggagtgtgcctatcaatacgacgatgacggctaccagagctactgcaccatctgttgcggcggaagagaggtgctgatgtgtggaaataacaactgctgccggtgcttctgcgtggaatgcgtggacctgctggtgggccccggcgccgcccaggccgctattaaggaagatccttggaactgctacatgtgcggccacaagggcacatacggcctgctgagacggagagaggactggcctagcagactgcagatgttcttcgccaataaccacgaccaggagttcgacccccctaaggtgtaccctcccgtccccgccgagaagagaaagcccatccgggtcctgagcctgttcgatggcatcgccaccggtctgctggtgctgaaggacctgggcatccaggtggataggtacattgcctccgaggtgtgcgaggactccatcaccgtgggaatggtgcgtcatcagggcaagatcatgtacgtgggcgacgtgcggagcgtgacacagaagcatatccaggagtggggccctttcgacctggtgatcggcggcagcccttgcaatgacctgagcatcgtgaacccagcccggaagggcctgtacgagggaaccggcagactgttcttcgagttttacagactgctgcacgacgcccggcctaaggaaggcgacgaccggcccttcttttggctgttcgagaatgtggtggccatgggagtcagcgacaagcgggatattagccggttcctggagagcaaccccgtgatgatcgatgccaaggaagtgagcgccgcccaccgggccagatacttctggggcaatctgcctggcatgaacagacccctggccagcaccgtgaacgacaagctggagctgcaggagtgcctggagcacggccggatcgccaagttcagcaaggtgagaaccatcaccacccgaagcaacagcatcaaacaaggcaaggaccagcactttcctgtgttcatgaacgagaaggaggacatcctgtggtgtaccgagatggagagagtgttcgggttcccagtccactacacagatgtcagcaacatgtctagactggccagacagagactgctgggaagaagctggtccgtccctgtgatcagacacctgttcgcccctctgaaggagtacttcgcctgcgtgagcagcggcaacagcaacgccaacagccggggccccagcttctctagcggcctggtgccactgtccctgagagggagccacatgggccccatggagatctacaaaaccgtgagcgcctggaagcggcagcctgtgcgcgtgctgagcctgtttcggaatatcgataaagtcctgaaaagcctgggattcctggagagcggctctggctccggcggtggcaccctgaagtacgtggaggatgtgacaaacgtggtcagacgggatgtggagaagtggggccccttcgatctggtgtacggcagcacccaacccctgggcagctcttgtgaccggtgccctggctggtacatgtttcagttccaccggatcctgcagtacgccctgccgagacaggagtcccagcggccattcttttggattttcatggacaacttgctgctgaccgaggatgaccaggaaactaccactcggttcctgcagaccgaagccgtgaccctgcaggacgtgagaggccgggactaccagaacgccatgcgggtgtggtccaacatccctggactgaaaagcaagcacgcacctctgacccctaaagaagaggagtacctgcaggcccaggtgcggagcagaagcaagctggacgcccctaaggtggatctgctggtgaagaattgcctcctgcccctgagagagtacttcaagtatttcagccagaatagtctgcccctgggaggcagcggcggcggcgccctggtgacatttgaggacgtcgccgtgcggttcacccaggaggaatgggctctgctggatccttctcagaaaatcctgtaccgggacgtgatgagagagacataccggaatctgacctccgtgggcatcaactgggaatgttgggaccttgaagcctgcttcagaagcctgggaagaaacctgagagtgcaggtggtgaagagaaagtgcgagctgaccaacagcggcccctgcgccgagggcggcccaagcagcggcgcccctcctcccagcggcggcagcccagccggctccccaacctctaccgaggagggcacctctgagtccgccacccccgagagcggccctggcacctccaccgagcccagcgagggcagcgcacccggcagccctgccggcagccccacctccacagaggagggaaccagcaccgagcccagcgaaggcagcgccccaggcaccagcaccgagcctagtgagcaggagattaaacggatcaacaagatcagaagaagacttgtgaaagacagcaacaccaagaaggccggcaagacaggccccatgaaaaccctgctggttagagtgatgacacccgatctgagagagcggctggaaaacctgagaaagaagcctgaaaatatcccccagcccatcagcaatacatctagagccaacctgaataagctgctgaccgattacaccgaaatgaagaaggcgatcctgcatgtgtactgggaagagttccagaaggaccctgtgggcctgatgagccgggtggcccagcctgccagcaagaagatcgatcagaacaagctgaaacctgagatggacgagaagggcaacctgaccaccgccggctttgcctgctctcagtgtggccagcccctgttcgtgtacaagctggagcaggtgtctgagaagggcaaggcttacaccaactacttcggacggtgcaatgtggccgagcacgaaaagctgatcctgctggcccagctgaagcccgagaaggatagcgacgaagccgtgacatatagcctgggaaagtttgggcagagggccctggatttctacagcattcatgtgaccaaggagtccacccaccccgtgaagcccctggcccagatcgccggaaacagatacgcctccggacctgtgggaaaggccctgagcgacgcatgtatgggcacaatcgcctccttcctgtctaagtaccaggacatcatcatcgaacaccagaaggtggtgaagggcaaccagaagagactggagagcctgcgggagctggccggcaaggaaaacctggaataccctagcgtgaccctgccacctcagcctcacaccaaggagggcgttgatgcctacaacgaagtgatcgcccgggtgcgaatgtgggtgaacctgaacctgtggcagaagctgaagctaagcagagatgatgccaagcctctgctgagactgaagggattcccttcctttcctctggtcgagagacaggccaacgaagtggactggtgggacatggtgtgtaacgtgaagaagctgatcaacgagaaaaaggaggatggcaaggtgttttggcagaatctggctggctacaagagacaggaagccctgagaccatacctgagcagcgaggaagatcggaagaagggaaagaaattcgctcggtaccagctgggcgacctgctgctgcacctggaaaagaagcacggcgaggactggggaaaggtgtacgacgaggcctgggagcggattgacaagaaagtggaaggcctgagcaagcacatcaagctggaagaggaacggagaagcgaggacgcccagagcaaggccgccctgaccgactggctgcgggctaaggccagcttcgtgatcgagggcctgaaggaggccgacaaggacgagttctgcagatgcgagctgaagctgcagaagtggtacggggacctgcggggaaagcccttcgccatcgaagccgagaacagcatcctggacatcagcggcttcagcaagcagtacaactgtgccttcatctggcagaaggacggcgtgaagaagctgaacctgtacctgatcatcaactacttcaagggcggcaagctgcggttcaagaagatcaaacctgaagccttcgaagccaacagattctacaccgtgatcaacaaaaagagcggcgagatcgtgcccatggaggtgaacttcaacttcgacgaccccaacctgatcatcctgcctctggcctttggcaagagacagggcagagaattcatctggaacgacctgctgtccctggaaaccggcagcctgaagctggccaacggaagagtgatcgagaagacactgtacaacagaagaacccggcaggatgagcctgccctgttcgtggccctgaccttcgagcggcgggaggtcctggactcctccaatatcaaaccaatgaacctgatcggcgtggcaagaggcgaaaacatccccgccgtgatcgccctgaccgaccccgagggctgcccactgagccggtttaaggatagcctgggaaacccaacccacatcctgagaatcggcgagagctataaggagaagcagcggaccatccaggccaagaaggaggtggagcagcggagagccggcggctacagccggaagtacgccagcaaagccaagaatctggcagacgatatggtgagaaacaccgctagagatctgctgtactacgccgtgacccaggatgccatgctgatcttcgccaacctgagccggggcttcggccggcagggcaagcggaccttcatggccgagagacagtacacacggatggaggactggctgaccgccaagctggcctacgagggcctgagcaagacctacctgtccaagacactggcccagtacacctccaagacatgcagcaactgtgggtttaccatcaccagcgccgactacgacagggtgctggagaagctgaagaagacagcaacaggctggatgaccacaattaacggcaaggagctgaaggtggagggccagattacctactacaacagatacaagagacagaacgtagtcaaggacctgtccgtcgagctggatagactgagcgaagaatctgtgaacaacgacatctcctcctggacaaagggcagaagcggagaagctctgagcctcctgaagaaaagattctcccatagacccgtgcaggagaagttcgtgtgcctgaactgcggcttcgagacacacgcagccgagcaagccgccctgaacatcgccagatcctggctgttcctgcggagccaggagtacaagaaataccagacaaacaagacaaccggcaacaccgataagagagccttcgtcgagacctggcagtccttttaccggaagaagcttaaggaggtgtggaaacctgccgtgcggtctggcggatctggcggaggctccgcccaggagagcgtgatgttcagcgacgtgagcatcgacttcagccaggaggagtgggagtgcctgaacgacgaccagagggacctgtacagggacgtgatgctggagaactacagccacctggtgagcatgggccacagcgtgagcaagcccgacgtgatcagcttcctggagcagggcaaggagccctggctggtggacagggagctgaccagggaccagtggcccgtgctggagagcaggggcggcccaagcagcggcgcccctcctcccagcggcggcagcccagccggctccccaacctctaccgaggagggcacctctgagtccgccacccccgagagcggccctggcacctccaccgagcccagcgagggcagcgcacccggcagccctgccggcagccccacctccacagaggagggaaccagcaccgagcccagcgaaggcagcgccccaggcaccagcaccgagcctagtgagcaggagattaaacggatcaacaagatcagaagaagacttgtgaaagacagcaacaccaagaaggccggcaagacaggccccatgaaaaccctgctggttagagtgatgacacccgatctgagagagcggctggaaaacctgagaaagaagcctgaaaatatcccccagcccatcagcaatacatctagagccaacctgaataagctgctgaccgattacaccgaaatgaagaaggcgatcctgcatgtgtactgggaagagttccagaaggaccctgtgggcctgatgagccgggtggcccagcctgccagcaagaagatcgatcagaacaagctgaaacctgagatggacgagaagggcaacctgaccaccgccggctttgcctgctctcagtgtggccagcccctgttcgtgtacaagctggagcaggtgtctgagaagggcaaggcttacaccaactacttcggacggtgcaatgtggccgagcacgaaaagctgatcctgctggcccagctgaagcccgagaaggatagcgacgaagccgtgacatatagcctgggaaagtttgggcagagggccctggatttctacagcattcatgtgaccaaggagtccacccaccccgtgaagcccctggcccagatcgccggaaacagatacgcctccggacctgtgggaaaggccctgagcgacgcatgtatgggcacaatcgcctccttcctgtctaagtaccaggacatcatcatcgaacaccagaaggtggtgaagggcaaccagaagagactggagagcctgcgggagctggccggcaaggaaaacctggaataccctagcgtgaccctgccacctcagcctcacaccaaggagggcgttgatgcctacaacgaagtgatcgcccgggtgcgaatgtgggtgaacctgaacctgtggcagaagctgaagctaagcagagatgatgccaagcctctgctgagactgaagggattcccttcctttcctctggtcgagagacaggccaacgaagtggactggtgggacatggtgtgtaacgtgaagaagctgatcaacgagaaaaaggaggatggcaaggtgttttggcagaatctggctggctacaagagacaggaagccctgagaccatacctgagcagcgaggaagatcggaagaagggaaagaaattcgctcggtaccagctgggcgacctgctgctgcacctggaaaagaagcacggcgaggactggggaaaggtgtacgacgaggcctgggagcggattgacaagaaagtggaaggcctgagcaagcacatcaagctggaagaggaacggagaagcgaggacgcccagagcaaggccgccctgaccgactggctgcgggctaaggccagcttcgtgatcgagggcctgaaggaggccgacaaggacgagttctgcagatgcgagctgaagctgcagaagtggtacggggacctgcggggaaagcccttcgccatcgaagccgagaacagcatcctggacatcagcggcttcagcaagcagtacaactgtgccttcatctggcagaaggacggcgtgaagaagctgaacctgtacctgatcatcaactacttcaagggcggcaagctgcggttcaagaagatcaaacctgaagccttcgaagccaacagattctacaccgtgatcaacaaaaagagcggcgagatcgtgcccatggaggtgaacttcaacttcgacgaccccaacctgatcatcctgcctctggcctttggcaagagacagggcagagaattcatctggaacgacctgctgtccctggaaaccggcagcctgaagctggccaacggaagagtgatcgagaagacactgtacaacagaagaacccggcaggatgagcctgccctgttcgtggccctgaccttcgagcggcgggaggtcctggactcctccaatatcaaaccaatgaacctgatcggcgtggcaagaggcgaaaacatccccgccgtgatcgccctgaccgaccccgagggctgcccactgagccggtttaaggatagcctgggaaacccaacccacatcctgagaatcggcgagagctataaggagaagcagcggaccatccaggccaagaaggaggtggagcagcggagagccggcggctacagccggaagtacgccagcaaagccaagaatctggcagacgatatggtgagaaacaccgctagagatctgctgtactacgccgtgacccaggatgccatgctgatcttcgccaacctgagccggggcttcggccggcagggcaagcggaccttcatggccgagagacagtacacacggatggaggactggctgaccgccaagctggcctacgagggcctgagcaagacctacctgtccaagacactggcccagtacacctccaagacatgcagcaactgtgggtttaccatcaccagcgccgactacgacagggtgctggagaagctgaagaagacagcaacaggctggatgaccacaattaacggcaaggagctgaaggtggagggccagattacctactacaacagatacaagagacagaacgtagtcaaggacctgtccgtcgagctggatagactgagcgaagaatctgtgaacaacgacatctcctcctggacaaagggcagaagcggagaagctctgagcctcctgaagaaaagattctcccatagacccgtgcaggagaagttcgtgtgcctgaactgcggcttcgagacacacgcagccgagcaagccgccctgaacatcgccagatcctggctgttcctgcggagccaggagtacaagaaataccagacaaacaagacaaccggcaacaccgataagagagccttcgtcgagacctggcagtccttttaccggaagaagcttaaggaggtgtggaaacctgccgtgcggtctggcggatctggcggaggctcctgcccaggagagcgtgatgttcagcgacgtgagcatcgacttcagccaggaggagtgggagtgcctgaacgacgaccagagggacctgtacagggacgtgatgctggagaactacagccacctggtgagcatgggccacagcgtgagcaagcccgacgtgatcagcttcctggagcagggcaaggagccctggctggtggacagggagctgaccagggaccagtggcccgtgctggagagcaggggatctggctccggcagcggccccaagaaaaagagaaaagtctaagctgccttctgcggggcttgccttctggccatgcccttcttctctcccttgcacctgtacctcttggtctttgaataaagcctgagtaggaaggctagcaaaaaaaaaaaaaaaaaaaaaaaaaaaaaaaaaaaaaaaaaaaaaaaaaaaaaaaaaaaaaaaaaaaaaaaaaaaaaaaa

SEQ ID NO: 15509 - RNA, 9485 nt, synthetic construct
  source 1..9485: mol_type = other RNA
aggaaataagagagaaaagaagagtaagaagaaatataagagccaccatggcccctaagaagaagcgtaaagtgagccggatggaacgcctcgtctacgaggtgcggcagaagtgcagaaacatcgaggacatctgcatctcctgcggatctctgaacgtgaccctggagcacccactgttcatcggcggcatgtgccagaactgtaaaaactgttttctggagtgtgcctatcaatacgacgatgacggctaccagagctactgcaccatctgttgcggcggaagagaggtgctgatgtgtggaaataacaactgctgccggtgcttctgcgtggaatgcgtggacctgctggtgggccccggcgccgcccaggccgctattaaggaagatccttggaactgctacatgtgcggccacaagggcacatacggcctgctgagacggagagaggactggcctagcagactgcagatgttcttcgccaataaccacgaccaggagttcgacccccctaaggtgtaccctcccgtccccgccgagaagagaaagcccatccgggtcctgagcctgttcgatggcatcgccaccggtctgctggtgctgaaggacctgggcatccaggtggataggtacattgcctccgaggtgtgcgaggactccatcaccgtgggaatggtgcgtcatcagggcaagatcatgtacgtgggcgacgtgcggagcgtgacacagaagcatatccaggagtggggccctttcgacctggtgatcggcggcagcccttgcaatgacctgagcatcgtgaacccagcccggaagggcctgtacgagggaaccggcagactgttcttcgagttttacagactgctgcacgacgcccggcctaaggaaggcgacgaccggcccttcttttggctgttcgagaatgtggtggccatgggagtcagcgacaagcgggatattagccggttcctggagagcaaccccgtgatgatcgatgccaaggaagtgagcgccgcccaccgggccagatacttctggggcaatctgcctggcatgaacagacccctggccagcaccgtgaacgacaagctggagctgcaggagtgcctggagcacggccggatcgccaagttcagcaaggtgagaaccatcaccacccgaagcaacagcatcaaacaaggcaaggaccagcactttcctgtgttcatgaacgagaaggaggacatcctgtggtgtaccgagatggagagagtgttcgggttcccagtccactacacagatgtcagcaacatgtctagactggccagacagagactgctgggaagaagctggtccgtccctgtgatcagacacctgttcgcccctctgaaggagtacttcgcctgcgtgagcagcggcaacagcaacgccaacagccggggccccagcttctctagcggcctggtgccactgtccctgagagggagccacatgggccccatggagatctacaaaaccgtgagcgcctggaagcggcagcctgtgcgcgtgctgagcctgtttcggaatatcgataaagtcctgaaaagcctgggattcctggagagcggctctggctccggcggtggcaccctgaagtacgtggaggatgtgacaaacgtggtcagacgggatgtggagaagtggggccccttcgatctggtgtacggcagcacccaacccctgggcagctcttgtgaccggtgccctggctggtacatgtttcagttccaccggatcctgcagtacgccctgccgagacaggagtcccagcggccattcttttggattttcatggacaacttgctgctgaccgaggatgaccaggaaactaccactcggttcctgcagaccgaagccgtgaccctgcaggacgtgagaggccgggactaccagaacgccatgcgggtgtggtccaacatccctggactgaaaagcaagcacgcacctctgacccctaaagaagaggagtacctgcaggcccaggtgcggagcagaagcaagctggacgcccctaaggtggatctgctggtgaagaattgcctcctgcccctgagagagtacttcaagtatttcagccagaatagtctgcccctgggaggcagcggcggcggcgccctggtgacatttgaggacgtcgccgtgcggttcacccaggaggaatgggctctgctggatccttctcagaaaatcctgtaccgggacgtgatgagagagacataccggaatctgacctccgtgggcatcaactgggaatgttgggaccttgaagcctgcttcagaagcctgggaagaaacctgagagtgcaggtggtgaagagaaagtgcgagctgaccaacagcggcccctgcgccgagggcggcccaagcagcggcgcccctcctcccagcggcggcagcccagccggctccccaacctctaccgaggagggcacctctgagtccgccacccccgagagcggccctggcacctccaccgagcccagcgagggcagcgcacccggcagccctgccggcagccccacctccacagaggagggaaccagcaccgagcccagcgaaggcagcgccccaggcaccagcaccgagcctagtgagcaggagattaaacggatcaacaagatcagaagaagacttgtgaaagacagcaacaccaagaaggccggcaagacaggccccatgaaaaccctgctggttagagtgatgacacccgatctgagagagcggctggaaaacctgagaaagaagcctgaaaatatcccccagcccatcagcaatacatctagagccaacctgaataagctgctgaccgattacaccgaaatgaagaaggcgatcctgcatgtgtactgggaagagttccagaaggaccctgtgggcctgatgagccgggtggcccagcctgccagcaagaagatcgatcagaacaagctgaaacctgagatggacgagaagggcaacctgaccaccgccggctttgcctgctctcagtgtggccagcccctgttcgtgtacaagctggagcaggtgtctgagaagggcaaggcttacaccaactacttcggacggtgcaatgtggccgagcacgaaaagctgatcctgctggcccagctgaagcccgagaaggatagcgacgaagccgtgacatatagcctgggaaagtttgggcagagggccctggatttctacagcattcatgtgaccaaggagtccacccaccccgtgaagcccctggcccagatcgccggaaacagatacgcctccggacctgtgggaaaggccctgagcgacgcatgtatgggcacaatcgcctccttcctgtctaagtaccaggacatcatcatcgaacaccagaaggtggtgaagggcaaccagaagagactggagagcctgcgggagctggccggcaaggaaaacctggaataccctagcgtgaccctgccacctcagcctcacaccaaggagggcgttgatgcctacaacgaagtgatcgcccgggtgcgaatgtgggtgaacctgaacctgtggcagaagctgaagctaagcagagatgatgccaagcctctgctgagactgaagggattcccttcctttcctctggtcgagagacaggccaacgaagtggactggtgggacatggtgtgtaacgtgaagaagctgatcaacgagaaaaaggaggatggcaaggtgttttggcagaatctggctggctacaagagacaggaagccctgagaccatacctgagcagcgaggaagatcggaagaagggaaagaaattcgctcggtaccagctgggcgacctgctgctgcacctggaaaagaagcacggcgaggactggggaaaggtgtacgacgaggcctgggagcggattgacaagaaagtggaaggcctgagcaagcacatcaagctggaagaggaacggagaagcgaggacgcccagagcaaggccgccctgaccgactggctgcgggctaaggccagcttcgtgatcgagggcctgaaggaggccgacaaggacgagttctgcagatgcgagctgaagctgcagaagtggtacggggacctgcggggaaagcccttcgccatcgaagccgagaacagcatcctggacatcagcggcttcagcaagcagtacaactgtgccttcatctggcagaaggacggcgtgaagaagctgaacctgtacctgatcatcaactacttcaagggcggcaagctgcggttcaagaagatcaaacctgaagccttcgaagccaacagattctacaccgtgatcaacaaaaagagcggcgagatcgtgcccatggaggtgaacttcaacttcgacgaccccaacctgatcatcctgcctctggcctttggcaagagacagggcagagaattcatctggaacgacctgctgtccctggaaaccggcagcctgaagctggccaacggaagagtgatcgagaagacactgtacaacagaagaacccggcaggatgagcctgccctgttcgtggccctgaccttcgagcggcgggaggtcctggactcctccaatatcaaaccaatgaacctgatcggcgtggcaagaggcgaaaacatccccgccgtgatcgccctgaccgaccccgagggctgcccactgagccggtttaaggatagcctgggaaacccaacccacatcctgagaatcggcgagagctataaggagaagcagcggaccatccaggccaagaaggaggtggagcagcggagagccggcggctacagccggaagtacgccagcaaagccaagaatctggcagacgatatggtgagaaacaccgctagagatctgctgtactacgccgtgacccaggatgccatgctgatcttcgccaacctgagccggggcttcggccggcagggcaagcggaccttcatggccgagagacagtacacacggatggaggactggctgaccgccaagctggcctacgagggcctgagcaagacctacctgtccaagacactggcccagtacacctccaagacatgcagcaactgtgggtttaccatcaccagcgccgactacgacagggtgctggagaagctgaagaagacagcaacaggctggatgaccacaattaacggcaaggagctgaaggtggagggccagattacctactacaacagatacaagagacagaacgtagtcaaggacctgtccgtcgagctggatagactgagcgaagaatctgtgaacaacgacatctcctcctggacaaagggcagaagcggagaagctctgagcctcctgaagaaaagattctcccatagacccgtgcaggagaagttcgtgtgcctgaactgcggcttcgagacacacgcagccgagcaagccgccctgaacatcgccagatcctggctgttcctgcggagccaggagtacaagaaataccagacaaacaagacaaccggcaacaccgataagagagccttcgtcgagacctggcagtccttttaccggaagaagcttaaggaggtgtggaaacctgccgtgcggtctggcggatctggcggaggctccatgatcgagtaccagatccccgtgagcttcaaggacgtggtggtgggcttcacccaggaggagtggcaccagctgagccccgcccagagggccctgtacagggacgtgatgctggagacctacagcaacctggtgagcgtgggctacgagggcaccaagcccgacgtgatcctgaggctggagcaggaggaggccccctggatcggcgaggccgcctgcctgggctgccactgctggggcatcggcggcccaagcagcggcgcccctcctcccagcggcggcagcccagccggctccccaacctctaccgaggagggcacctctgagtccgccacccccgagagcggccctggcacctccaccgagcccagcgagggcagcgcacccggcagccctgccggcagccccacctccacagaggagggaaccagcaccgagcccagcgaaggcagcgccccaggcaccagcaccgagcctagtgagcaggagattaaacggatcaacaagatcagaagaagacttgtgaaagacagcaacaccaagaaggccggcaagacaggccccatgaaaaccctgctggttagagtgatgacacccgatctgagagagcggctggaaaacctgagaaagaagcctgaaaatatcccccagcccatcagcaatacatctagagccaacctgaataagctgctgaccgattacaccgaaatgaagaaggcgatcctgcatgtgtactgggaagagttccagaaggaccctgtgggcctgatgagccgggtggcccagcctgccagcaagaagatcgatcagaacaagctgaaacctgagatggacgagaagggcaacctgaccaccgccggctttgcctgctctcagtgtggccagcccctgttcgtgtacaagctggagcaggtgtctgagaagggcaaggcttacaccaactacttcggacggtgcaatgtggccgagcacgaaaagctgatcctgctggcccagctgaagcccgagaaggatagcgacgaagccgtgacatatagcctgggaaagtttgggcagagggccctggatttctacagcattcatgtgaccaaggagtccacccaccccgtgaagcccctggcccagatcgccggaaacagatacgcctccggacctgtgggaaaggccctgagcgacgcatgtatgggcacaatcgcctccttcctgtctaagtaccaggacatcatcatcgaacaccagaaggtggtgaagggcaaccagaagagactggagagcctgcgggagctggccggcaaggaaaacctggaataccctagcgtgaccctgccacctcagcctcacaccaaggagggcgttgatgcctacaacgaagtgatcgcccgggtgcgaatgtgggtgaacctgaacctgtggcagaagctgaagctaagcagagatgatgccaagcctctgctgagactgaagggattcccttcctttcctctggtcgagagacaggccaacgaagtggactggtgggacatggtgtgtaacgtgaagaagctgatcaacgagaaaaaggaggatggcaaggtgttttggcagaatctggctggctacaagagacaggaagccctgagaccatacctgagcagcgaggaagatcggaagaagggaaagaaattcgctcggtaccagctgggcgacctgctgctgcacctggaaaagaagcacggcgaggactggggaaaggtgtacgacgaggcctgggagcggattgacaagaaagtggaaggcctgagcaagcacatcaagctggaagaggaacggagaagcgaggacgcccagagcaaggccgccctgaccgactggctgcgggctaaggccagcttcgtgatcgagggcctgaaggaggccgacaaggacgagttctgcagatgcgagctgaagctgcagaagtggtacggggacctgcggggaaagcccttcgccatcgaagccgagaacagcatcctggacatcagcggcttcagcaagcagtacaactgtgccttcatctggcagaaggacggcgtgaagaagctgaacctgtacctgatcatcaactacttcaagggcggcaagctgcggttcaagaagatcaaacctgaagccttcgaagccaacagattctacaccgtgatcaacaaaaagagcggcgagatcgtgcccatggaggtgaacttcaacttcgacgaccccaacctgatcatcctgcctctggcctttggcaagagacagggcagagaattcatctggaacgacctgctgtccctggaaaccggcagcctgaagctggccaacggaagagtgatcgagaagacactgtacaacagaagaacccggcaggatgagcctgccctgttcgtggccctgaccttcgagcggcgggaggtcctggactcctccaatatcaaaccaatgaacctgatcggcgtggcaagaggcgaaaacatccccgccgtgatcgccctgaccgaccccgagggctgcccactgagccggtttaaggatagcctgggaaacccaacccacatcctgagaatcggcgagagctataaggagaagcagcggaccatccaggccaagaaggaggtggagcagcggagagccggcggctacagccggaagtacgccagcaaagccaagaatctggcagacgatatggtgagaaacaccgctagagatctgctgtactacgccgtgacccaggatgccatgctgatcttcgccaacctgagccggggcttcggccggcagggcaagcggaccttcatggccgagagacagtacacacggatggaggactggctgaccgccaagctggcctacgagggcctgagcaagacctacctgtccaagacactggcccagtacacctccaagacatgcagcaactgtgggtttaccatcaccagcgccgactacgacagggtgctggagaagctgaagaagacagcaacaggctggatgaccacaattaacggcaaggagctgaaggtggagggccagattacctactacaacagatacaagagacagaacgtagtcaaggacctgtccgtcgagctggatagactgagcgaagaatctgtgaacaacgacatctcctcctggacaaagggcagaagcggagaagctctgagcctcctgaagaaaagattctcccatagacccgtgcaggagaagttcgtgtgcctgaactgcggcttcgagacacacgcagccgagcaagccgccctgaacatcgccagatcctggctgttcctgcggagccaggagtacaagaaataccagacaaacaagacaaccggcaacaccgataagagagccttcgtcgagacctggcagtccttttaccggaagaagcttaaggaggtgtggaaacctgccgtgcggtctggcggatctggcggaggctcctatgatcgagtaccagatccccgtgagcttcaaggacgtggtggtgggcttcacccaggaggagtggcaccagctgagccccgcccagagggccctgtacagggacgtgatgctggagacctacagcaacctggtgagcgtgggctacgagggcaccaagcccgacgtgatcctgaggctggagcaggaggaggccccctggatcggcgaggccgcctgcctgggctgccactgctggggcatcggatctggctccggcagcggccccaagaaaaagagaaaagtctaagctgccttctgcggggcttgccttctggccatgcccttcttctctcccttgcacctgtacctcttggtctttgaataaagcctgagtaggaaggctagcaaaaaaaaaaaaaaaaaaaaaaaaaaaaaaaaaaaaaaaaaaaaaaaaaaaaaaaaaaaaaaaaaaaaaaaaaaaaaaaa

SEQ ID NO: 15510 - RNA, 9485 nt, synthetic construct
  source 1..9485: mol_type = other RNA
aggaaataagagagaaaagaagagtaagaagaaatataagagccaccatggcccctaagaagaagcgtaaagtgagccggatggaacgcctcgtctacgaggtgcggcagaagtgcagaaacatcgaggacatctgcatctcctgcggatctctgaacgtgaccctggagcacccactgttcatcggcggcatgtgccagaactgtaaaaactgttttctggagtgtgcctatcaatacgacgatgacggctaccagagctactgcaccatctgttgcggcggaagagaggtgctgatgtgtggaaataacaactgctgccggtgcttctgcgtggaatgcgtggacctgctggtgggccccggcgccgcccaggccgctattaaggaagatccttggaactgctacatgtgcggccacaagggcacatacggcctgctgagacggagagaggactggcctagcagactgcagatgttcttcgccaataaccacgaccaggagttcgacccccctaaggtgtaccctcccgtccccgccgagaagagaaagcccatccgggtcctgagcctgttcgatggcatcgccaccggtctgctggtgctgaaggacctgggcatccaggtggataggtacattgcctccgaggtgtgcgaggactccatcaccgtgggaatggtgcgtcatcagggcaagatcatgtacgtgggcgacgtgcggagcgtgacacagaagcatatccaggagtggggccctttcgacctggtgatcggcggcagcccttgcaatgacctgagcatcgtgaacccagcccggaagggcctgtacgagggaaccggcagactgttcttcgagttttacagactgctgcacgacgcccggcctaaggaaggcgacgaccggcccttcttttggctgttcgagaatgtggtggccatgggagtcagcgacaagcgggatattagccggttcctggagagcaaccccgtgatgatcgatgccaaggaagtgagcgccgcccaccgggccagatacttctggggcaatctgcctggcatgaacagacccctggccagcaccgtgaacgacaagctggagctgcaggagtgcctggagcacggccggatcgccaagttcagcaaggtgagaaccatcaccacccgaagcaacagcatcaaacaaggcaaggaccagcactttcctgtgttcatgaacgagaaggaggacatcctgtggtgtaccgagatggagagagtgttcgggttcccagtccactacacagatgtcagcaacatgtctagactggccagacagagactgctgggaagaagctggtccgtccctgtgatcagacacctgttcgcccctctgaaggagtacttcgcctgcgtgagcagcggcaacagcaacgccaacagccggggccccagcttctctagcggcctggtgccactgtccctgagagggagccacatgggccccatggagatctacaaaaccgtgagcgcctggaagcggcagcctgtgcgcgtgctgagcctgtttcggaatatcgataaagtcctgaaaagcctgggattcctggagagcggctctggctccggcggtggcaccctgaagtacgtggaggatgtgacaaacgtggtcagacgggatgtggagaagtggggccccttcgatctggtgtacggcagcacccaacccctgggcagctcttgtgaccggtgccctggctggtacatgtttcagttccaccggatcctgcagtacgccctgccgagacaggagtcccagcggccattcttttggattttcatggacaacttgctgctgaccgaggatgaccaggaaactaccactcggttcctgcagaccgaagccgtgaccctgcaggacgtgagaggccgggactaccagaacgccatgcgggtgtggtccaacatccctggactgaaaagcaagcacgcacctctgacccctaaagaagaggagtacctgcaggcccaggtgcggagcagaagcaagctggacgcccctaaggtggatctgctggtgaagaattgcctcctgcccctgagagagtacttcaagtatttcagccagaatagtctgcccctgggaggcagcggcggcggcgccctggtgacatttgaggacgtcgccgtgcggttcacccaggaggaatgggctctgctggatccttctcagaaaatcctgtaccgggacgtgatgagagagacataccggaatctgacctccgtgggcatcaactgggaatgttgggaccttgaagcctgcttcagaagcctgggaagaaacctgagagtgcaggtggtgaagagaaagtgcgagctgaccaacagcggcccctgcgccgagggcggcccaagcagcggcgcccctcctcccagcggcggcagcccagccggctccccaacctctaccgaggagggcacctctgagtccgccacccccgagagcggccctggcacctccaccgagcccagcgagggcagcgcacccggcagccctgccggcagccccacctccacagaggagggaaccagcaccgagcccagcgaaggcagcgccccaggcaccagcaccgagcctagtgagcaggagattaaacggatcaacaagatcagaagaagacttgtgaaagacagcaacaccaagaaggccggcaagacaggccccatgaaaaccctgctggttagagtgatgacacccgatctgagagagcggctggaaaacctgagaaagaagcctgaaaatatcccccagcccatcagcaatacatctagagccaacctgaataagctgctgaccgattacaccgaaatgaagaaggcgatcctgcatgtgtactgggaagagttccagaaggaccctgtgggcctgatgagccgggtggcccagcctgccagcaagaagatcgatcagaacaagctgaaacctgagatggacgagaagggcaacctgaccaccgccggctttgcctgctctcagtgtggccagcccctgttcgtgtacaagctggagcaggtgtctgagaagggcaaggcttacaccaactacttcggacggtgcaatgtggccgagcacgaaaagctgatcctgctggcccagctgaagcccgagaaggatagcgacgaagccgtgacatatagcctgggaaagtttgggcagagggccctggatttctacagcattcatgtgaccaaggagtccacccaccccgtgaagcccctggcccagatcgccggaaacagatacgcctccggacctgtgggaaaggccctgagcgacgcatgtatgggcacaatcgcctccttcctgtctaagtaccaggacatcatcatcgaacaccagaaggtggtgaagggcaaccagaagagactggagagcctgcgggagctggccggcaaggaaaacctggaataccctagcgtgaccctgccacctcagcctcacaccaaggagggcgttgatgcctacaacgaagtgatcgcccgggtgcgaatgtgggtgaacctgaacctgtggcagaagctgaagctaagcagagatgatgccaagcctctgctgagactgaagggattcccttcctttcctctggtcgagagacaggccaacgaagtggactggtgggacatggtgtgtaacgtgaagaagctgatcaacgagaaaaaggaggatggcaaggtgttttggcagaatctggctggctacaagagacaggaagccctgagaccatacctgagcagcgaggaagatcggaagaagggaaagaaattcgctcggtaccagctgggcgacctgctgctgcacctggaaaagaagcacggcgaggactggggaaaggtgtacgacgaggcctgggagcggattgacaagaaagtggaaggcctgagcaagcacatcaagctggaagaggaacggagaagcgaggacgcccagagcaaggccgccctgaccgactggctgcgggctaaggccagcttcgtgatcgagggcctgaaggaggccgacaaggacgagttctgcagatgcgagctgaagctgcagaagtggtacggggacctgcggggaaagcccttcgccatcgaagccgagaacagcatcctggacatcagcggcttcagcaagcagtacaactgtgccttcatctggcagaaggacggcgtgaagaagctgaacctgtacctgatcatcaactacttcaagggcggcaagctgcggttcaagaagatcaaacctgaagccttcgaagccaacagattctacaccgtgatcaacaaaaagagcggcgagatcgtgcccatggaggtgaacttcaacttcgacgaccccaacctgatcatcctgcctctggcctttggcaagagacagggcagagaattcatctggaacgacctgctgtccctggaaaccggcagcctgaagctggccaacggaagagtgatcgagaagacactgtacaacagaagaacccggcaggatgagcctgccctgttcgtggccctgaccttcgagcggcgggaggtcctggactcctccaatatcaaaccaatgaacctgatcggcgtggcaagaggcgaaaacatccccgccgtgatcgccctgaccgaccccgagggctgcccactgagccggtttaaggatagcctgggaaacccaacccacatcctgagaatcggcgagagctataaggagaagcagcggaccatccaggccaagaaggaggtggagcagcggagagccggcggctacagccggaagtacgccagcaaagccaagaatctggcagacgatatggtgagaaacaccgctagagatctgctgtactacgccgtgacccaggatgccatgctgatcttcgccaacctgagccggggcttcggccggcagggcaagcggaccttcatggccgagagacagtacacacggatggaggactggctgaccgccaagctggcctacgagggcctgagcaagacctacctgtccaagacactggcccagtacacctccaagacatgcagcaactgtgggtttaccatcaccagcgccgactacgacagggtgctggagaagctgaagaagacagcaacaggctggatgaccacaattaacggcaaggagctgaaggtggagggccagattacctactacaacagatacaagagacagaacgtagtcaaggacctgtccgtcgagctggatagactgagcgaagaatctgtgaacaacgacatctcctcctggacaaagggcagaagcggagaagctctgagcctcctgaagaaaagattctcccatagacccgtgcaggagaagttcgtgtgcctgaactgcggcttcgagacacacgcagccgagcaagccgccctgaacatcgccagatcctggctgttcctgcggagccaggagtacaagaaataccagacaaacaagacaaccggcaacaccgataagagagccttcgtcgagacctggcagtccttttaccggaagaagcttaaggaggtgtggaaacctgccgtgcggtctggcggatctggcggaggctccgtgcaggagcccgtgaccttcaaggacgtggccgtggacttcacccaggaggagtggggccagctggacctggtgcagaggaccctgtacagggacgtgatgctggagacctacggccacctgctgagcgtgggcaaccagatcgccaagcccgaggtgatcagcctgctggagcagggcgaggagccctggagcgtggagcaggcctgcccccagaggacctgccccgagtgggtgaggaacggcggcccaagcagcggcgcccctcctcccagcggcggcagcccagccggctccccaacctctaccgaggagggcacctctgagtccgccacccccgagagcggccctggcacctccaccgagcccagcgagggcagcgcacccggcagccctgccggcagccccacctccacagaggagggaaccagcaccgagcccagcgaaggcagcgccccaggcaccagcaccgagcctagtgagcaggagattaaacggatcaacaagatcagaagaagacttgtgaaagacagcaacaccaagaaggccggcaagacaggccccatgaaaaccctgctggttagagtgatgacacccgatctgagagagcggctggaaaacctgagaaagaagcctgaaaatatcccccagcccatcagcaatacatctagagccaacctgaataagctgctgaccgattacaccgaaatgaagaaggcgatcctgcatgtgtactgggaagagttccagaaggaccctgtgggcctgatgagccgggtggcccagcctgccagcaagaagatcgatcagaacaagctgaaacctgagatggacgagaagggcaacctgaccaccgccggctttgcctgctctcagtgtggccagcccctgttcgtgtacaagctggagcaggtgtctgagaagggcaaggcttacaccaactacttcggacggtgcaatgtggccgagcacgaaaagctgatcctgctggcccagctgaagcccgagaaggatagcgacgaagccgtgacatatagcctgggaaagtttgggcagagggccctggatttctacagcattcatgtgaccaaggagtccacccaccccgtgaagcccctggcccagatcgccggaaacagatacgcctccggacctgtgggaaaggccctgagcgacgcatgtatgggcacaatcgcctccttcctgtctaagtaccaggacatcatcatcgaacaccagaaggtggtgaagggcaaccagaagagactggagagcctgcgggagctggccggcaaggaaaacctggaataccctagcgtgaccctgccacctcagcctcacaccaaggagggcgttgatgcctacaacgaagtgatcgcccgggtgcgaatgtgggtgaacctgaacctgtggcagaagctgaagctaagcagagatgatgccaagcctctgctgagactgaagggattcccttcctttcctctggtcgagagacaggccaacgaagtggactggtgggacatggtgtgtaacgtgaagaagctgatcaacgagaaaaaggaggatggcaaggtgttttggcagaatctggctggctacaagagacaggaagccctgagaccatacctgagcagcgaggaagatcggaagaagggaaagaaattcgctcggtaccagctgggcgacctgctgctgcacctggaaaagaagcacggcgaggactggggaaaggtgtacgacgaggcctgggagcggattgacaagaaagtggaaggcctgagcaagcacatcaagctggaagaggaacggagaagcgaggacgcccagagcaaggccgccctgaccgactggctgcgggctaaggccagcttcgtgatcgagggcctgaaggaggccgacaaggacgagttctgcagatgcgagctgaagctgcagaagtggtacggggacctgcggggaaagcccttcgccatcgaagccgagaacagcatcctggacatcagcggcttcagcaagcagtacaactgtgccttcatctggcagaaggacggcgtgaagaagctgaacctgtacctgatcatcaactacttcaagggcggcaagctgcggttcaagaagatcaaacctgaagccttcgaagccaacagattctacaccgtgatcaacaaaaagagcggcgagatcgtgcccatggaggtgaacttcaacttcgacgaccccaacctgatcatcctgcctctggcctttggcaagagacagggcagagaattcatctggaacgacctgctgtccctggaaaccggcagcctgaagctggccaacggaagagtgatcgagaagacactgtacaacagaagaacccggcaggatgagcctgccctgttcgtggccctgaccttcgagcggcgggaggtcctggactcctccaatatcaaaccaatgaacctgatcggcgtggcaagaggcgaaaacatccccgccgtgatcgccctgaccgaccccgagggctgcccactgagccggtttaaggatagcctgggaaacccaacccacatcctgagaatcggcgagagctataaggagaagcagcggaccatccaggccaagaaggaggtggagcagcggagagccggcggctacagccggaagtacgccagcaaagccaagaatctggcagacgatatggtgagaaacaccgctagagatctgctgtactacgccgtgacccaggatgccatgctgatcttcgccaacctgagccggggcttcggccggcagggcaagcggaccttcatggccgagagacagtacacacggatggaggactggctgaccgccaagctggcctacgagggcctgagcaagacctacctgtccaagacactggcccagtacacctccaagacatgcagcaactgtgggtttaccatcaccagcgccgactacgacagggtgctggagaagctgaagaagacagcaacaggctggatgaccacaattaacggcaaggagctgaaggtggagggccagattacctactacaacagatacaagagacagaacgtagtcaaggacctgtccgtcgagctggatagactgagcgaagaatctgtgaacaacgacatctcctcctggacaaagggcagaagcggagaagctctgagcctcctgaagaaaagattctcccatagacccgtgcaggagaagttcgtgtgcctgaactgcggcttcgagacacacgcagccgagcaagccgccctgaacatcgccagatcctggctgttcctgcggagccaggagtacaagaaataccagacaaacaagacaaccggcaacaccgataagagagccttcgtcgagacctggcagtccttttaccggaagaagcttaaggaggtgtggaaacctgccgtgcggtctggcggatctggcggaggctcctgtgcaggagcccgtgaccttcaaggacgtggccgtggacttcacccaggaggagtggggccagctggacctggtgcagaggaccctgtacagggacgtgatgctggagacctacggccacctgctgagcgtgggcaaccagatcgccaagcccgaggtgatcagcctgctggagcagggcgaggagccctggagcgtggagcaggcctgcccccagaggacctgccccgagtgggtgaggaacggatctggctccggcagcggccccaagaaaaagagaaaagtctaagctgccttctgcggggcttgccttctggccatgcccttcttctctcccttgcacctgtacctcttggtctttgaataaagcctgagtaggaaggctagcaaaaaaaaaaaaaaaaaaaaaaaaaaaaaaaaaaaaaaaaaaaaaaaaaaaaaaaaaaaaaaaaaaaaaaaaaaaaaaaa

SEQ ID NO: 15511 - RNA, 9485 nt, synthetic construct
  source 1..9485: mol_type = other RNA
aggaaataagagagaaaagaagagtaagaagaaatataagagccaccatggcccctaagaagaagcgtaaagtgagccggatggaacgcctcgtctacgaggtgcggcagaagtgcagaaacatcgaggacatctgcatctcctgcggatctctgaacgtgaccctggagcacccactgttcatcggcggcatgtgccagaactgtaaaaactgttttctggagtgtgcctatcaatacgacgatgacggctaccagagctactgcaccatctgttgcggcggaagagaggtgctgatgtgtggaaataacaactgctgccggtgcttctgcgtggaatgcgtggacctgctggtgggccccggcgccgcccaggccgctattaaggaagatccttggaactgctacatgtgcggccacaagggcacatacggcctgctgagacggagagaggactggcctagcagactgcagatgttcttcgccaataaccacgaccaggagttcgacccccctaaggtgtaccctcccgtccccgccgagaagagaaagcccatccgggtcctgagcctgttcgatggcatcgccaccggtctgctggtgctgaaggacctgggcatccaggtggataggtacattgcctccgaggtgtgcgaggactccatcaccgtgggaatggtgcgtcatcagggcaagatcatgtacgtgggcgacgtgcggagcgtgacacagaagcatatccaggagtggggccctttcgacctggtgatcggcggcagcccttgcaatgacctgagcatcgtgaacccagcccggaagggcctgtacgagggaaccggcagactgttcttcgagttttacagactgctgcacgacgcccggcctaaggaaggcgacgaccggcccttcttttggctgttcgagaatgtggtggccatgggagtcagcgacaagcgggatattagccggttcctggagagcaaccccgtgatgatcgatgccaaggaagtgagcgccgcccaccgggccagatacttctggggcaatctgcctggcatgaacagacccctggccagcaccgtgaacgacaagctggagctgcaggagtgcctggagcacggccggatcgccaagttcagcaaggtgagaaccatcaccacccgaagcaacagcatcaaacaaggcaaggaccagcactttcctgtgttcatgaacgagaaggaggacatcctgtggtgtaccgagatggagagagtgttcgggttcccagtccactacacagatgtcagcaacatgtctagactggccagacagagactgctgggaagaagctggtccgtccctgtgatcagacacctgttcgcccctctgaaggagtacttcgcctgcgtgagcagcggcaacagcaacgccaacagccggggccccagcttctctagcggcctggtgccactgtccctgagagggagccacatgggccccatggagatctacaaaaccgtgagcgcctggaagcggcagcctgtgcgcgtgctgagcctgtttcggaatatcgataaagtcctgaaaagcctgggattcctggagagcggctctggctccggcggtggcaccctgaagtacgtggaggatgtgacaaacgtggtcagacgggatgtggagaagtggggccccttcgatctggtgtacggcagcacccaacccctgggcagctcttgtgaccggtgccctggctggtacatgtttcagttccaccggatcctgcagtacgccctgccgagacaggagtcccagcggccattcttttggattttcatggacaacttgctgctgaccgaggatgaccaggaaactaccactcggttcctgcagaccgaagccgtgaccctgcaggacgtgagaggccgggactaccagaacgccatgcgggtgtggtccaacatccctggactgaaaagcaagcacgcacctctgacccctaaagaagaggagtacctgcaggcccaggtgcggagcagaagcaagctggacgcccctaaggtggatctgctggtgaagaattgcctcctgcccctgagagagtacttcaagtatttcagccagaatagtctgcccctgggaggcagcggcggcggcgccctggtgacatttgaggacgtcgccgtgcggttcacccaggaggaatgggctctgctggatccttctcagaaaatcctgtaccgggacgtgatgagagagacataccggaatctgacctccgtgggcatcaactgggaatgttgggaccttgaagcctgcttcagaagcctgggaagaaacctgagagtgcaggtggtgaagagaaagtgcgagctgaccaacagcggcccctgcgccgagggcggcccaagcagcggcgcccctcctcccagcggcggcagcccagccggctccccaacctctaccgaggagggcacctctgagtccgccacccccgagagcggccctggcacctccaccgagcccagcgagggcagcgcacccggcagccctgccggcagccccacctccacagaggagggaaccagcaccgagcccagcgaaggcagcgccccaggcaccagcaccgagcctagtgagcaggagattaaacggatcaacaagatcagaagaagacttgtgaaagacagcaacaccaagaaggccggcaagacaggccccatgaaaaccctgctggttagagtgatgacacccgatctgagagagcggctggaaaacctgagaaagaagcctgaaaatatcccccagcccatcagcaatacatctagagccaacctgaataagctgctgaccgattacaccgaaatgaagaaggcgatcctgcatgtgtactgggaagagttccagaaggaccctgtgggcctgatgagccgggtggcccagcctgccagcaagaagatcgatcagaacaagctgaaacctgagatggacgagaagggcaacctgaccaccgccggctttgcctgctctcagtgtggccagcccctgttcgtgtacaagctggagcaggtgtctgagaagggcaaggcttacaccaactacttcggacggtgcaatgtggccgagcacgaaaagctgatcctgctggcccagctgaagcccgagaaggatagcgacgaagccgtgacatatagcctgggaaagtttgggcagagggccctggatttctacagcattcatgtgaccaaggagtccacccaccccgtgaagcccctggcccagatcgccggaaacagatacgcctccggacctgtgggaaaggccctgagcgacgcatgtatgggcacaatcgcctccttcctgtctaagtaccaggacatcatcatcgaacaccagaaggtggtgaagggcaaccagaagagactggagagcctgcgggagctggccggcaaggaaaacctggaataccctagcgtgaccctgccacctcagcctcacaccaaggagggcgttgatgcctacaacgaagtgatcgcccgggtgcgaatgtgggtgaacctgaacctgtggcagaagctgaagctaagcagagatgatgccaagcctctgctgagactgaagggattcccttcctttcctctggtcgagagacaggccaacgaagtggactggtgggacatggtgtgtaacgtgaagaagctgatcaacgagaaaaaggaggatggcaaggtgttttggcagaatctggctggctacaagagacaggaagccctgagaccatacctgagcagcgaggaagatcggaagaagggaaagaaattcgctcggtaccagctgggcgacctgctgctgcacctggaaaagaagcacggcgaggactggggaaaggtgtacgacgaggcctgggagcggattgacaagaaagtggaaggcctgagcaagcacatcaagctggaagaggaacggagaagcgaggacgcccagagcaaggccgccctgaccgactggctgcgggctaaggccagcttcgtgatcgagggcctgaaggaggccgacaaggacgagttctgcagatgcgagctgaagctgcagaagtggtacggggacctgcggggaaagcccttcgccatcgaagccgagaacagcatcctggacatcagcggcttcagcaagcagtacaactgtgccttcatctggcagaaggacggcgtgaagaagctgaacctgtacctgatcatcaactacttcaagggcggcaagctgcggttcaagaagatcaaacctgaagccttcgaagccaacagattctacaccgtgatcaacaaaaagagcggcgagatcgtgcccatggaggtgaacttcaacttcgacgaccccaacctgatcatcctgcctctggcctttggcaagagacagggcagagaattcatctggaacgacctgctgtccctggaaaccggcagcctgaagctggccaacggaagagtgatcgagaagacactgtacaacagaagaacccggcaggatgagcctgccctgttcgtggccctgaccttcgagcggcgggaggtcctggactcctccaatatcaaaccaatgaacctgatcggcgtggcaagaggcgaaaacatccccgccgtgatcgccctgaccgaccccgagggctgcccactgagccggtttaaggatagcctgggaaacccaacccacatcctgagaatcggcgagagctataaggagaagcagcggaccatccaggccaagaaggaggtggagcagcggagagccggcggctacagccggaagtacgccagcaaagccaagaatctggcagacgatatggtgagaaacaccgctagagatctgctgtactacgccgtgacccaggatgccatgctgatcttcgccaacctgagccggggcttcggccggcagggcaagcggaccttcatggccgagagacagtacacacggatggaggactggctgaccgccaagctggcctacgagggcctgagcaagacctacctgtccaagacactggcccagtacacctccaagacatgcagcaactgtgggtttaccatcaccagcgccgactacgacagggtgctggagaagctgaagaagacagcaacaggctggatgaccacaattaacggcaaggagctgaaggtggagggccagattacctactacaacagatacaagagacagaacgtagtcaaggacctgtccgtcgagctggatagactgagcgaagaatctgtgaacaacgacatctcctcctggacaaagggcagaagcggagaagctctgagcctcctgaagaaaagattctcccatagacccgtgcaggagaagttcgtgtgcctgaactgcggcttcgagacacacgcagccgagcaagccgccctgaacatcgccagatcctggctgttcctgcggagccaggagtacaagaaataccagacaaacaagacaaccggcaacaccgataagagagccttcgtcgagacctggcagtccttttaccggaagaagcttaaggaggtgtggaaacctgccgtgcggtctggcggatctggcggaggctccatgatcaactaccagacccccgtgagcttcagggacgtggtggtgggcttcacccaggaggagtggcacaggctgaaccccacccagagggccctgtacagggacgtgatgctggagacctacagcaacctggtgagcgtgggctacgagggcaccaagcccgacgtgatcctgaggctggagcaggaggaggccccctggatcggcgaggccgcctgcctgggctgccactgctggggcatcggcggcccaagcagcggcgcccctcctcccagcggcggcagcccagccggctccccaacctctaccgaggagggcacctctgagtccgccacccccgagagcggccctggcacctccaccgagcccagcgagggcagcgcacccggcagccctgccggcagccccacctccacagaggagggaaccagcaccgagcccagcgaaggcagcgccccaggcaccagcaccgagcctagtgagcaggagattaaacggatcaacaagatcagaagaagacttgtgaaagacagcaacaccaagaaggccggcaagacaggccccatgaaaaccctgctggttagagtgatgacacccgatctgagagagcggctggaaaacctgagaaagaagcctgaaaatatcccccagcccatcagcaatacatctagagccaacctgaataagctgctgaccgattacaccgaaatgaagaaggcgatcctgcatgtgtactgggaagagttccagaaggaccctgtgggcctgatgagccgggtggcccagcctgccagcaagaagatcgatcagaacaagctgaaacctgagatggacgagaagggcaacctgaccaccgccggctttgcctgctctcagtgtggccagcccctgttcgtgtacaagctggagcaggtgtctgagaagggcaaggcttacaccaactacttcggacggtgcaatgtggccgagcacgaaaagctgatcctgctggcccagctgaagcccgagaaggatagcgacgaagccgtgacatatagcctgggaaagtttgggcagagggccctggatttctacagcattcatgtgaccaaggagtccacccaccccgtgaagcccctggcccagatcgccggaaacagatacgcctccggacctgtgggaaaggccctgagcgacgcatgtatgggcacaatcgcctccttcctgtctaagtaccaggacatcatcatcgaacaccagaaggtggtgaagggcaaccagaagagactggagagcctgcgggagctggccggcaaggaaaacctggaataccctagcgtgaccctgccacctcagcctcacaccaaggagggcgttgatgcctacaacgaagtgatcgcccgggtgcgaatgtgggtgaacctgaacctgtggcagaagctgaagctaagcagagatgatgccaagcctctgctgagactgaagggattcccttcctttcctctggtcgagagacaggccaacgaagtggactggtgggacatggtgtgtaacgtgaagaagctgatcaacgagaaaaaggaggatggcaaggtgttttggcagaatctggctggctacaagagacaggaagccctgagaccatacctgagcagcgaggaagatcggaagaagggaaagaaattcgctcggtaccagctgggcgacctgctgctgcacctggaaaagaagcacggcgaggactggggaaaggtgtacgacgaggcctgggagcggattgacaagaaagtggaaggcctgagcaagcacatcaagctggaagaggaacggagaagcgaggacgcccagagcaaggccgccctgaccgactggctgcgggctaaggccagcttcgtgatcgagggcctgaaggaggccgacaaggacgagttctgcagatgcgagctgaagctgcagaagtggtacggggacctgcggggaaagcccttcgccatcgaagccgagaacagcatcctggacatcagcggcttcagcaagcagtacaactgtgccttcatctggcagaaggacggcgtgaagaagctgaacctgtacctgatcatcaactacttcaagggcggcaagctgcggttcaagaagatcaaacctgaagccttcgaagccaacagattctacaccgtgatcaacaaaaagagcggcgagatcgtgcccatggaggtgaacttcaacttcgacgaccccaacctgatcatcctgcctctggcctttggcaagagacagggcagagaattcatctggaacgacctgctgtccctggaaaccggcagcctgaagctggccaacggaagagtgatcgagaagacactgtacaacagaagaacccggcaggatgagcctgccctgttcgtggccctgaccttcgagcggcgggaggtcctggactcctccaatatcaaaccaatgaacctgatcggcgtggcaagaggcgaaaacatccccgccgtgatcgccctgaccgaccccgagggctgcccactgagccggtttaaggatagcctgggaaacccaacccacatcctgagaatcggcgagagctataaggagaagcagcggaccatccaggccaagaaggaggtggagcagcggagagccggcggctacagccggaagtacgccagcaaagccaagaatctggcagacgatatggtgagaaacaccgctagagatctgctgtactacgccgtgacccaggatgccatgctgatcttcgccaacctgagccggggcttcggccggcagggcaagcggaccttcatggccgagagacagtacacacggatggaggactggctgaccgccaagctggcctacgagggcctgagcaagacctacctgtccaagacactggcccagtacacctccaagacatgcagcaactgtgggtttaccatcaccagcgccgactacgacagggtgctggagaagctgaagaagacagcaacaggctggatgaccacaattaacggcaaggagctgaaggtggagggccagattacctactacaacagatacaagagacagaacgtagtcaaggacctgtccgtcgagctggatagactgagcgaagaatctgtgaacaacgacatctcctcctggacaaagggcagaagcggagaagctctgagcctcctgaagaaaagattctcccatagacccgtgcaggagaagttcgtgtgcctgaactgcggcttcgagacacacgcagccgagcaagccgccctgaacatcgccagatcctggctgttcctgcggagccaggagtacaagaaataccagacaaacaagacaaccggcaacaccgataagagagccttcgtcgagacctggcagtccttttaccggaagaagcttaaggaggtgtggaaacctgccgtgcggtctggcggatctggcggaggctcctatgatcaactaccagacccccgtgagcttcagggacgtggtggtgggcttcacccaggaggagtggcacaggctgaaccccacccagagggccctgtacagggacgtgatgctggagacctacagcaacctggtgagcgtgggctacgagggcaccaagcccgacgtgatcctgaggctggagcaggaggaggccccctggatcggcgaggccgcctgcctgggctgccactgctggggcatcggatctggctccggcagcggccccaagaaaaagagaaaagtctaagctgccttctgcggggcttgccttctggccatgcccttcttctctcccttgcacctgtacctcttggtctttgaataaagcctgagtaggaaggctagcaaaaaaaaaaaaaaaaaaaaaaaaaaaaaaaaaaaaaaaaaaaaaaaaaaaaaaaaaaaaaaaaaaaaaaaaaaaaaaaa

SEQ ID NO: 15512 - RNA, 9485 nt, synthetic construct
  source 1..9485: mol_type = other RNA
aggaaataagagagaaaagaagagtaagaagaaatataagagccaccatggcccctaagaagaagcgtaaagtgagccggatggaacgcctcgtctacgaggtgcggcagaagtgcagaaacatcgaggacatctgcatctcctgcggatctctgaacgtgaccctggagcacccactgttcatcggcggcatgtgccagaactgtaaaaactgttttctggagtgtgcctatcaatacgacgatgacggctaccagagctactgcaccatctgttgcggcggaagagaggtgctgatgtgtggaaataacaactgctgccggtgcttctgcgtggaatgcgtggacctgctggtgggccccggcgccgcccaggccgctattaaggaagatccttggaactgctacatgtgcggccacaagggcacatacggcctgctgagacggagagaggactggcctagcagactgcagatgttcttcgccaataaccacgaccaggagttcgacccccctaaggtgtaccctcccgtccccgccgagaagagaaagcccatccgggtcctgagcctgttcgatggcatcgccaccggtctgctggtgctgaaggacctgggcatccaggtggataggtacattgcctccgaggtgtgcgaggactccatcaccgtgggaatggtgcgtcatcagggcaagatcatgtacgtgggcgacgtgcggagcgtgacacagaagcatatccaggagtggggccctttcgacctggtgatcggcggcagcccttgcaatgacctgagcatcgtgaacccagcccggaagggcctgtacgagggaaccggcagactgttcttcgagttttacagactgctgcacgacgcccggcctaaggaaggcgacgaccggcccttcttttggctgttcgagaatgtggtggccatgggagtcagcgacaagcgggatattagccggttcctggagagcaaccccgtgatgatcgatgccaaggaagtgagcgccgcccaccgggccagatacttctggggcaatctgcctggcatgaacagacccctggccagcaccgtgaacgacaagctggagctgcaggagtgcctggagcacggccggatcgccaagttcagcaaggtgagaaccatcaccacccgaagcaacagcatcaaacaaggcaaggaccagcactttcctgtgttcatgaacgagaaggaggacatcctgtggtgtaccgagatggagagagtgttcgggttcccagtccactacacagatgtcagcaacatgtctagactggccagacagagactgctgggaagaagctggtccgtccctgtgatcagacacctgttcgcccctctgaaggagtacttcgcctgcgtgagcagcggcaacagcaacgccaacagccggggccccagcttctctagcggcctggtgccactgtccctgagagggagccacatgggccccatggagatctacaaaaccgtgagcgcctggaagcggcagcctgtgcgcgtgctgagcctgtttcggaatatcgataaagtcctgaaaagcctgggattcctggagagcggctctggctccggcggtggcaccctgaagtacgtggaggatgtgacaaacgtggtcagacgggatgtggagaagtggggccccttcgatctggtgtacggcagcacccaacccctgggcagctcttgtgaccggtgccctggctggtacatgtttcagttccaccggatcctgcagtacgccctgccgagacaggagtcccagcggccattcttttggattttcatggacaacttgctgctgaccgaggatgaccaggaaactaccactcggttcctgcagaccgaagccgtgaccctgcaggacgtgagaggccgggactaccagaacgccatgcgggtgtggtccaacatccctggactgaaaagcaagcacgcacctctgacccctaaagaagaggagtacctgcaggcccaggtgcggagcagaagcaagctggacgcccctaaggtggatctgctggtgaagaattgcctcctgcccctgagagagtacttcaagtatttcagccagaatagtctgcccctgggaggcagcggcggcggcgccctggtgacatttgaggacgtcgccgtgcggttcacccaggaggaatgggctctgctggatccttctcagaaaatcctgtaccgggacgtgatgagagagacataccggaatctgacctccgtgggcatcaactgggaatgttgggaccttgaagcctgcttcagaagcctgggaagaaacctgagagtgcaggtggtgaagagaaagtgcgagctgaccaacagcggcccctgcgccgagggcggcccaagcagcggcgcccctcctcccagcggcggcagcccagccggctccccaacctctaccgaggagggcacctctgagtccgccacccccgagagcggccctggcacctccaccgagcccagcgagggcagcgcacccggcagccctgccggcagccccacctccacagaggagggaaccagcaccgagcccagcgaaggcagcgccccaggcaccagcaccgagcctagtgagcaggagattaaacggatcaacaagatcagaagaagacttgtgaaagacagcaacaccaagaaggccggcaagacaggccccatgaaaaccctgctggttagagtgatgacacccgatctgagagagcggctggaaaacctgagaaagaagcctgaaaatatcccccagcccatcagcaatacatctagagccaacctgaataagctgctgaccgattacaccgaaatgaagaaggcgatcctgcatgtgtactgggaagagttccagaaggaccctgtgggcctgatgagccgggtggcccagcctgccagcaagaagatcgatcagaacaagctgaaacctgagatggacgagaagggcaacctgaccaccgccggctttgcctgctctcagtgtggccagcccctgttcgtgtacaagctggagcaggtgtctgagaagggcaaggcttacaccaactacttcggacggtgcaatgtggccgagcacgaaaagctgatcctgctggcccagctgaagcccgagaaggatagcgacgaagccgtgacatatagcctgggaaagtttgggcagagggccctggatttctacagcattcatgtgaccaaggagtccacccaccccgtgaagcccctggcccagatcgccggaaacagatacgcctccggacctgtgggaaaggccctgagcgacgcatgtatgggcacaatcgcctccttcctgtctaagtaccaggacatcatcatcgaacaccagaaggtggtgaagggcaaccagaagagactggagagcctgcgggagctggccggcaaggaaaacctggaataccctagcgtgaccctgccacctcagcctcacaccaaggagggcgttgatgcctacaacgaagtgatcgcccgggtgcgaatgtgggtgaacctgaacctgtggcagaagctgaagctaagcagagatgatgccaagcctctgctgagactgaagggattcccttcctttcctctggtcgagagacaggccaacgaagtggactggtgggacatggtgtgtaacgtgaagaagctgatcaacgagaaaaaggaggatggcaaggtgttttggcagaatctggctggctacaagagacaggaagccctgagaccatacctgagcagcgaggaagatcggaagaagggaaagaaattcgctcggtaccagctgggcgacctgctgctgcacctggaaaagaagcacggcgaggactggggaaaggtgtacgacgaggcctgggagcggattgacaagaaagtggaaggcctgagcaagcacatcaagctggaagaggaacggagaagcgaggacgcccagagcaaggccgccctgaccgactggctgcgggctaaggccagcttcgtgatcgagggcctgaaggaggccgacaaggacgagttctgcagatgcgagctgaagctgcagaagtggtacggggacctgcggggaaagcccttcgccatcgaagccgagaacagcatcctggacatcagcggcttcagcaagcagtacaactgtgccttcatctggcagaaggacggcgtgaagaagctgaacctgtacctgatcatcaactacttcaagggcggcaagctgcggttcaagaagatcaaacctgaagccttcgaagccaacagattctacaccgtgatcaacaaaaagagcggcgagatcgtgcccatggaggtgaacttcaacttcgacgaccccaacctgatcatcctgcctctggcctttggcaagagacagggcagagaattcatctggaacgacctgctgtccctggaaaccggcagcctgaagctggccaacggaagagtgatcgagaagacactgtacaacagaagaacccggcaggatgagcctgccctgttcgtggccctgaccttcgagcggcgggaggtcctggactcctccaatatcaaaccaatgaacctgatcggcgtggcaagaggcgaaaacatccccgccgtgatcgccctgaccgaccccgagggctgcccactgagccggtttaaggatagcctgggaaacccaacccacatcctgagaatcggcgagagctataaggagaagcagcggaccatccaggccaagaaggaggtggagcagcggagagccggcggctacagccggaagtacgccagcaaagccaagaatctggcagacgatatggtgagaaacaccgctagagatctgctgtactacgccgtgacccaggatgccatgctgatcttcgccaacctgagccggggcttcggccggcagggcaagcggaccttcatggccgagagacagtacacacggatggaggactggctgaccgccaagctggcctacgagggcctgagcaagacctacctgtccaagacactggcccagtacacctccaagacatgcagcaactgtgggtttaccatcaccagcgccgactacgacagggtgctggagaagctgaagaagacagcaacaggctggatgaccacaattaacggcaaggagctgaaggtggagggccagattacctactacaacagatacaagagacagaacgtagtcaaggacctgtccgtcgagctggatagactgagcgaagaatctgtgaacaacgacatctcctcctggacaaagggcagaagcggagaagctctgagcctcctgaagaaaagattctcccatagacccgtgcaggagaagttcgtgtgcctgaactgcggcttcgagacacacgcagccgagcaagccgccctgaacatcgccagatcctggctgttcctgcggagccaggagtacaagaaataccagacaaacaagacaaccggcaacaccgataagagagccttcgtcgagacctggcagtccttttaccggaagaagcttaaggaggtgtggaaacctgccgtgcggtctggcggatctggcggaggctccagccaggagcccgtgaccttcgaggacgtggccgtgtacttcacccagaaccagtgggccagcctggaccccatgcagagggccctgtacctggaggtgatgctggagaactacgccaacatcaccagcctggccgccctgcccttccccaagcccgacctgatcctgcagctggagcagggcgaggccccctggggcctggacccctggacccccctggacggcgaggccctgggcggcgtgggcggcccaagcagcggcgcccctcctcccagcggcggcagcccagccggctccccaacctctaccgaggagggcacctctgagtccgccacccccgagagcggccctggcacctccaccgagcccagcgagggcagcgcacccggcagccctgccggcagccccacctccacagaggagggaaccagcaccgagcccagcgaaggcagcgccccaggcaccagcaccgagcctagtgagcaggagattaaacggatcaacaagatcagaagaagacttgtgaaagacagcaacaccaagaaggccggcaagacaggccccatgaaaaccctgctggttagagtgatgacacccgatctgagagagcggctggaaaacctgagaaagaagcctgaaaatatcccccagcccatcagcaatacatctagagccaacctgaataagctgctgaccgattacaccgaaatgaagaaggcgatcctgcatgtgtactgggaagagttccagaaggaccctgtgggcctgatgagccgggtggcccagcctgccagcaagaagatcgatcagaacaagctgaaacctgagatggacgagaagggcaacctgaccaccgccggctttgcctgctctcagtgtggccagcccctgttcgtgtacaagctggagcaggtgtctgagaagggcaaggcttacaccaactacttcggacggtgcaatgtggccgagcacgaaaagctgatcctgctggcccagctgaagcccgagaaggatagcgacgaagccgtgacatatagcctgggaaagtttgggcagagggccctggatttctacagcattcatgtgaccaaggagtccacccaccccgtgaagcccctggcccagatcgccggaaacagatacgcctccggacctgtgggaaaggccctgagcgacgcatgtatgggcacaatcgcctccttcctgtctaagtaccaggacatcatcatcgaacaccagaaggtggtgaagggcaaccagaagagactggagagcctgcgggagctggccggcaaggaaaacctggaataccctagcgtgaccctgccacctcagcctcacaccaaggagggcgttgatgcctacaacgaagtgatcgcccgggtgcgaatgtgggtgaacctgaacctgtggcagaagctgaagctaagcagagatgatgccaagcctctgctgagactgaagggattcccttcctttcctctggtcgagagacaggccaacgaagtggactggtgggacatggtgtgtaacgtgaagaagctgatcaacgagaaaaaggaggatggcaaggtgttttggcagaatctggctggctacaagagacaggaagccctgagaccatacctgagcagcgaggaagatcggaagaagggaaagaaattcgctcggtaccagctgggcgacctgctgctgcacctggaaaagaagcacggcgaggactggggaaaggtgtacgacgaggcctgggagcggattgacaagaaagtggaaggcctgagcaagcacatcaagctggaagaggaacggagaagcgaggacgcccagagcaaggccgccctgaccgactggctgcgggctaaggccagcttcgtgatcgagggcctgaaggaggccgacaaggacgagttctgcagatgcgagctgaagctgcagaagtggtacggggacctgcggggaaagcccttcgccatcgaagccgagaacagcatcctggacatcagcggcttcagcaagcagtacaactgtgccttcatctggcagaaggacggcgtgaagaagctgaacctgtacctgatcatcaactacttcaagggcggcaagctgcggttcaagaagatcaaacctgaagccttcgaagccaacagattctacaccgtgatcaacaaaaagagcggcgagatcgtgcccatggaggtgaacttcaacttcgacgaccccaacctgatcatcctgcctctggcctttggcaagagacagggcagagaattcatctggaacgacctgctgtccctggaaaccggcagcctgaagctggccaacggaagagtgatcgagaagacactgtacaacagaagaacccggcaggatgagcctgccctgttcgtggccctgaccttcgagcggcgggaggtcctggactcctccaatatcaaaccaatgaacctgatcggcgtggcaagaggcgaaaacatccccgccgtgatcgccctgaccgaccccgagggctgcccactgagccggtttaaggatagcctgggaaacccaacccacatcctgagaatcggcgagagctataaggagaagcagcggaccatccaggccaagaaggaggtggagcagcggagagccggcggctacagccggaagtacgccagcaaagccaagaatctggcagacgatatggtgagaaacaccgctagagatctgctgtactacgccgtgacccaggatgccatgctgatcttcgccaacctgagccggggcttcggccggcagggcaagcggaccttcatggccgagagacagtacacacggatggaggactggctgaccgccaagctggcctacgagggcctgagcaagacctacctgtccaagacactggcccagtacacctccaagacatgcagcaactgtgggtttaccatcaccagcgccgactacgacagggtgctggagaagctgaagaagacagcaacaggctggatgaccacaattaacggcaaggagctgaaggtggagggccagattacctactacaacagatacaagagacagaacgtagtcaaggacctgtccgtcgagctggatagactgagcgaagaatctgtgaacaacgacatctcctcctggacaaagggcagaagcggagaagctctgagcctcctgaagaaaagattctcccatagacccgtgcaggagaagttcgtgtgcctgaactgcggcttcgagacacacgcagccgagcaagccgccctgaacatcgccagatcctggctgttcctgcggagccaggagtacaagaaataccagacaaacaagacaaccggcaacaccgataagagagccttcgtcgagacctggcagtccttttaccggaagaagcttaaggaggtgtggaaacctgccgtgcggtctggcggatctggcggaggctcctagccaggagcccgtgaccttcgaggacgtggccgtgtacttcacccagaaccagtgggccagcctggaccccatgcagagggccctgtacctggaggtgatgctggagaactacgccaacatcaccagcctggccgccctgcccttccccaagcccgacctgatcctgcagctggagcagggcgaggccccctggggcctggacccctggacccccctggacggcgaggccctgggcggcgtgggatctggctccggcagcggccccaagaaaaagagaaaagtctaagctgccttctgcggggcttgccttctggccatgcccttcttctctcccttgcacctgtacctcttggtctttgaataaagcctgagtaggaaggctagcaaaaaaaaaaaaaaaaaaaaaaaaaaaaaaaaaaaaaaaaaaaaaaaaaaaaaaaaaaaaaaaaaaaaaaaaaaaaaaaa

SEQ ID NO: 15513 - RNA, 9485 nt, synthetic construct
  source 1..9485: mol_type = other RNA
aggaaataagagagaaaagaagagtaagaagaaatataagagccaccatggcccctaagaagaagcgtaaagtgagccggatggaacgcctcgtctacgaggtgcggcagaagtgcagaaacatcgaggacatctgcatctcctgcggatctctgaacgtgaccctggagcacccactgttcatcggcggcatgtgccagaactgtaaaaactgttttctggagtgtgcctatcaatacgacgatgacggctaccagagctactgcaccatctgttgcggcggaagagaggtgctgatgtgtggaaataacaactgctgccggtgcttctgcgtggaatgcgtggacctgctggtgggccccggcgccgcccaggccgctattaaggaagatccttggaactgctacatgtgcggccacaagggcacatacggcctgctgagacggagagaggactggcctagcagactgcagatgttcttcgccaataaccacgaccaggagttcgacccccctaaggtgtaccctcccgtccccgccgagaagagaaagcccatccgggtcctgagcctgttcgatggcatcgccaccggtctgctggtgctgaaggacctgggcatccaggtggataggtacattgcctccgaggtgtgcgaggactccatcaccgtgggaatggtgcgtcatcagggcaagatcatgtacgtgggcgacgtgcggagcgtgacacagaagcatatccaggagtggggccctttcgacctggtgatcggcggcagcccttgcaatgacctgagcatcgtgaacccagcccggaagggcctgtacgagggaaccggcagactgttcttcgagttttacagactgctgcacgacgcccggcctaaggaaggcgacgaccggcccttcttttggctgttcgagaatgtggtggccatgggagtcagcgacaagcgggatattagccggttcctggagagcaaccccgtgatgatcgatgccaaggaagtgagcgccgcccaccgggccagatacttctggggcaatctgcctggcatgaacagacccctggccagcaccgtgaacgacaagctggagctgcaggagtgcctggagcacggccggatcgccaagttcagcaaggtgagaaccatcaccacccgaagcaacagcatcaaacaaggcaaggaccagcactttcctgtgttcatgaacgagaaggaggacatcctgtggtgtaccgagatggagagagtgttcgggttcccagtccactacacagatgtcagcaacatgtctagactggccagacagagactgctgggaagaagctggtccgtccctgtgatcagacacctgttcgcccctctgaaggagtacttcgcctgcgtgagcagcggcaacagcaacgccaacagccggggccccagcttctctagcggcctggtgccactgtccctgagagggagccacatgggccccatggagatctacaaaaccgtgagcgcctggaagcggcagcctgtgcgcgtgctgagcctgtttcggaatatcgataaagtcctgaaaagcctgggattcctggagagcggctctggctccggcggtggcaccctgaagtacgtggaggatgtgacaaacgtggtcagacgggatgtggagaagtggggccccttcgatctggtgtacggcagcacccaacccctgggcagctcttgtgaccggtgccctggctggtacatgtttcagttccaccggatcctgcagtacgccctgccgagacaggagtcccagcggccattcttttggattttcatggacaacttgctgctgaccgaggatgaccaggaaactaccactcggttcctgcagaccgaagccgtgaccctgcaggacgtgagaggccgggactaccagaacgccatgcgggtgtggtccaacatccctggactgaaaagcaagcacgcacctctgacccctaaagaagaggagtacctgcaggcccaggtgcggagcagaagcaagctggacgcccctaaggtggatctgctggtgaagaattgcctcctgcccctgagagagtacttcaagtatttcagccagaatagtctgcccctgggaggcagcggcggcggcgccctggtgacatttgaggacgtcgccgtgcggttcacccaggaggaatgggctctgctggatccttctcagaaaatcctgtaccgggacgtgatgagagagacataccggaatctgacctccgtgggcatcaactgggaatgttgggaccttgaagcctgcttcagaagcctgggaagaaacctgagagtgcaggtggtgaagagaaagtgcgagctgaccaacagcggcccctgcgccgagggcggcccaagcagcggcgcccctcctcccagcggcggcagcccagccggctccccaacctctaccgaggagggcacctctgagtccgccacccccgagagcggccctggcacctccaccgagcccagcgagggcagcgcacccggcagccctgccggcagccccacctccacagaggagggaaccagcaccgagcccagcgaaggcagcgccccaggcaccagcaccgagcctagtgagcaggagattaaacggatcaacaagatcagaagaagacttgtgaaagacagcaacaccaagaaggccggcaagacaggccccatgaaaaccctgctggttagagtgatgacacccgatctgagagagcggctggaaaacctgagaaagaagcctgaaaatatcccccagcccatcagcaatacatctagagccaacctgaataagctgctgaccgattacaccgaaatgaagaaggcgatcctgcatgtgtactgggaagagttccagaaggaccctgtgggcctgatgagccgggtggcccagcctgccagcaagaagatcgatcagaacaagctgaaacctgagatggacgagaagggcaacctgaccaccgccggctttgcctgctctcagtgtggccagcccctgttcgtgtacaagctggagcaggtgtctgagaagggcaaggcttacaccaactacttcggacggtgcaatgtggccgagcacgaaaagctgatcctgctggcccagctgaagcccgagaaggatagcgacgaagccgtgacatatagcctgggaaagtttgggcagagggccctggatttctacagcattcatgtgaccaaggagtccacccaccccgtgaagcccctggcccagatcgccggaaacagatacgcctccggacctgtgggaaaggccctgagcgacgcatgtatgggcacaatcgcctccttcctgtctaagtaccaggacatcatcatcgaacaccagaaggtggtgaagggcaaccagaagagactggagagcctgcgggagctggccggcaaggaaaacctggaataccctagcgtgaccctgccacctcagcctcacaccaaggagggcgttgatgcctacaacgaagtgatcgcccgggtgcgaatgtgggtgaacctgaacctgtggcagaagctgaagctaagcagagatgatgccaagcctctgctgagactgaagggattcccttcctttcctctggtcgagagacaggccaacgaagtggactggtgggacatggtgtgtaacgtgaagaagctgatcaacgagaaaaaggaggatggcaaggtgttttggcagaatctggctggctacaagagacaggaagccctgagaccatacctgagcagcgaggaagatcggaagaagggaaagaaattcgctcggtaccagctgggcgacctgctgctgcacctggaaaagaagcacggcgaggactggggaaaggtgtacgacgaggcctgggagcggattgacaagaaagtggaaggcctgagcaagcacatcaagctggaagaggaacggagaagcgaggacgcccagagcaaggccgccctgaccgactggctgcgggctaaggccagcttcgtgatcgagggcctgaaggaggccgacaaggacgagttctgcagatgcgagctgaagctgcagaagtggtacggggacctgcggggaaagcccttcgccatcgaagccgagaacagcatcctggacatcagcggcttcagcaagcagtacaactgtgccttcatctggcagaaggacggcgtgaagaagctgaacctgtacctgatcatcaactacttcaagggcggcaagctgcggttcaagaagatcaaacctgaagccttcgaagccaacagattctacaccgtgatcaacaaaaagagcggcgagatcgtgcccatggaggtgaacttcaacttcgacgaccccaacctgatcatcctgcctctggcctttggcaagagacagggcagagaattcatctggaacgacctgctgtccctggaaaccggcagcctgaagctggccaacggaagagtgatcgagaagacactgtacaacagaagaacccggcaggatgagcctgccctgttcgtggccctgaccttcgagcggcgggaggtcctggactcctccaatatcaaaccaatgaacctgatcggcgtggcaagaggcgaaaacatccccgccgtgatcgccctgaccgaccccgagggctgcccactgagccggtttaaggatagcctgggaaacccaacccacatcctgagaatcggcgagagctataaggagaagcagcggaccatccaggccaagaaggaggtggagcagcggagagccggcggctacagccggaagtacgccagcaaagccaagaatctggcagacgatatggtgagaaacaccgctagagatctgctgtactacgccgtgacccaggatgccatgctgatcttcgccaacctgagccggggcttcggccggcagggcaagcggaccttcatggccgagagacagtacacacggatggaggactggctgaccgccaagctggcctacgagggcctgagcaagacctacctgtccaagacactggcccagtacacctccaagacatgcagcaactgtgggtttaccatcaccagcgccgactacgacagggtgctggagaagctgaagaagacagcaacaggctggatgaccacaattaacggcaaggagctgaaggtggagggccagattacctactacaacagatacaagagacagaacgtagtcaaggacctgtccgtcgagctggatagactgagcgaagaatctgtgaacaacgacatctcctcctggacaaagggcagaagcggagaagctctgagcctcctgaagaaaagattctcccatagacccgtgcaggagaagttcgtgtgcctgaactgcggcttcgagacacacgcagccgagcaagccgccctgaacatcgccagatcctggctgttcctgcggagccaggagtacaagaaataccagacaaacaagacaaccggcaacaccgataagagagccttcgtcgagacctggcagtccttttaccggaagaagcttaaggaggtgtggaaacctgccgtgcggtctggcggatctggcggaggctccaggcccagggccgtgaagttcgccgacgtggccgtgtacttcagccccgaggagtggggctgcctgaggcccgcccagagggccctgtacagggacgtgatgagggagacctacggccacctgggcgccctgggcttccccggccccaagcccgccctgatcagctggatggagcaggagagcgaggcctggagccccgacgcccaggaccccgaggagggcgagagcctgggcggcgccctgggcggcccaagcagcggcgcccctcctcccagcggcggcagcccagccggctccccaacctctaccgaggagggcacctctgagtccgccacccccgagagcggccctggcacctccaccgagcccagcgagggcagcgcacccggcagccctgccggcagccccacctccacagaggagggaaccagcaccgagcccagcgaaggcagcgccccaggcaccagcaccgagcctagtgagcaggagattaaacggatcaacaagatcagaagaagacttgtgaaagacagcaacaccaagaaggccggcaagacaggccccatgaaaaccctgctggttagagtgatgacacccgatctgagagagcggctggaaaacctgagaaagaagcctgaaaatatcccccagcccatcagcaatacatctagagccaacctgaataagctgctgaccgattacaccgaaatgaagaaggcgatcctgcatgtgtactgggaagagttccagaaggaccctgtgggcctgatgagccgggtggcccagcctgccagcaagaagatcgatcagaacaagctgaaacctgagatggacgagaagggcaacctgaccaccgccggctttgcctgctctcagtgtggccagcccctgttcgtgtacaagctggagcaggtgtctgagaagggcaaggcttacaccaactacttcggacggtgcaatgtggccgagcacgaaaagctgatcctgctggcccagctgaagcccgagaaggatagcgacgaagccgtgacatatagcctgggaaagtttgggcagagggccctggatttctacagcattcatgtgaccaaggagtccacccaccccgtgaagcccctggcccagatcgccggaaacagatacgcctccggacctgtgggaaaggccctgagcgacgcatgtatgggcacaatcgcctccttcctgtctaagtaccaggacatcatcatcgaacaccagaaggtggtgaagggcaaccagaagagactggagagcctgcgggagctggccggcaaggaaaacctggaataccctagcgtgaccctgccacctcagcctcacaccaaggagggcgttgatgcctacaacgaagtgatcgcccgggtgcgaatgtgggtgaacctgaacctgtggcagaagctgaagctaagcagagatgatgccaagcctctgctgagactgaagggattcccttcctttcctctggtcgagagacaggccaacgaagtggactggtgggacatggtgtgtaacgtgaagaagctgatcaacgagaaaaaggaggatggcaaggtgttttggcagaatctggctggctacaagagacaggaagccctgagaccatacctgagcagcgaggaagatcggaagaagggaaagaaattcgctcggtaccagctgggcgacctgctgctgcacctggaaaagaagcacggcgaggactggggaaaggtgtacgacgaggcctgggagcggattgacaagaaagtggaaggcctgagcaagcacatcaagctggaagaggaacggagaagcgaggacgcccagagcaaggccgccctgaccgactggctgcgggctaaggccagcttcgtgatcgagggcctgaaggaggccgacaaggacgagttctgcagatgcgagctgaagctgcagaagtggtacggggacctgcggggaaagcccttcgccatcgaagccgagaacagcatcctggacatcagcggcttcagcaagcagtacaactgtgccttcatctggcagaaggacggcgtgaagaagctgaacctgtacctgatcatcaactacttcaagggcggcaagctgcggttcaagaagatcaaacctgaagccttcgaagccaacagattctacaccgtgatcaacaaaaagagcggcgagatcgtgcccatggaggtgaacttcaacttcgacgaccccaacctgatcatcctgcctctggcctttggcaagagacagggcagagaattcatctggaacgacctgctgtccctggaaaccggcagcctgaagctggccaacggaagagtgatcgagaagacactgtacaacagaagaacccggcaggatgagcctgccctgttcgtggccctgaccttcgagcggcgggaggtcctggactcctccaatatcaaaccaatgaacctgatcggcgtggcaagaggcgaaaacatccccgccgtgatcgccctgaccgaccccgagggctgcccactgagccggtttaaggatagcctgggaaacccaacccacatcctgagaatcggcgagagctataaggagaagcagcggaccatccaggccaagaaggaggtggagcagcggagagccggcggctacagccggaagtacgccagcaaagccaagaatctggcagacgatatggtgagaaacaccgctagagatctgctgtactacgccgtgacccaggatgccatgctgatcttcgccaacctgagccggggcttcggccggcagggcaagcggaccttcatggccgagagacagtacacacggatggaggactggctgaccgccaagctggcctacgagggcctgagcaagacctacctgtccaagacactggcccagtacacctccaagacatgcagcaactgtgggtttaccatcaccagcgccgactacgacagggtgctggagaagctgaagaagacagcaacaggctggatgaccacaattaacggcaaggagctgaaggtggagggccagattacctactacaacagatacaagagacagaacgtagtcaaggacctgtccgtcgagctggatagactgagcgaagaatctgtgaacaacgacatctcctcctggacaaagggcagaagcggagaagctctgagcctcctgaagaaaagattctcccatagacccgtgcaggagaagttcgtgtgcctgaactgcggcttcgagacacacgcagccgagcaagccgccctgaacatcgccagatcctggctgttcctgcggagccaggagtacaagaaataccagacaaacaagacaaccggcaacaccgataagagagccttcgtcgagacctggcagtccttttaccggaagaagcttaaggaggtgtggaaacctgccgtgcggtctggcggatctggcggaggctcctaggcccagggccgtgaagttcgccgacgtggccgtgtacttcagccccgaggagtggggctgcctgaggcccgcccagagggccctgtacagggacgtgatgagggagacctacggccacctgggcgccctgggcttccccggccccaagcccgccctgatcagctggatggagcaggagagcgaggcctggagccccgacgcccaggaccccgaggagggcgagagcctgggcggcgccctgggatctggctccggcagcggccccaagaaaaagagaaaagtctaagctgccttctgcggggcttgccttctggccatgcccttcttctctcccttgcacctgtacctcttggtctttgaataaagcctgagtaggaaggctagcaaaaaaaaaaaaaaaaaaaaaaaaaaaaaaaaaaaaaaaaaaaaaaaaaaaaaaaaaaaaaaaaaaaaaaaaaaaaaaaa

SEQ ID NO: 15514 - RNA, 9485 nt, synthetic construct
  source 1..9485: mol_type = other RNA
aggaaataagagagaaaagaagagtaagaagaaatataagagccaccatggcccctaagaagaagcgtaaagtgagccggatggaacgcctcgtctacgaggtgcggcagaagtgcagaaacatcgaggacatctgcatctcctgcggatctctgaacgtgaccctggagcacccactgttcatcggcggcatgtgccagaactgtaaaaactgttttctggagtgtgcctatcaatacgacgatgacggctaccagagctactgcaccatctgttgcggcggaagagaggtgctgatgtgtggaaataacaactgctgccggtgcttctgcgtggaatgcgtggacctgctggtgggccccggcgccgcccaggccgctattaaggaagatccttggaactgctacatgtgcggccacaagggcacatacggcctgctgagacggagagaggactggcctagcagactgcagatgttcttcgccaataaccacgaccaggagttcgacccccctaaggtgtaccctcccgtccccgccgagaagagaaagcccatccgggtcctgagcctgttcgatggcatcgccaccggtctgctggtgctgaaggacctgggcatccaggtggataggtacattgcctccgaggtgtgcgaggactccatcaccgtgggaatggtgcgtcatcagggcaagatcatgtacgtgggcgacgtgcggagcgtgacacagaagcatatccaggagtggggccctttcgacctggtgatcggcggcagcccttgcaatgacctgagcatcgtgaacccagcccggaagggcctgtacgagggaaccggcagactgttcttcgagttttacagactgctgcacgacgcccggcctaaggaaggcgacgaccggcccttcttttggctgttcgagaatgtggtggccatgggagtcagcgacaagcgggatattagccggttcctggagagcaaccccgtgatgatcgatgccaaggaagtgagcgccgcccaccgggccagatacttctggggcaatctgcctggcatgaacagacccctggccagcaccgtgaacgacaagctggagctgcaggagtgcctggagcacggccggatcgccaagttcagcaaggtgagaaccatcaccacccgaagcaacagcatcaaacaaggcaaggaccagcactttcctgtgttcatgaacgagaaggaggacatcctgtggtgtaccgagatggagagagtgttcgggttcccagtccactacacagatgtcagcaacatgtctagactggccagacagagactgctgggaagaagctggtccgtccctgtgatcagacacctgttcgcccctctgaaggagtacttcgcctgcgtgagcagcggcaacagcaacgccaacagccggggccccagcttctctagcggcctggtgccactgtccctgagagggagccacatgggccccatggagatctacaaaaccgtgagcgcctggaagcggcagcctgtgcgcgtgctgagcctgtttcggaatatcgataaagtcctgaaaagcctgggattcctggagagcggctctggctccggcggtggcaccctgaagtacgtggaggatgtgacaaacgtggtcagacgggatgtggagaagtggggccccttcgatctggtgtacggcagcacccaacccctgggcagctcttgtgaccggtgccctggctggtacatgtttcagttccaccggatcctgcagtacgccctgccgagacaggagtcccagcggccattcttttggattttcatggacaacttgctgctgaccgaggatgaccaggaaactaccactcggttcctgcagaccgaagccgtgaccctgcaggacgtgagaggccgggactaccagaacgccatgcgggtgtggtccaacatccctggactgaaaagcaagcacgcacctctgacccctaaagaagaggagtacctgcaggcccaggtgcggagcagaagcaagctggacgcccctaaggtggatctgctggtgaagaattgcctcctgcccctgagagagtacttcaagtatttcagccagaatagtctgcccctgggaggcagcggcggcggcgccctggtgacatttgaggacgtcgccgtgcggttcacccaggaggaatgggctctgctggatccttctcagaaaatcctgtaccgggacgtgatgagagagacataccggaatctgacctccgtgggcatcaactgggaatgttgggaccttgaagcctgcttcagaagcctgggaagaaacctgagagtgcaggtggtgaagagaaagtgcgagctgaccaacagcggcccctgcgccgagggcggcccaagcagcggcgcccctcctcccagcggcggcagcccagccggctccccaacctctaccgaggagggcacctctgagtccgccacccccgagagcggccctggcacctccaccgagcccagcgagggcagcgcacccggcagccctgccggcagccccacctccacagaggagggaaccagcaccgagcccagcgaaggcagcgccccaggcaccagcaccgagcctagtgagcaggagattaaacggatcaacaagatcagaagaagacttgtgaaagacagcaacaccaagaaggccggcaagacaggccccatgaaaaccctgctggttagagtgatgacacccgatctgagagagcggctggaaaacctgagaaagaagcctgaaaatatcccccagcccatcagcaatacatctagagccaacctgaataagctgctgaccgattacaccgaaatgaagaaggcgatcctgcatgtgtactgggaagagttccagaaggaccctgtgggcctgatgagccgggtggcccagcctgccagcaagaagatcgatcagaacaagctgaaacctgagatggacgagaagggcaacctgaccaccgccggctttgcctgctctcagtgtggccagcccctgttcgtgtacaagctggagcaggtgtctgagaagggcaaggcttacaccaactacttcggacggtgcaatgtggccgagcacgaaaagctgatcctgctggcccagctgaagcccgagaaggatagcgacgaagccgtgacatatagcctgggaaagtttgggcagagggccctggatttctacagcattcatgtgaccaaggagtccacccaccccgtgaagcccctggcccagatcgccggaaacagatacgcctccggacctgtgggaaaggccctgagcgacgcatgtatgggcacaatcgcctccttcctgtctaagtaccaggacatcatcatcgaacaccagaaggtggtgaagggcaaccagaagagactggagagcctgcgggagctggccggcaaggaaaacctggaataccctagcgtgaccctgccacctcagcctcacaccaaggagggcgttgatgcctacaacgaagtgatcgcccgggtgcgaatgtgggtgaacctgaacctgtggcagaagctgaagctaagcagagatgatgccaagcctctgctgagactgaagggattcccttcctttcctctggtcgagagacaggccaacgaagtggactggtgggacatggtgtgtaacgtgaagaagctgatcaacgagaaaaaggaggatggcaaggtgttttggcagaatctggctggctacaagagacaggaagccctgagaccatacctgagcagcgaggaagatcggaagaagggaaagaaattcgctcggtaccagctgggcgacctgctgctgcacctggaaaagaagcacggcgaggactggggaaaggtgtacgacgaggcctgggagcggattgacaagaaagtggaaggcctgagcaagcacatcaagctggaagaggaacggagaagcgaggacgcccagagcaaggccgccctgaccgactggctgcgggctaaggccagcttcgtgatcgagggcctgaaggaggccgacaaggacgagttctgcagatgcgagctgaagctgcagaagtggtacggggacctgcggggaaagcccttcgccatcgaagccgagaacagcatcctggacatcagcggcttcagcaagcagtacaactgtgccttcatctggcagaaggacggcgtgaagaagctgaacctgtacctgatcatcaactacttcaagggcggcaagctgcggttcaagaagatcaaacctgaagccttcgaagccaacagattctacaccgtgatcaacaaaaagagcggcgagatcgtgcccatggaggtgaacttcaacttcgacgaccccaacctgatcatcctgcctctggcctttggcaagagacagggcagagaattcatctggaacgacctgctgtccctggaaaccggcagcctgaagctggccaacggaagagtgatcgagaagacactgtacaacagaagaacccggcaggatgagcctgccctgttcgtggccctgaccttcgagcggcgggaggtcctggactcctccaatatcaaaccaatgaacctgatcggcgtggcaagaggcgaaaacatccccgccgtgatcgccctgaccgaccccgagggctgcccactgagccggtttaaggatagcctgggaaacccaacccacatcctgagaatcggcgagagctataaggagaagcagcggaccatccaggccaagaaggaggtggagcagcggagagccggcggctacagccggaagtacgccagcaaagccaagaatctggcagacgatatggtgagaaacaccgctagagatctgctgtactacgccgtgacccaggatgccatgctgatcttcgccaacctgagccggggcttcggccggcagggcaagcggaccttcatggccgagagacagtacacacggatggaggactggctgaccgccaagctggcctacgagggcctgagcaagacctacctgtccaagacactggcccagtacacctccaagacatgcagcaactgtgggtttaccatcaccagcgccgactacgacagggtgctggagaagctgaagaagacagcaacaggctggatgaccacaattaacggcaaggagctgaaggtggagggccagattacctactacaacagatacaagagacagaacgtagtcaaggacctgtccgtcgagctggatagactgagcgaagaatctgtgaacaacgacatctcctcctggacaaagggcagaagcggagaagctctgagcctcctgaagaaaagattctcccatagacccgtgcaggagaagttcgtgtgcctgaactgcggcttcgagacacacgcagccgagcaagccgccctgaacatcgccagatcctggctgttcctgcggagccaggagtacaagaaataccagacaaacaagacaaccggcaacaccgataagagagccttcgtcgagacctggcagtccttttaccggaagaagcttaaggaggtgtggaaacctgccgtgcggtctggcggatctggcggaggctcccagcccgacctggtgaccttcggcgacgtggccgtggacttcagccaggaggagtgggagtggctgaaccccgcccagaggagcctgtacaggaccgtgatgctggacaactacaggagcctggtgagcctgggcgtgagcgccagcaagcccgacgtgatcagcctgctggagcagggcaaggagccctggctggtgaaggaggagggccccaggggcgccaggcccgacagcagccccaccggcggcccaagcagcggcgcccctcctcccagcggcggcagcccagccggctccccaacctctaccgaggagggcacctctgagtccgccacccccgagagcggccctggcacctccaccgagcccagcgagggcagcgcacccggcagccctgccggcagccccacctccacagaggagggaaccagcaccgagcccagcgaaggcagcgccccaggcaccagcaccgagcctagtgagcaggagattaaacggatcaacaagatcagaagaagacttgtgaaagacagcaacaccaagaaggccggcaagacaggccccatgaaaaccctgctggttagagtgatgacacccgatctgagagagcggctggaaaacctgagaaagaagcctgaaaatatcccccagcccatcagcaatacatctagagccaacctgaataagctgctgaccgattacaccgaaatgaagaaggcgatcctgcatgtgtactgggaagagttccagaaggaccctgtgggcctgatgagccgggtggcccagcctgccagcaagaagatcgatcagaacaagctgaaacctgagatggacgagaagggcaacctgaccaccgccggctttgcctgctctcagtgtggccagcccctgttcgtgtacaagctggagcaggtgtctgagaagggcaaggcttacaccaactacttcggacggtgcaatgtggccgagcacgaaaagctgatcctgctggcccagctgaagcccgagaaggatagcgacgaagccgtgacatatagcctgggaaagtttgggcagagggccctggatttctacagcattcatgtgaccaaggagtccacccaccccgtgaagcccctggcccagatcgccggaaacagatacgcctccggacctgtgggaaaggccctgagcgacgcatgtatgggcacaatcgcctccttcctgtctaagtaccaggacatcatcatcgaacaccagaaggtggtgaagggcaaccagaagagactggagagcctgcgggagctggccggcaaggaaaacctggaataccctagcgtgaccctgccacctcagcctcacaccaaggagggcgttgatgcctacaacgaagtgatcgcccgggtgcgaatgtgggtgaacctgaacctgtggcagaagctgaagctaagcagagatgatgccaagcctctgctgagactgaagggattcccttcctttcctctggtcgagagacaggccaacgaagtggactggtgggacatggtgtgtaacgtgaagaagctgatcaacgagaaaaaggaggatggcaaggtgttttggcagaatctggctggctacaagagacaggaagccctgagaccatacctgagcagcgaggaagatcggaagaagggaaagaaattcgctcggtaccagctgggcgacctgctgctgcacctggaaaagaagcacggcgaggactggggaaaggtgtacgacgaggcctgggagcggattgacaagaaagtggaaggcctgagcaagcacatcaagctggaagaggaacggagaagcgaggacgcccagagcaaggccgccctgaccgactggctgcgggctaaggccagcttcgtgatcgagggcctgaaggaggccgacaaggacgagttctgcagatgcgagctgaagctgcagaagtggtacggggacctgcggggaaagcccttcgccatcgaagccgagaacagcatcctggacatcagcggcttcagcaagcagtacaactgtgccttcatctggcagaaggacggcgtgaagaagctgaacctgtacctgatcatcaactacttcaagggcggcaagctgcggttcaagaagatcaaacctgaagccttcgaagccaacagattctacaccgtgatcaacaaaaagagcggcgagatcgtgcccatggaggtgaacttcaacttcgacgaccccaacctgatcatcctgcctctggcctttggcaagagacagggcagagaattcatctggaacgacctgctgtccctggaaaccggcagcctgaagctggccaacggaagagtgatcgagaagacactgtacaacagaagaacccggcaggatgagcctgccctgttcgtggccctgaccttcgagcggcgggaggtcctggactcctccaatatcaaaccaatgaacctgatcggcgtggcaagaggcgaaaacatccccgccgtgatcgccctgaccgaccccgagggctgcccactgagccggtttaaggatagcctgggaaacccaacccacatcctgagaatcggcgagagctataaggagaagcagcggaccatccaggccaagaaggaggtggagcagcggagagccggcggctacagccggaagtacgccagcaaagccaagaatctggcagacgatatggtgagaaacaccgctagagatctgctgtactacgccgtgacccaggatgccatgctgatcttcgccaacctgagccggggcttcggccggcagggcaagcggaccttcatggccgagagacagtacacacggatggaggactggctgaccgccaagctggcctacgagggcctgagcaagacctacctgtccaagacactggcccagtacacctccaagacatgcagcaactgtgggtttaccatcaccagcgccgactacgacagggtgctggagaagctgaagaagacagcaacaggctggatgaccacaattaacggcaaggagctgaaggtggagggccagattacctactacaacagatacaagagacagaacgtagtcaaggacctgtccgtcgagctggatagactgagcgaagaatctgtgaacaacgacatctcctcctggacaaagggcagaagcggagaagctctgagcctcctgaagaaaagattctcccatagacccgtgcaggagaagttcgtgtgcctgaactgcggcttcgagacacacgcagccgagcaagccgccctgaacatcgccagatcctggctgttcctgcggagccaggagtacaagaaataccagacaaacaagacaaccggcaacaccgataagagagccttcgtcgagacctggcagtccttttaccggaagaagcttaaggaggtgtggaaacctgccgtgcggtctggcggatctggcggaggctcctcagcccgacctggtgaccttcggcgacgtggccgtggacttcagccaggaggagtgggagtggctgaaccccgcccagaggagcctgtacaggaccgtgatgctggacaactacaggagcctggtgagcctgggcgtgagcgccagcaagcccgacgtgatcagcctgctggagcagggcaaggagccctggctggtgaaggaggagggccccaggggcgccaggcccgacagcagccccaccggatctggctccggcagcggccccaagaaaaagagaaaagtctaagctgccttctgcggggcttgccttctggccatgcccttcttctctcccttgcacctgtacctcttggtctttgaataaagcctgagtaggaaggctagcaaaaaaaaaaaaaaaaaaaaaaaaaaaaaaaaaaaaaaaaaaaaaaaaaaaaaaaaaaaaaaaaaaaaaaaaaaaaaaaa

SEQ ID NO: 15515 - RNA, 9485 nt, synthetic construct
  source 1..9485: mol_type = other RNA
aggaaataagagagaaaagaagagtaagaagaaatataagagccaccatggcccctaagaagaagcgtaaagtgagccggatggaacgcctcgtctacgaggtgcggcagaagtgcagaaacatcgaggacatctgcatctcctgcggatctctgaacgtgaccctggagcacccactgttcatcggcggcatgtgccagaactgtaaaaactgttttctggagtgtgcctatcaatacgacgatgacggctaccagagctactgcaccatctgttgcggcggaagagaggtgctgatgtgtggaaataacaactgctgccggtgcttctgcgtggaatgcgtggacctgctggtgggccccggcgccgcccaggccgctattaaggaagatccttggaactgctacatgtgcggccacaagggcacatacggcctgctgagacggagagaggactggcctagcagactgcagatgttcttcgccaataaccacgaccaggagttcgacccccctaaggtgtaccctcccgtccccgccgagaagagaaagcccatccgggtcctgagcctgttcgatggcatcgccaccggtctgctggtgctgaaggacctgggcatccaggtggataggtacattgcctccgaggtgtgcgaggactccatcaccgtgggaatggtgcgtcatcagggcaagatcatgtacgtgggcgacgtgcggagcgtgacacagaagcatatccaggagtggggccctttcgacctggtgatcggcggcagcccttgcaatgacctgagcatcgtgaacccagcccggaagggcctgtacgagggaaccggcagactgttcttcgagttttacagactgctgcacgacgcccggcctaaggaaggcgacgaccggcccttcttttggctgttcgagaatgtggtggccatgggagtcagcgacaagcgggatattagccggttcctggagagcaaccccgtgatgatcgatgccaaggaagtgagcgccgcccaccgggccagatacttctggggcaatctgcctggcatgaacagacccctggccagcaccgtgaacgacaagctggagctgcaggagtgcctggagcacggccggatcgccaagttcagcaaggtgagaaccatcaccacccgaagcaacagcatcaaacaaggcaaggaccagcactttcctgtgttcatgaacgagaaggaggacatcctgtggtgtaccgagatggagagagtgttcgggttcccagtccactacacagatgtcagcaacatgtctagactggccagacagagactgctgggaagaagctggtccgtccctgtgatcagacacctgttcgcccctctgaaggagtacttcgcctgcgtgagcagcggcaacagcaacgccaacagccggggccccagcttctctagcggcctggtgccactgtccctgagagggagccacatgggccccatggagatctacaaaaccgtgagcgcctggaagcggcagcctgtgcgcgtgctgagcctgtttcggaatatcgataaagtcctgaaaagcctgggattcctggagagcggctctggctccggcggtggcaccctgaagtacgtggaggatgtgacaaacgtggtcagacgggatgtggagaagtggggccccttcgatctggtgtacggcagcacccaacccctgggcagctcttgtgaccggtgccctggctggtacatgtttcagttccaccggatcctgcagtacgccctgccgagacaggagtcccagcggccattcttttggattttcatggacaacttgctgctgaccgaggatgaccaggaaactaccactcggttcctgcagaccgaagccgtgaccctgcaggacgtgagaggccgggactaccagaacgccatgcgggtgtggtccaacatccctggactgaaaagcaagcacgcacctctgacccctaaagaagaggagtacctgcaggcccaggtgcggagcagaagcaagctggacgcccctaaggtggatctgctggtgaagaattgcctcctgcccctgagagagtacttcaagtatttcagccagaatagtctgcccctgggaggcagcggcggcggcgccctggtgacatttgaggacgtcgccgtgcggttcacccaggaggaatgggctctgctggatccttctcagaaaatcctgtaccgggacgtgatgagagagacataccggaatctgacctccgtgggcatcaactgggaatgttgggaccttgaagcctgcttcagaagcctgggaagaaacctgagagtgcaggtggtgaagagaaagtgcgagctgaccaacagcggcccctgcgccgagggcggcccaagcagcggcgcccctcctcccagcggcggcagcccagccggctccccaacctctaccgaggagggcacctctgagtccgccacccccgagagcggccctggcacctccaccgagcccagcgagggcagcgcacccggcagccctgccggcagccccacctccacagaggagggaaccagcaccgagcccagcgaaggcagcgccccaggcaccagcaccgagcctagtgagcaggagattaaacggatcaacaagatcagaagaagacttgtgaaagacagcaacaccaagaaggccggcaagacaggccccatgaaaaccctgctggttagagtgatgacacccgatctgagagagcggctggaaaacctgagaaagaagcctgaaaatatcccccagcccatcagcaatacatctagagccaacctgaataagctgctgaccgattacaccgaaatgaagaaggcgatcctgcatgtgtactgggaagagttccagaaggaccctgtgggcctgatgagccgggtggcccagcctgccagcaagaagatcgatcagaacaagctgaaacctgagatggacgagaagggcaacctgaccaccgccggctttgcctgctctcagtgtggccagcccctgttcgtgtacaagctggagcaggtgtctgagaagggcaaggcttacaccaactacttcggacggtgcaatgtggccgagcacgaaaagctgatcctgctggcccagctgaagcccgagaaggatagcgacgaagccgtgacatatagcctgggaaagtttgggcagagggccctggatttctacagcattcatgtgaccaaggagtccacccaccccgtgaagcccctggcccagatcgccggaaacagatacgcctccggacctgtgggaaaggccctgagcgacgcatgtatgggcacaatcgcctccttcctgtctaagtaccaggacatcatcatcgaacaccagaaggtggtgaagggcaaccagaagagactggagagcctgcgggagctggccggcaaggaaaacctggaataccctagcgtgaccctgccacctcagcctcacaccaaggagggcgttgatgcctacaacgaagtgatcgcccgggtgcgaatgtgggtgaacctgaacctgtggcagaagctgaagctaagcagagatgatgccaagcctctgctgagactgaagggattcccttcctttcctctggtcgagagacaggccaacgaagtggactggtgggacatggtgtgtaacgtgaagaagctgatcaacgagaaaaaggaggatggcaaggtgttttggcagaatctggctggctacaagagacaggaagccctgagaccatacctgagcagcgaggaagatcggaagaagggaaagaaattcgctcggtaccagctgggcgacctgctgctgcacctggaaaagaagcacggcgaggactggggaaaggtgtacgacgaggcctgggagcggattgacaagaaagtggaaggcctgagcaagcacatcaagctggaagaggaacggagaagcgaggacgcccagagcaaggccgccctgaccgactggctgcgggctaaggccagcttcgtgatcgagggcctgaaggaggccgacaaggacgagttctgcagatgcgagctgaagctgcagaagtggtacggggacctgcggggaaagcccttcgccatcgaagccgagaacagcatcctggacatcagcggcttcagcaagcagtacaactgtgccttcatctggcagaaggacggcgtgaagaagctgaacctgtacctgatcatcaactacttcaagggcggcaagctgcggttcaagaagatcaaacctgaagccttcgaagccaacagattctacaccgtgatcaacaaaaagagcggcgagatcgtgcccatggaggtgaacttcaacttcgacgaccccaacctgatcatcctgcctctggcctttggcaagagacagggcagagaattcatctggaacgacctgctgtccctggaaaccggcagcctgaagctggccaacggaagagtgatcgagaagacactgtacaacagaagaacccggcaggatgagcctgccctgttcgtggccctgaccttcgagcggcgggaggtcctggactcctccaatatcaaaccaatgaacctgatcggcgtggcaagaggcgaaaacatccccgccgtgatcgccctgaccgaccccgagggctgcccactgagccggtttaaggatagcctgggaaacccaacccacatcctgagaatcggcgagagctataaggagaagcagcggaccatccaggccaagaaggaggtggagcagcggagagccggcggctacagccggaagtacgccagcaaagccaagaatctggcagacgatatggtgagaaacaccgctagagatctgctgtactacgccgtgacccaggatgccatgctgatcttcgccaacctgagccggggcttcggccggcagggcaagcggaccttcatggccgagagacagtacacacggatggaggactggctgaccgccaagctggcctacgagggcctgagcaagacctacctgtccaagacactggcccagtacacctccaagacatgcagcaactgtgggtttaccatcaccagcgccgactacgacagggtgctggagaagctgaagaagacagcaacaggctggatgaccacaattaacggcaaggagctgaaggtggagggccagattacctactacaacagatacaagagacagaacgtagtcaaggacctgtccgtcgagctggatagactgagcgaagaatctgtgaacaacgacatctcctcctggacaaagggcagaagcggagaagctctgagcctcctgaagaaaagattctcccatagacccgtgcaggagaagttcgtgtgcctgaactgcggcttcgagacacacgcagccgagcaagccgccctgaacatcgccagatcctggctgttcctgcggagccaggagtacaagaaataccagacaaacaagacaaccggcaacaccgataagagagccttcgtcgagacctggcagtccttttaccggaagaagcttaaggaggtgtggaaacctgccgtgcggtctggcggatctggcggaggctccagcaaggcccccgtgaccttcggcgacctggccgtgtacttcacccaggccgagtgggagtggctgagccccgtgcagaaggccctgtaccaggacgtgatgctggagaactaccaggtgctggtgagcctgggcctgtgcctgaggaggcccaacctgatcagcctgctggagaagggcaaggccccctgggtggccgagcccgtgaggaggaggaggggccccgacagcgccagcaagttcggcggcccaagcagcggcgcccctcctcccagcggcggcagcccagccggctccccaacctctaccgaggagggcacctctgagtccgccacccccgagagcggccctggcacctccaccgagcccagcgagggcagcgcacccggcagccctgccggcagccccacctccacagaggagggaaccagcaccgagcccagcgaaggcagcgccccaggcaccagcaccgagcctagtgagcaggagattaaacggatcaacaagatcagaagaagacttgtgaaagacagcaacaccaagaaggccggcaagacaggccccatgaaaaccctgctggttagagtgatgacacccgatctgagagagcggctggaaaacctgagaaagaagcctgaaaatatcccccagcccatcagcaatacatctagagccaacctgaataagctgctgaccgattacaccgaaatgaagaaggcgatcctgcatgtgtactgggaagagttccagaaggaccctgtgggcctgatgagccgggtggcccagcctgccagcaagaagatcgatcagaacaagctgaaacctgagatggacgagaagggcaacctgaccaccgccggctttgcctgctctcagtgtggccagcccctgttcgtgtacaagctggagcaggtgtctgagaagggcaaggcttacaccaactacttcggacggtgcaatgtggccgagcacgaaaagctgatcctgctggcccagctgaagcccgagaaggatagcgacgaagccgtgacatatagcctgggaaagtttgggcagagggccctggatttctacagcattcatgtgaccaaggagtccacccaccccgtgaagcccctggcccagatcgccggaaacagatacgcctccggacctgtgggaaaggccctgagcgacgcatgtatgggcacaatcgcctccttcctgtctaagtaccaggacatcatcatcgaacaccagaaggtggtgaagggcaaccagaagagactggagagcctgcgggagctggccggcaaggaaaacctggaataccctagcgtgaccctgccacctcagcctcacaccaaggagggcgttgatgcctacaacgaagtgatcgcccgggtgcgaatgtgggtgaacctgaacctgtggcagaagctgaagctaagcagagatgatgccaagcctctgctgagactgaagggattcccttcctttcctctggtcgagagacaggccaacgaagtggactggtgggacatggtgtgtaacgtgaagaagctgatcaacgagaaaaaggaggatggcaaggtgttttggcagaatctggctggctacaagagacaggaagccctgagaccatacctgagcagcgaggaagatcggaagaagggaaagaaattcgctcggtaccagctgggcgacctgctgctgcacctggaaaagaagcacggcgaggactggggaaaggtgtacgacgaggcctgggagcggattgacaagaaagtggaaggcctgagcaagcacatcaagctggaagaggaacggagaagcgaggacgcccagagcaaggccgccctgaccgactggctgcgggctaaggccagcttcgtgatcgagggcctgaaggaggccgacaaggacgagttctgcagatgcgagctgaagctgcagaagtggtacggggacctgcggggaaagcccttcgccatcgaagccgagaacagcatcctggacatcagcggcttcagcaagcagtacaactgtgccttcatctggcagaaggacggcgtgaagaagctgaacctgtacctgatcatcaactacttcaagggcggcaagctgcggttcaagaagatcaaacctgaagccttcgaagccaacagattctacaccgtgatcaacaaaaagagcggcgagatcgtgcccatggaggtgaacttcaacttcgacgaccccaacctgatcatcctgcctctggcctttggcaagagacagggcagagaattcatctggaacgacctgctgtccctggaaaccggcagcctgaagctggccaacggaagagtgatcgagaagacactgtacaacagaagaacccggcaggatgagcctgccctgttcgtggccctgaccttcgagcggcgggaggtcctggactcctccaatatcaaaccaatgaacctgatcggcgtggcaagaggcgaaaacatccccgccgtgatcgccctgaccgaccccgagggctgcccactgagccggtttaaggatagcctgggaaacccaacccacatcctgagaatcggcgagagctataaggagaagcagcggaccatccaggccaagaaggaggtggagcagcggagagccggcggctacagccggaagtacgccagcaaagccaagaatctggcagacgatatggtgagaaacaccgctagagatctgctgtactacgccgtgacccaggatgccatgctgatcttcgccaacctgagccggggcttcggccggcagggcaagcggaccttcatggccgagagacagtacacacggatggaggactggctgaccgccaagctggcctacgagggcctgagcaagacctacctgtccaagacactggcccagtacacctccaagacatgcagcaactgtgggtttaccatcaccagcgccgactacgacagggtgctggagaagctgaagaagacagcaacaggctggatgaccacaattaacggcaaggagctgaaggtggagggccagattacctactacaacagatacaagagacagaacgtagtcaaggacctgtccgtcgagctggatagactgagcgaagaatctgtgaacaacgacatctcctcctggacaaagggcagaagcggagaagctctgagcctcctgaagaaaagattctcccatagacccgtgcaggagaagttcgtgtgcctgaactgcggcttcgagacacacgcagccgagcaagccgccctgaacatcgccagatcctggctgttcctgcggagccaggagtacaagaaataccagacaaacaagacaaccggcaacaccgataagagagccttcgtcgagacctggcagtccttttaccggaagaagcttaaggaggtgtggaaacctgccgtgcggtctggcggatctggcggaggctcctagcaaggcccccgtgaccttcggcgacctggccgtgtacttcacccaggccgagtgggagtggctgagccccgtgcagaaggccctgtaccaggacgtgatgctggagaactaccaggtgctggtgagcctgggcctgtgcctgaggaggcccaacctgatcagcctgctggagaagggcaaggccccctgggtggccgagcccgtgaggaggaggaggggccccgacagcgccagcaagttcggatctggctccggcagcggccccaagaaaaagagaaaagtctaagctgccttctgcggggcttgccttctggccatgcccttcttctctcccttgcacctgtacctcttggtctttgaataaagcctgagtaggaaggctagcaaaaaaaaaaaaaaaaaaaaaaaaaaaaaaaaaaaaaaaaaaaaaaaaaaaaaaaaaaaaaaaaaaaaaaaaaaaaaaaa

SEQ ID NO: 15516 - RNA, 9485 nt, synthetic construct
  source 1..9485: mol_type = other RNA
aggaaataagagagaaaagaagagtaagaagaaatataagagccaccatggcccctaagaagaagcgtaaagtgagccggatggaacgcctcgtctacgaggtgcggcagaagtgcagaaacatcgaggacatctgcatctcctgcggatctctgaacgtgaccctggagcacccactgttcatcggcggcatgtgccagaactgtaaaaactgttttctggagtgtgcctatcaatacgacgatgacggctaccagagctactgcaccatctgttgcggcggaagagaggtgctgatgtgtggaaataacaactgctgccggtgcttctgcgtggaatgcgtggacctgctggtgggccccggcgccgcccaggccgctattaaggaagatccttggaactgctacatgtgcggccacaagggcacatacggcctgctgagacggagagaggactggcctagcagactgcagatgttcttcgccaataaccacgaccaggagttcgacccccctaaggtgtaccctcccgtccccgccgagaagagaaagcccatccgggtcctgagcctgttcgatggcatcgccaccggtctgctggtgctgaaggacctgggcatccaggtggataggtacattgcctccgaggtgtgcgaggactccatcaccgtgggaatggtgcgtcatcagggcaagatcatgtacgtgggcgacgtgcggagcgtgacacagaagcatatccaggagtggggccctttcgacctggtgatcggcggcagcccttgcaatgacctgagcatcgtgaacccagcccggaagggcctgtacgagggaaccggcagactgttcttcgagttttacagactgctgcacgacgcccggcctaaggaaggcgacgaccggcccttcttttggctgttcgagaatgtggtggccatgggagtcagcgacaagcgggatattagccggttcctggagagcaaccccgtgatgatcgatgccaaggaagtgagcgccgcccaccgggccagatacttctggggcaatctgcctggcatgaacagacccctggccagcaccgtgaacgacaagctggagctgcaggagtgcctggagcacggccggatcgccaagttcagcaaggtgagaaccatcaccacccgaagcaacagcatcaaacaaggcaaggaccagcactttcctgtgttcatgaacgagaaggaggacatcctgtggtgtaccgagatggagagagtgttcgggttcccagtccactacacagatgtcagcaacatgtctagactggccagacagagactgctgggaagaagctggtccgtccctgtgatcagacacctgttcgcccctctgaaggagtacttcgcctgcgtgagcagcggcaacagcaacgccaacagccggggccccagcttctctagcggcctggtgccactgtccctgagagggagccacatgggccccatggagatctacaaaaccgtgagcgcctggaagcggcagcctgtgcgcgtgctgagcctgtttcggaatatcgataaagtcctgaaaagcctgggattcctggagagcggctctggctccggcggtggcaccctgaagtacgtggaggatgtgacaaacgtggtcagacgggatgtggagaagtggggccccttcgatctggtgtacggcagcacccaacccctgggcagctcttgtgaccggtgccctggctggtacatgtttcagttccaccggatcctgcagtacgccctgccgagacaggagtcccagcggccattcttttggattttcatggacaacttgctgctgaccgaggatgaccaggaaactaccactcggttcctgcagaccgaagccgtgaccctgcaggacgtgagaggccgggactaccagaacgccatgcgggtgtggtccaacatccctggactgaaaagcaagcacgcacctctgacccctaaagaagaggagtacctgcaggcccaggtgcggagcagaagcaagctggacgcccctaaggtggatctgctggtgaagaattgcctcctgcccctgagagagtacttcaagtatttcagccagaatagtctgcccctgggaggcagcggcggcggcgccctggtgacatttgaggacgtcgccgtgcggttcacccaggaggaatgggctctgctggatccttctcagaaaatcctgtaccgggacgtgatgagagagacataccggaatctgacctccgtgggcatcaactgggaatgttgggaccttgaagcctgcttcagaagcctgggaagaaacctgagagtgcaggtggtgaagagaaagtgcgagctgaccaacagcggcccctgcgccgagggcggcccaagcagcggcgcccctcctcccagcggcggcagcccagccggctccccaacctctaccgaggagggcacctctgagtccgccacccccgagagcggccctggcacctccaccgagcccagcgagggcagcgcacccggcagccctgccggcagccccacctccacagaggagggaaccagcaccgagcccagcgaaggcagcgccccaggcaccagcaccgagcctagtgagcaggagattaaacggatcaacaagatcagaagaagacttgtgaaagacagcaacaccaagaaggccggcaagacaggccccatgaaaaccctgctggttagagtgatgacacccgatctgagagagcggctggaaaacctgagaaagaagcctgaaaatatcccccagcccatcagcaatacatctagagccaacctgaataagctgctgaccgattacaccgaaatgaagaaggcgatcctgcatgtgtactgggaagagttccagaaggaccctgtgggcctgatgagccgggtggcccagcctgccagcaagaagatcgatcagaacaagctgaaacctgagatggacgagaagggcaacctgaccaccgccggctttgcctgctctcagtgtggccagcccctgttcgtgtacaagctggagcaggtgtctgagaagggcaaggcttacaccaactacttcggacggtgcaatgtggccgagcacgaaaagctgatcctgctggcccagctgaagcccgagaaggatagcgacgaagccgtgacatatagcctgggaaagtttgggcagagggccctggatttctacagcattcatgtgaccaaggagtccacccaccccgtgaagcccctggcccagatcgccggaaacagatacgcctccggacctgtgggaaaggccctgagcgacgcatgtatgggcacaatcgcctccttcctgtctaagtaccaggacatcatcatcgaacaccagaaggtggtgaagggcaaccagaagagactggagagcctgcgggagctggccggcaaggaaaacctggaataccctagcgtgaccctgccacctcagcctcacaccaaggagggcgttgatgcctacaacgaagtgatcgcccgggtgcgaatgtgggtgaacctgaacctgtggcagaagctgaagctaagcagagatgatgccaagcctctgctgagactgaagggattcccttcctttcctctggtcgagagacaggccaacgaagtggactggtgggacatggtgtgtaacgtgaagaagctgatcaacgagaaaaaggaggatggcaaggtgttttggcagaatctggctggctacaagagacaggaagccctgagaccatacctgagcagcgaggaagatcggaagaagggaaagaaattcgctcggtaccagctgggcgacctgctgctgcacctggaaaagaagcacggcgaggactggggaaaggtgtacgacgaggcctgggagcggattgacaagaaagtggaaggcctgagcaagcacatcaagctggaagaggaacggagaagcgaggacgcccagagcaaggccgccctgaccgactggctgcgggctaaggccagcttcgtgatcgagggcctgaaggaggccgacaaggacgagttctgcagatgcgagctgaagctgcagaagtggtacggggacctgcggggaaagcccttcgccatcgaagccgagaacagcatcctggacatcagcggcttcagcaagcagtacaactgtgccttcatctggcagaaggacggcgtgaagaagctgaacctgtacctgatcatcaactacttcaagggcggcaagctgcggttcaagaagatcaaacctgaagccttcgaagccaacagattctacaccgtgatcaacaaaaagagcggcgagatcgtgcccatggaggtgaacttcaacttcgacgaccccaacctgatcatcctgcctctggcctttggcaagagacagggcagagaattcatctggaacgacctgctgtccctggaaaccggcagcctgaagctggccaacggaagagtgatcgagaagacactgtacaacagaagaacccggcaggatgagcctgccctgttcgtggccctgaccttcgagcggcgggaggtcctggactcctccaatatcaaaccaatgaacctgatcggcgtggcaagaggcgaaaacatccccgccgtgatcgccctgaccgaccccgagggctgcccactgagccggtttaaggatagcctgggaaacccaacccacatcctgagaatcggcgagagctataaggagaagcagcggaccatccaggccaagaaggaggtggagcagcggagagccggcggctacagccggaagtacgccagcaaagccaagaatctggcagacgatatggtgagaaacaccgctagagatctgctgtactacgccgtgacccaggatgccatgctgatcttcgccaacctgagccggggcttcggccggcagggcaagcggaccttcatggccgagagacagtacacacggatggaggactggctgaccgccaagctggcctacgagggcctgagcaagacctacctgtccaagacactggcccagtacacctccaagacatgcagcaactgtgggtttaccatcaccagcgccgactacgacagggtgctggagaagctgaagaagacagcaacaggctggatgaccacaattaacggcaaggagctgaaggtggagggccagattacctactacaacagatacaagagacagaacgtagtcaaggacctgtccgtcgagctggatagactgagcgaagaatctgtgaacaacgacatctcctcctggacaaagggcagaagcggagaagctctgagcctcctgaagaaaagattctcccatagacccgtgcaggagaagttcgtgtgcctgaactgcggcttcgagacacacgcagccgagcaagccgccctgaacatcgccagatcctggctgttcctgcggagccaggagtacaagaaataccagacaaacaagacaaccggcaacaccgataagagagccttcgtcgagacctggcagtccttttaccggaagaagcttaaggaggtgtggaaacctgccgtgcggtctggcggatctggcggaggctccttccaggagcccctgaagttcagggacgtggccgtggagttcagcctggaggagtggcagtgcctggacaccatccagcagaacctgtacaggaacgtgatgctggagaactacaggaacctggtgttcctgggcatcgccgtgagcaagcccgacctgatcacctgcctggagcaggagaaggagccctggaccaggaagaggcacaggatggtggccaagcccgtgacctgcagccacttcggcggcccaagcagcggcgcccctcctcccagcggcggcagcccagccggctccccaacctctaccgaggagggcacctctgagtccgccacccccgagagcggccctggcacctccaccgagcccagcgagggcagcgcacccggcagccctgccggcagccccacctccacagaggagggaaccagcaccgagcccagcgaaggcagcgccccaggcaccagcaccgagcctagtgagcaggagattaaacggatcaacaagatcagaagaagacttgtgaaagacagcaacaccaagaaggccggcaagacaggccccatgaaaaccctgctggttagagtgatgacacccgatctgagagagcggctggaaaacctgagaaagaagcctgaaaatatcccccagcccatcagcaatacatctagagccaacctgaataagctgctgaccgattacaccgaaatgaagaaggcgatcctgcatgtgtactgggaagagttccagaaggaccctgtgggcctgatgagccgggtggcccagcctgccagcaagaagatcgatcagaacaagctgaaacctgagatggacgagaagggcaacctgaccaccgccggctttgcctgctctcagtgtggccagcccctgttcgtgtacaagctggagcaggtgtctgagaagggcaaggcttacaccaactacttcggacggtgcaatgtggccgagcacgaaaagctgatcctgctggcccagctgaagcccgagaaggatagcgacgaagccgtgacatatagcctgggaaagtttgggcagagggccctggatttctacagcattcatgtgaccaaggagtccacccaccccgtgaagcccctggcccagatcgccggaaacagatacgcctccggacctgtgggaaaggccctgagcgacgcatgtatgggcacaatcgcctccttcctgtctaagtaccaggacatcatcatcgaacaccagaaggtggtgaagggcaaccagaagagactggagagcctgcgggagctggccggcaaggaaaacctggaataccctagcgtgaccctgccacctcagcctcacaccaaggagggcgttgatgcctacaacgaagtgatcgcccgggtgcgaatgtgggtgaacctgaacctgtggcagaagctgaagctaagcagagatgatgccaagcctctgctgagactgaagggattcccttcctttcctctggtcgagagacaggccaacgaagtggactggtgggacatggtgtgtaacgtgaagaagctgatcaacgagaaaaaggaggatggcaaggtgttttggcagaatctggctggctacaagagacaggaagccctgagaccatacctgagcagcgaggaagatcggaagaagggaaagaaattcgctcggtaccagctgggcgacctgctgctgcacctggaaaagaagcacggcgaggactggggaaaggtgtacgacgaggcctgggagcggattgacaagaaagtggaaggcctgagcaagcacatcaagctggaagaggaacggagaagcgaggacgcccagagcaaggccgccctgaccgactggctgcgggctaaggccagcttcgtgatcgagggcctgaaggaggccgacaaggacgagttctgcagatgcgagctgaagctgcagaagtggtacggggacctgcggggaaagcccttcgccatcgaagccgagaacagcatcctggacatcagcggcttcagcaagcagtacaactgtgccttcatctggcagaaggacggcgtgaagaagctgaacctgtacctgatcatcaactacttcaagggcggcaagctgcggttcaagaagatcaaacctgaagccttcgaagccaacagattctacaccgtgatcaacaaaaagagcggcgagatcgtgcccatggaggtgaacttcaacttcgacgaccccaacctgatcatcctgcctctggcctttggcaagagacagggcagagaattcatctggaacgacctgctgtccctggaaaccggcagcctgaagctggccaacggaagagtgatcgagaagacactgtacaacagaagaacccggcaggatgagcctgccctgttcgtggccctgaccttcgagcggcgggaggtcctggactcctccaatatcaaaccaatgaacctgatcggcgtggcaagaggcgaaaacatccccgccgtgatcgccctgaccgaccccgagggctgcccactgagccggtttaaggatagcctgggaaacccaacccacatcctgagaatcggcgagagctataaggagaagcagcggaccatccaggccaagaaggaggtggagcagcggagagccggcggctacagccggaagtacgccagcaaagccaagaatctggcagacgatatggtgagaaacaccgctagagatctgctgtactacgccgtgacccaggatgccatgctgatcttcgccaacctgagccggggcttcggccggcagggcaagcggaccttcatggccgagagacagtacacacggatggaggactggctgaccgccaagctggcctacgagggcctgagcaagacctacctgtccaagacactggcccagtacacctccaagacatgcagcaactgtgggtttaccatcaccagcgccgactacgacagggtgctggagaagctgaagaagacagcaacaggctggatgaccacaattaacggcaaggagctgaaggtggagggccagattacctactacaacagatacaagagacagaacgtagtcaaggacctgtccgtcgagctggatagactgagcgaagaatctgtgaacaacgacatctcctcctggacaaagggcagaagcggagaagctctgagcctcctgaagaaaagattctcccatagacccgtgcaggagaagttcgtgtgcctgaactgcggcttcgagacacacgcagccgagcaagccgccctgaacatcgccagatcctggctgttcctgcggagccaggagtacaagaaataccagacaaacaagacaaccggcaacaccgataagagagccttcgtcgagacctggcagtccttttaccggaagaagcttaaggaggtgtggaaacctgccgtgcggtctggcggatctggcggaggctcctttccaggagcccctgaagttcagggacgtggccgtggagttcagcctggaggagtggcagtgcctggacaccatccagcagaacctgtacaggaacgtgatgctggagaactacaggaacctggtgttcctgggcatcgccgtgagcaagcccgacctgatcacctgcctggagcaggagaaggagccctggaccaggaagaggcacaggatggtggccaagcccgtgacctgcagccacttcggatctggctccggcagcggccccaagaaaaagagaaaagtctaagctgccttctgcggggcttgccttctggccatgcccttcttctctcccttgcacctgtacctcttggtctttgaataaagcctgagtaggaaggctagcaaaaaaaaaaaaaaaaaaaaaaaaaaaaaaaaaaaaaaaaaaaaaaaaaaaaaaaaaaaaaaaaaaaaaaaaaaaaaaaa

SEQ ID NO: 15517 - RNA, 9485 nt, synthetic construct
  source 1..9485: mol_type = other RNA
aggaaataagagagaaaagaagagtaagaagaaatataagagccaccatggcccctaagaagaagcgtaaagtgagccggatggaacgcctcgtctacgaggtgcggcagaagtgcagaaacatcgaggacatctgcatctcctgcggatctctgaacgtgaccctggagcacccactgttcatcggcggcatgtgccagaactgtaaaaactgttttctggagtgtgcctatcaatacgacgatgacggctaccagagctactgcaccatctgttgcggcggaagagaggtgctgatgtgtggaaataacaactgctgccggtgcttctgcgtggaatgcgtggacctgctggtgggccccggcgccgcccaggccgctattaaggaagatccttggaactgctacatgtgcggccacaagggcacatacggcctgctgagacggagagaggactggcctagcagactgcagatgttcttcgccaataaccacgaccaggagttcgacccccctaaggtgtaccctcccgtccccgccgagaagagaaagcccatccgggtcctgagcctgttcgatggcatcgccaccggtctgctggtgctgaaggacctgggcatccaggtggataggtacattgcctccgaggtgtgcgaggactccatcaccgtgggaatggtgcgtcatcagggcaagatcatgtacgtgggcgacgtgcggagcgtgacacagaagcatatccaggagtggggccctttcgacctggtgatcggcggcagcccttgcaatgacctgagcatcgtgaacccagcccggaagggcctgtacgagggaaccggcagactgttcttcgagttttacagactgctgcacgacgcccggcctaaggaaggcgacgaccggcccttcttttggctgttcgagaatgtggtggccatgggagtcagcgacaagcgggatattagccggttcctggagagcaaccccgtgatgatcgatgccaaggaagtgagcgccgcccaccgggccagatacttctggggcaatctgcctggcatgaacagacccctggccagcaccgtgaacgacaagctggagctgcaggagtgcctggagcacggccggatcgccaagttcagcaaggtgagaaccatcaccacccgaagcaacagcatcaaacaaggcaaggaccagcactttcctgtgttcatgaacgagaaggaggacatcctgtggtgtaccgagatggagagagtgttcgggttcccagtccactacacagatgtcagcaacatgtctagactggccagacagagactgctgggaagaagctggtccgtccctgtgatcagacacctgttcgcccctctgaaggagtacttcgcctgcgtgagcagcggcaacagcaacgccaacagccggggccccagcttctctagcggcctggtgccactgtccctgagagggagccacatgggccccatggagatctacaaaaccgtgagcgcctggaagcggcagcctgtgcgcgtgctgagcctgtttcggaatatcgataaagtcctgaaaagcctgggattcctggagagcggctctggctccggcggtggcaccctgaagtacgtggaggatgtgacaaacgtggtcagacgggatgtggagaagtggggccccttcgatctggtgtacggcagcacccaacccctgggcagctcttgtgaccggtgccctggctggtacatgtttcagttccaccggatcctgcagtacgccctgccgagacaggagtcccagcggccattcttttggattttcatggacaacttgctgctgaccgaggatgaccaggaaactaccactcggttcctgcagaccgaagccgtgaccctgcaggacgtgagaggccgggactaccagaacgccatgcgggtgtggtccaacatccctggactgaaaagcaagcacgcacctctgacccctaaagaagaggagtacctgcaggcccaggtgcggagcagaagcaagctggacgcccctaaggtggatctgctggtgaagaattgcctcctgcccctgagagagtacttcaagtatttcagccagaatagtctgcccctgggaggcagcggcggcggcgccctggtgacatttgaggacgtcgccgtgcggttcacccaggaggaatgggctctgctggatccttctcagaaaatcctgtaccgggacgtgatgagagagacataccggaatctgacctccgtgggcatcaactgggaatgttgggaccttgaagcctgcttcagaagcctgggaagaaacctgagagtgcaggtggtgaagagaaagtgcgagctgaccaacagcggcccctgcgccgagggcggcccaagcagcggcgcccctcctcccagcggcggcagcccagccggctccccaacctctaccgaggagggcacctctgagtccgccacccccgagagcggccctggcacctccaccgagcccagcgagggcagcgcacccggcagccctgccggcagccccacctccacagaggagggaaccagcaccgagcccagcgaaggcagcgccccaggcaccagcaccgagcctagtgagcaggagattaaacggatcaacaagatcagaagaagacttgtgaaagacagcaacaccaagaaggccggcaagacaggccccatgaaaaccctgctggttagagtgatgacacccgatctgagagagcggctggaaaacctgagaaagaagcctgaaaatatcccccagcccatcagcaatacatctagagccaacctgaataagctgctgaccgattacaccgaaatgaagaaggcgatcctgcatgtgtactgggaagagttccagaaggaccctgtgggcctgatgagccgggtggcccagcctgccagcaagaagatcgatcagaacaagctgaaacctgagatggacgagaagggcaacctgaccaccgccggctttgcctgctctcagtgtggccagcccctgttcgtgtacaagctggagcaggtgtctgagaagggcaaggcttacaccaactacttcggacggtgcaatgtggccgagcacgaaaagctgatcctgctggcccagctgaagcccgagaaggatagcgacgaagccgtgacatatagcctgggaaagtttgggcagagggccctggatttctacagcattcatgtgaccaaggagtccacccaccccgtgaagcccctggcccagatcgccggaaacagatacgcctccggacctgtgggaaaggccctgagcgacgcatgtatgggcacaatcgcctccttcctgtctaagtaccaggacatcatcatcgaacaccagaaggtggtgaagggcaaccagaagagactggagagcctgcgggagctggccggcaaggaaaacctggaataccctagcgtgaccctgccacctcagcctcacaccaaggagggcgttgatgcctacaacgaagtgatcgcccgggtgcgaatgtgggtgaacctgaacctgtggcagaagctgaagctaagcagagatgatgccaagcctctgctgagactgaagggattcccttcctttcctctggtcgagagacaggccaacgaagtggactggtgggacatggtgtgtaacgtgaagaagctgatcaacgagaaaaaggaggatggcaaggtgttttggcagaatctggctggctacaagagacaggaagccctgagaccatacctgagcagcgaggaagatcggaagaagggaaagaaattcgctcggtaccagctgggcgacctgctgctgcacctggaaaagaagcacggcgaggactggggaaaggtgtacgacgaggcctgggagcggattgacaagaaagtggaaggcctgagcaagcacatcaagctggaagaggaacggagaagcgaggacgcccagagcaaggccgccctgaccgactggctgcgggctaaggccagcttcgtgatcgagggcctgaaggaggccgacaaggacgagttctgcagatgcgagctgaagctgcagaagtggtacggggacctgcggggaaagcccttcgccatcgaagccgagaacagcatcctggacatcagcggcttcagcaagcagtacaactgtgccttcatctggcagaaggacggcgtgaagaagctgaacctgtacctgatcatcaactacttcaagggcggcaagctgcggttcaagaagatcaaacctgaagccttcgaagccaacagattctacaccgtgatcaacaaaaagagcggcgagatcgtgcccatggaggtgaacttcaacttcgacgaccccaacctgatcatcctgcctctggcctttggcaagagacagggcagagaattcatctggaacgacctgctgtccctggaaaccggcagcctgaagctggccaacggaagagtgatcgagaagacactgtacaacagaagaacccggcaggatgagcctgccctgttcgtggccctgaccttcgagcggcgggaggtcctggactcctccaatatcaaaccaatgaacctgatcggcgtggcaagaggcgaaaacatccccgccgtgatcgccctgaccgaccccgagggctgcccactgagccggtttaaggatagcctgggaaacccaacccacatcctgagaatcggcgagagctataaggagaagcagcggaccatccaggccaagaaggaggtggagcagcggagagccggcggctacagccggaagtacgccagcaaagccaagaatctggcagacgatatggtgagaaacaccgctagagatctgctgtactacgccgtgacccaggatgccatgctgatcttcgccaacctgagccggggcttcggccggcagggcaagcggaccttcatggccgagagacagtacacacggatggaggactggctgaccgccaagctggcctacgagggcctgagcaagacctacctgtccaagacactggcccagtacacctccaagacatgcagcaactgtgggtttaccatcaccagcgccgactacgacagggtgctggagaagctgaagaagacagcaacaggctggatgaccacaattaacggcaaggagctgaaggtggagggccagattacctactacaacagatacaagagacagaacgtagtcaaggacctgtccgtcgagctggatagactgagcgaagaatctgtgaacaacgacatctcctcctggacaaagggcagaagcggagaagctctgagcctcctgaagaaaagattctcccatagacccgtgcaggagaagttcgtgtgcctgaactgcggcttcgagacacacgcagccgagcaagccgccctgaacatcgccagatcctggctgttcctgcggagccaggagtacaagaaataccagacaaacaagacaaccggcaacaccgataagagagccttcgtcgagacctggcagtccttttaccggaagaagcttaaggaggtgtggaaacctgccgtgcggtctggcggatctggcggaggctccgagcccggcgccgtgagcttcgccgacgtggccgtgtacttcagccccgaggagtgggagtgcctgaggcccgcccagagggccctgtacagggacgtgatgagggagacctacggccacctgggcgccctgggcttccccggccccaagcccgccctgatcagctggatggagcaggagagcgaggcctggagccccgccgcccaggaccccgagaagggcgagaggctgggcggcgccaggggcggcccaagcagcggcgcccctcctcccagcggcggcagcccagccggctccccaacctctaccgaggagggcacctctgagtccgccacccccgagagcggccctggcacctccaccgagcccagcgagggcagcgcacccggcagccctgccggcagccccacctccacagaggagggaaccagcaccgagcccagcgaaggcagcgccccaggcaccagcaccgagcctagtgagcaggagattaaacggatcaacaagatcagaagaagacttgtgaaagacagcaacaccaagaaggccggcaagacaggccccatgaaaaccctgctggttagagtgatgacacccgatctgagagagcggctggaaaacctgagaaagaagcctgaaaatatcccccagcccatcagcaatacatctagagccaacctgaataagctgctgaccgattacaccgaaatgaagaaggcgatcctgcatgtgtactgggaagagttccagaaggaccctgtgggcctgatgagccgggtggcccagcctgccagcaagaagatcgatcagaacaagctgaaacctgagatggacgagaagggcaacctgaccaccgccggctttgcctgctctcagtgtggccagcccctgttcgtgtacaagctggagcaggtgtctgagaagggcaaggcttacaccaactacttcggacggtgcaatgtggccgagcacgaaaagctgatcctgctggcccagctgaagcccgagaaggatagcgacgaagccgtgacatatagcctgggaaagtttgggcagagggccctggatttctacagcattcatgtgaccaaggagtccacccaccccgtgaagcccctggcccagatcgccggaaacagatacgcctccggacctgtgggaaaggccctgagcgacgcatgtatgggcacaatcgcctccttcctgtctaagtaccaggacatcatcatcgaacaccagaaggtggtgaagggcaaccagaagagactggagagcctgcgggagctggccggcaaggaaaacctggaataccctagcgtgaccctgccacctcagcctcacaccaaggagggcgttgatgcctacaacgaagtgatcgcccgggtgcgaatgtgggtgaacctgaacctgtggcagaagctgaagctaagcagagatgatgccaagcctctgctgagactgaagggattcccttcctttcctctggtcgagagacaggccaacgaagtggactggtgggacatggtgtgtaacgtgaagaagctgatcaacgagaaaaaggaggatggcaaggtgttttggcagaatctggctggctacaagagacaggaagccctgagaccatacctgagcagcgaggaagatcggaagaagggaaagaaattcgctcggtaccagctgggcgacctgctgctgcacctggaaaagaagcacggcgaggactggggaaaggtgtacgacgaggcctgggagcggattgacaagaaagtggaaggcctgagcaagcacatcaagctggaagaggaacggagaagcgaggacgcccagagcaaggccgccctgaccgactggctgcgggctaaggccagcttcgtgatcgagggcctgaaggaggccgacaaggacgagttctgcagatgcgagctgaagctgcagaagtggtacggggacctgcggggaaagcccttcgccatcgaagccgagaacagcatcctggacatcagcggcttcagcaagcagtacaactgtgccttcatctggcagaaggacggcgtgaagaagctgaacctgtacctgatcatcaactacttcaagggcggcaagctgcggttcaagaagatcaaacctgaagccttcgaagccaacagattctacaccgtgatcaacaaaaagagcggcgagatcgtgcccatggaggtgaacttcaacttcgacgaccccaacctgatcatcctgcctctggcctttggcaagagacagggcagagaattcatctggaacgacctgctgtccctggaaaccggcagcctgaagctggccaacggaagagtgatcgagaagacactgtacaacagaagaacccggcaggatgagcctgccctgttcgtggccctgaccttcgagcggcgggaggtcctggactcctccaatatcaaaccaatgaacctgatcggcgtggcaagaggcgaaaacatccccgccgtgatcgccctgaccgaccccgagggctgcccactgagccggtttaaggatagcctgggaaacccaacccacatcctgagaatcggcgagagctataaggagaagcagcggaccatccaggccaagaaggaggtggagcagcggagagccggcggctacagccggaagtacgccagcaaagccaagaatctggcagacgatatggtgagaaacaccgctagagatctgctgtactacgccgtgacccaggatgccatgctgatcttcgccaacctgagccggggcttcggccggcagggcaagcggaccttcatggccgagagacagtacacacggatggaggactggctgaccgccaagctggcctacgagggcctgagcaagacctacctgtccaagacactggcccagtacacctccaagacatgcagcaactgtgggtttaccatcaccagcgccgactacgacagggtgctggagaagctgaagaagacagcaacaggctggatgaccacaattaacggcaaggagctgaaggtggagggccagattacctactacaacagatacaagagacagaacgtagtcaaggacctgtccgtcgagctggatagactgagcgaagaatctgtgaacaacgacatctcctcctggacaaagggcagaagcggagaagctctgagcctcctgaagaaaagattctcccatagacccgtgcaggagaagttcgtgtgcctgaactgcggcttcgagacacacgcagccgagcaagccgccctgaacatcgccagatcctggctgttcctgcggagccaggagtacaagaaataccagacaaacaagacaaccggcaacaccgataagagagccttcgtcgagacctggcagtccttttaccggaagaagcttaaggaggtgtggaaacctgccgtgcggtctggcggatctggcggaggctcctgagcccggcgccgtgagcttcgccgacgtggccgtgtacttcagccccgaggagtgggagtgcctgaggcccgcccagagggccctgtacagggacgtgatgagggagacctacggccacctgggcgccctgggcttccccggccccaagcccgccctgatcagctggatggagcaggagagcgaggcctggagccccgccgcccaggaccccgagaagggcgagaggctgggcggcgccaggggatctggctccggcagcggccccaagaaaaagagaaaagtctaagctgccttctgcggggcttgccttctggccatgcccttcttctctcccttgcacctgtacctcttggtctttgaataaagcctgagtaggaaggctagcaaaaaaaaaaaaaaaaaaaaaaaaaaaaaaaaaaaaaaaaaaaaaaaaaaaaaaaaaaaaaaaaaaaaaaaaaaaaaaaa

SEQ ID NO: 15518 - RNA, 9485 nt, synthetic construct
  source 1..9485: mol_type = other RNA
aggaaataagagagaaaagaagagtaagaagaaatataagagccaccatggcccctaagaagaagcgtaaagtgagccggatggaacgcctcgtctacgaggtgcggcagaagtgcagaaacatcgaggacatctgcatctcctgcggatctctgaacgtgaccctggagcacccactgttcatcggcggcatgtgccagaactgtaaaaactgttttctggagtgtgcctatcaatacgacgatgacggctaccagagctactgcaccatctgttgcggcggaagagaggtgctgatgtgtggaaataacaactgctgccggtgcttctgcgtggaatgcgtggacctgctggtgggccccggcgccgcccaggccgctattaaggaagatccttggaactgctacatgtgcggccacaagggcacatacggcctgctgagacggagagaggactggcctagcagactgcagatgttcttcgccaataaccacgaccaggagttcgacccccctaaggtgtaccctcccgtccccgccgagaagagaaagcccatccgggtcctgagcctgttcgatggcatcgccaccggtctgctggtgctgaaggacctgggcatccaggtggataggtacattgcctccgaggtgtgcgaggactccatcaccgtgggaatggtgcgtcatcagggcaagatcatgtacgtgggcgacgtgcggagcgtgacacagaagcatatccaggagtggggccctttcgacctggtgatcggcggcagcccttgcaatgacctgagcatcgtgaacccagcccggaagggcctgtacgagggaaccggcagactgttcttcgagttttacagactgctgcacgacgcccggcctaaggaaggcgacgaccggcccttcttttggctgttcgagaatgtggtggccatgggagtcagcgacaagcgggatattagccggttcctggagagcaaccccgtgatgatcgatgccaaggaagtgagcgccgcccaccgggccagatacttctggggcaatctgcctggcatgaacagacccctggccagcaccgtgaacgacaagctggagctgcaggagtgcctggagcacggccggatcgccaagttcagcaaggtgagaaccatcaccacccgaagcaacagcatcaaacaaggcaaggaccagcactttcctgtgttcatgaacgagaaggaggacatcctgtggtgtaccgagatggagagagtgttcgggttcccagtccactacacagatgtcagcaacatgtctagactggccagacagagactgctgggaagaagctggtccgtccctgtgatcagacacctgttcgcccctctgaaggagtacttcgcctgcgtgagcagcggcaacagcaacgccaacagccggggccccagcttctctagcggcctggtgccactgtccctgagagggagccacatgggccccatggagatctacaaaaccgtgagcgcctggaagcggcagcctgtgcgcgtgctgagcctgtttcggaatatcgataaagtcctgaaaagcctgggattcctggagagcggctctggctccggcggtggcaccctgaagtacgtggaggatgtgacaaacgtggtcagacgggatgtggagaagtggggccccttcgatctggtgtacggcagcacccaacccctgggcagctcttgtgaccggtgccctggctggtacatgtttcagttccaccggatcctgcagtacgccctgccgagacaggagtcccagcggccattcttttggattttcatggacaacttgctgctgaccgaggatgaccaggaaactaccactcggttcctgcagaccgaagccgtgaccctgcaggacgtgagaggccgggactaccagaacgccatgcgggtgtggtccaacatccctggactgaaaagcaagcacgcacctctgacccctaaagaagaggagtacctgcaggcccaggtgcggagcagaagcaagctggacgcccctaaggtggatctgctggtgaagaattgcctcctgcccctgagagagtacttcaagtatttcagccagaatagtctgcccctgggaggcagcggcggcggcgccctggtgacatttgaggacgtcgccgtgcggttcacccaggaggaatgggctctgctggatccttctcagaaaatcctgtaccgggacgtgatgagagagacataccggaatctgacctccgtgggcatcaactgggaatgttgggaccttgaagcctgcttcagaagcctgggaagaaacctgagagtgcaggtggtgaagagaaagtgcgagctgaccaacagcggcccctgcgccgagggcggcccaagcagcggcgcccctcctcccagcggcggcagcccagccggctccccaacctctaccgaggagggcacctctgagtccgccacccccgagagcggccctggcacctccaccgagcccagcgagggcagcgcacccggcagccctgccggcagccccacctccacagaggagggaaccagcaccgagcccagcgaaggcagcgccccaggcaccagcaccgagcctagtgagcaggagattaaacggatcaacaagatcagaagaagacttgtgaaagacagcaacaccaagaaggccggcaagacaggccccatgaaaaccctgctggttagagtgatgacacccgatctgagagagcggctggaaaacctgagaaagaagcctgaaaatatcccccagcccatcagcaatacatctagagccaacctgaataagctgctgaccgattacaccgaaatgaagaaggcgatcctgcatgtgtactgggaagagttccagaaggaccctgtgggcctgatgagccgggtggcccagcctgccagcaagaagatcgatcagaacaagctgaaacctgagatggacgagaagggcaacctgaccaccgccggctttgcctgctctcagtgtggccagcccctgttcgtgtacaagctggagcaggtgtctgagaagggcaaggcttacaccaactacttcggacggtgcaatgtggccgagcacgaaaagctgatcctgctggcccagctgaagcccgagaaggatagcgacgaagccgtgacatatagcctgggaaagtttgggcagagggccctggatttctacagcattcatgtgaccaaggagtccacccaccccgtgaagcccctggcccagatcgccggaaacagatacgcctccggacctgtgggaaaggccctgagcgacgcatgtatgggcacaatcgcctccttcctgtctaagtaccaggacatcatcatcgaacaccagaaggtggtgaagggcaaccagaagagactggagagcctgcgggagctggccggcaaggaaaacctggaataccctagcgtgaccctgccacctcagcctcacaccaaggagggcgttgatgcctacaacgaagtgatcgcccgggtgcgaatgtgggtgaacctgaacctgtggcagaagctgaagctaagcagagatgatgccaagcctctgctgagactgaagggattcccttcctttcctctggtcgagagacaggccaacgaagtggactggtgggacatggtgtgtaacgtgaagaagctgatcaacgagaaaaaggaggatggcaaggtgttttggcagaatctggctggctacaagagacaggaagccctgagaccatacctgagcagcgaggaagatcggaagaagggaaagaaattcgctcggtaccagctgggcgacctgctgctgcacctggaaaagaagcacggcgaggactggggaaaggtgtacgacgaggcctgggagcggattgacaagaaagtggaaggcctgagcaagcacatcaagctggaagaggaacggagaagcgaggacgcccagagcaaggccgccctgaccgactggctgcgggctaaggccagcttcgtgatcgagggcctgaaggaggccgacaaggacgagttctgcagatgcgagctgaagctgcagaagtggtacggggacctgcggggaaagcccttcgccatcgaagccgagaacagcatcctggacatcagcggcttcagcaagcagtacaactgtgccttcatctggcagaaggacggcgtgaagaagctgaacctgtacctgatcatcaactacttcaagggcggcaagctgcggttcaagaagatcaaacctgaagccttcgaagccaacagattctacaccgtgatcaacaaaaagagcggcgagatcgtgcccatggaggtgaacttcaacttcgacgaccccaacctgatcatcctgcctctggcctttggcaagagacagggcagagaattcatctggaacgacctgctgtccctggaaaccggcagcctgaagctggccaacggaagagtgatcgagaagacactgtacaacagaagaacccggcaggatgagcctgccctgttcgtggccctgaccttcgagcggcgggaggtcctggactcctccaatatcaaaccaatgaacctgatcggcgtggcaagaggcgaaaacatccccgccgtgatcgccctgaccgaccccgagggctgcccactgagccggtttaaggatagcctgggaaacccaacccacatcctgagaatcggcgagagctataaggagaagcagcggaccatccaggccaagaaggaggtggagcagcggagagccggcggctacagccggaagtacgccagcaaagccaagaatctggcagacgatatggtgagaaacaccgctagagatctgctgtactacgccgtgacccaggatgccatgctgatcttcgccaacctgagccggggcttcggccggcagggcaagcggaccttcatggccgagagacagtacacacggatggaggactggctgaccgccaagctggcctacgagggcctgagcaagacctacctgtccaagacactggcccagtacacctccaagacatgcagcaactgtgggtttaccatcaccagcgccgactacgacagggtgctggagaagctgaagaagacagcaacaggctggatgaccacaattaacggcaaggagctgaaggtggagggccagattacctactacaacagatacaagagacagaacgtagtcaaggacctgtccgtcgagctggatagactgagcgaagaatctgtgaacaacgacatctcctcctggacaaagggcagaagcggagaagctctgagcctcctgaagaaaagattctcccatagacccgtgcaggagaagttcgtgtgcctgaactgcggcttcgagacacacgcagccgagcaagccgccctgaacatcgccagatcctggctgttcctgcggagccaggagtacaagaaataccagacaaacaagacaaccggcaacaccgataagagagccttcgtcgagacctggcagtccttttaccggaagaagcttaaggaggtgtggaaacctgccgtgcggtctggcggatctggcggaggctcccaggccgaggtgaccttcgaggacgtggccgtgctgttcagcagggaggagtggggcaggctgggccccgcccagaggggcctgtacagggacgtgatgctggagacctacaggaacctggccagcctgggcgccggcagggccggcagcaagcccggcgtgatcacccagctggagaggggcgacgagccctgggtgctggacgcccagggcgccaagggcaagggccagcccagggtgagcggcggcccaagcagcggcgcccctcctcccagcggcggcagcccagccggctccccaacctctaccgaggagggcacctctgagtccgccacccccgagagcggccctggcacctccaccgagcccagcgagggcagcgcacccggcagccctgccggcagccccacctccacagaggagggaaccagcaccgagcccagcgaaggcagcgccccaggcaccagcaccgagcctagtgagcaggagattaaacggatcaacaagatcagaagaagacttgtgaaagacagcaacaccaagaaggccggcaagacaggccccatgaaaaccctgctggttagagtgatgacacccgatctgagagagcggctggaaaacctgagaaagaagcctgaaaatatcccccagcccatcagcaatacatctagagccaacctgaataagctgctgaccgattacaccgaaatgaagaaggcgatcctgcatgtgtactgggaagagttccagaaggaccctgtgggcctgatgagccgggtggcccagcctgccagcaagaagatcgatcagaacaagctgaaacctgagatggacgagaagggcaacctgaccaccgccggctttgcctgctctcagtgtggccagcccctgttcgtgtacaagctggagcaggtgtctgagaagggcaaggcttacaccaactacttcggacggtgcaatgtggccgagcacgaaaagctgatcctgctggcccagctgaagcccgagaaggatagcgacgaagccgtgacatatagcctgggaaagtttgggcagagggccctggatttctacagcattcatgtgaccaaggagtccacccaccccgtgaagcccctggcccagatcgccggaaacagatacgcctccggacctgtgggaaaggccctgagcgacgcatgtatgggcacaatcgcctccttcctgtctaagtaccaggacatcatcatcgaacaccagaaggtggtgaagggcaaccagaagagactggagagcctgcgggagctggccggcaaggaaaacctggaataccctagcgtgaccctgccacctcagcctcacaccaaggagggcgttgatgcctacaacgaagtgatcgcccgggtgcgaatgtgggtgaacctgaacctgtggcagaagctgaagctaagcagagatgatgccaagcctctgctgagactgaagggattcccttcctttcctctggtcgagagacaggccaacgaagtggactggtgggacatggtgtgtaacgtgaagaagctgatcaacgagaaaaaggaggatggcaaggtgttttggcagaatctggctggctacaagagacaggaagccctgagaccatacctgagcagcgaggaagatcggaagaagggaaagaaattcgctcggtaccagctgggcgacctgctgctgcacctggaaaagaagcacggcgaggactggggaaaggtgtacgacgaggcctgggagcggattgacaagaaagtggaaggcctgagcaagcacatcaagctggaagaggaacggagaagcgaggacgcccagagcaaggccgccctgaccgactggctgcgggctaaggccagcttcgtgatcgagggcctgaaggaggccgacaaggacgagttctgcagatgcgagctgaagctgcagaagtggtacggggacctgcggggaaagcccttcgccatcgaagccgagaacagcatcctggacatcagcggcttcagcaagcagtacaactgtgccttcatctggcagaaggacggcgtgaagaagctgaacctgtacctgatcatcaactacttcaagggcggcaagctgcggttcaagaagatcaaacctgaagccttcgaagccaacagattctacaccgtgatcaacaaaaagagcggcgagatcgtgcccatggaggtgaacttcaacttcgacgaccccaacctgatcatcctgcctctggcctttggcaagagacagggcagagaattcatctggaacgacctgctgtccctggaaaccggcagcctgaagctggccaacggaagagtgatcgagaagacactgtacaacagaagaacccggcaggatgagcctgccctgttcgtggccctgaccttcgagcggcgggaggtcctggactcctccaatatcaaaccaatgaacctgatcggcgtggcaagaggcgaaaacatccccgccgtgatcgccctgaccgaccccgagggctgcccactgagccggtttaaggatagcctgggaaacccaacccacatcctgagaatcggcgagagctataaggagaagcagcggaccatccaggccaagaaggaggtggagcagcggagagccggcggctacagccggaagtacgccagcaaagccaagaatctggcagacgatatggtgagaaacaccgctagagatctgctgtactacgccgtgacccaggatgccatgctgatcttcgccaacctgagccggggcttcggccggcagggcaagcggaccttcatggccgagagacagtacacacggatggaggactggctgaccgccaagctggcctacgagggcctgagcaagacctacctgtccaagacactggcccagtacacctccaagacatgcagcaactgtgggtttaccatcaccagcgccgactacgacagggtgctggagaagctgaagaagacagcaacaggctggatgaccacaattaacggcaaggagctgaaggtggagggccagattacctactacaacagatacaagagacagaacgtagtcaaggacctgtccgtcgagctggatagactgagcgaagaatctgtgaacaacgacatctcctcctggacaaagggcagaagcggagaagctctgagcctcctgaagaaaagattctcccatagacccgtgcaggagaagttcgtgtgcctgaactgcggcttcgagacacacgcagccgagcaagccgccctgaacatcgccagatcctggctgttcctgcggagccaggagtacaagaaataccagacaaacaagacaaccggcaacaccgataagagagccttcgtcgagacctggcagtccttttaccggaagaagcttaaggaggtgtggaaacctgccgtgcggtctggcggatctggcggaggctcctcaggccgaggtgaccttcgaggacgtggccgtgctgttcagcagggaggagtggggcaggctgggccccgcccagaggggcctgtacagggacgtgatgctggagacctacaggaacctggccagcctgggcgccggcagggccggcagcaagcccggcgtgatcacccagctggagaggggcgacgagccctgggtgctggacgcccagggcgccaagggcaagggccagcccagggtgagcggatctggctccggcagcggccccaagaaaaagagaaaagtctaagctgccttctgcggggcttgccttctggccatgcccttcttctctcccttgcacctgtacctcttggtctttgaataaagcctgagtaggaaggctagcaaaaaaaaaaaaaaaaaaaaaaaaaaaaaaaaaaaaaaaaaaaaaaaaaaaaaaaaaaaaaaaaaaaaaaaaaaaaaaaa

SEQ ID NO: 15519 - RNA, 9485 nt, synthetic construct
  source 1..9485: mol_type = other RNA
aggaaataagagagaaaagaagagtaagaagaaatataagagccaccatggcccctaagaagaagcgtaaagtgagccggatggaacgcctcgtctacgaggtgcggcagaagtgcagaaacatcgaggacatctgcatctcctgcggatctctgaacgtgaccctggagcacccactgttcatcggcggcatgtgccagaactgtaaaaactgttttctggagtgtgcctatcaatacgacgatgacggctaccagagctactgcaccatctgttgcggcggaagagaggtgctgatgtgtggaaataacaactgctgccggtgcttctgcgtggaatgcgtggacctgctggtgggccccggcgccgcccaggccgctattaaggaagatccttggaactgctacatgtgcggccacaagggcacatacggcctgctgagacggagagaggactggcctagcagactgcagatgttcttcgccaataaccacgaccaggagttcgacccccctaaggtgtaccctcccgtccccgccgagaagagaaagcccatccgggtcctgagcctgttcgatggcatcgccaccggtctgctggtgctgaaggacctgggcatccaggtggataggtacattgcctccgaggtgtgcgaggactccatcaccgtgggaatggtgcgtcatcagggcaagatcatgtacgtgggcgacgtgcggagcgtgacacagaagcatatccaggagtggggccctttcgacctggtgatcggcggcagcccttgcaatgacctgagcatcgtgaacccagcccggaagggcctgtacgagggaaccggcagactgttcttcgagttttacagactgctgcacgacgcccggcctaaggaaggcgacgaccggcccttcttttggctgttcgagaatgtggtggccatgggagtcagcgacaagcgggatattagccggttcctggagagcaaccccgtgatgatcgatgccaaggaagtgagcgccgcccaccgggccagatacttctggggcaatctgcctggcatgaacagacccctggccagcaccgtgaacgacaagctggagctgcaggagtgcctggagcacggccggatcgccaagttcagcaaggtgagaaccatcaccacccgaagcaacagcatcaaacaaggcaaggaccagcactttcctgtgttcatgaacgagaaggaggacatcctgtggtgtaccgagatggagagagtgttcgggttcccagtccactacacagatgtcagcaacatgtctagactggccagacagagactgctgggaagaagctggtccgtccctgtgatcagacacctgttcgcccctctgaaggagtacttcgcctgcgtgagcagcggcaacagcaacgccaacagccggggccccagcttctctagcggcctggtgccactgtccctgagagggagccacatgggccccatggagatctacaaaaccgtgagcgcctggaagcggcagcctgtgcgcgtgctgagcctgtttcggaatatcgataaagtcctgaaaagcctgggattcctggagagcggctctggctccggcggtggcaccctgaagtacgtggaggatgtgacaaacgtggtcagacgggatgtggagaagtggggccccttcgatctggtgtacggcagcacccaacccctgggcagctcttgtgaccggtgccctggctggtacatgtttcagttccaccggatcctgcagtacgccctgccgagacaggagtcccagcggccattcttttggattttcatggacaacttgctgctgaccgaggatgaccaggaaactaccactcggttcctgcagaccgaagccgtgaccctgcaggacgtgagaggccgggactaccagaacgccatgcgggtgtggtccaacatccctggactgaaaagcaagcacgcacctctgacccctaaagaagaggagtacctgcaggcccaggtgcggagcagaagcaagctggacgcccctaaggtggatctgctggtgaagaattgcctcctgcccctgagagagtacttcaagtatttcagccagaatagtctgcccctgggaggcagcggcggcggcgccctggtgacatttgaggacgtcgccgtgcggttcacccaggaggaatgggctctgctggatccttctcagaaaatcctgtaccgggacgtgatgagagagacataccggaatctgacctccgtgggcatcaactgggaatgttgggaccttgaagcctgcttcagaagcctgggaagaaacctgagagtgcaggtggtgaagagaaagtgcgagctgaccaacagcggcccctgcgccgagggcggcccaagcagcggcgcccctcctcccagcggcggcagcccagccggctccccaacctctaccgaggagggcacctctgagtccgccacccccgagagcggccctggcacctccaccgagcccagcgagggcagcgcacccggcagccctgccggcagccccacctccacagaggagggaaccagcaccgagcccagcgaaggcagcgccccaggcaccagcaccgagcctagtgagcaggagattaaacggatcaacaagatcagaagaagacttgtgaaagacagcaacaccaagaaggccggcaagacaggccccatgaaaaccctgctggttagagtgatgacacccgatctgagagagcggctggaaaacctgagaaagaagcctgaaaatatcccccagcccatcagcaatacatctagagccaacctgaataagctgctgaccgattacaccgaaatgaagaaggcgatcctgcatgtgtactgggaagagttccagaaggaccctgtgggcctgatgagccgggtggcccagcctgccagcaagaagatcgatcagaacaagctgaaacctgagatggacgagaagggcaacctgaccaccgccggctttgcctgctctcagtgtggccagcccctgttcgtgtacaagctggagcaggtgtctgagaagggcaaggcttacaccaactacttcggacggtgcaatgtggccgagcacgaaaagctgatcctgctggcccagctgaagcccgagaaggatagcgacgaagccgtgacatatagcctgggaaagtttgggcagagggccctggatttctacagcattcatgtgaccaaggagtccacccaccccgtgaagcccctggcccagatcgccggaaacagatacgcctccggacctgtgggaaaggccctgagcgacgcatgtatgggcacaatcgcctccttcctgtctaagtaccaggacatcatcatcgaacaccagaaggtggtgaagggcaaccagaagagactggagagcctgcgggagctggccggcaaggaaaacctggaataccctagcgtgaccctgccacctcagcctcacaccaaggagggcgttgatgcctacaacgaagtgatcgcccgggtgcgaatgtgggtgaacctgaacctgtggcagaagctgaagctaagcagagatgatgccaagcctctgctgagactgaagggattcccttcctttcctctggtcgagagacaggccaacgaagtggactggtgggacatggtgtgtaacgtgaagaagctgatcaacgagaaaaaggaggatggcaaggtgttttggcagaatctggctggctacaagagacaggaagccctgagaccatacctgagcagcgaggaagatcggaagaagggaaagaaattcgctcggtaccagctgggcgacctgctgctgcacctggaaaagaagcacggcgaggactggggaaaggtgtacgacgaggcctgggagcggattgacaagaaagtggaaggcctgagcaagcacatcaagctggaagaggaacggagaagcgaggacgcccagagcaaggccgccctgaccgactggctgcgggctaaggccagcttcgtgatcgagggcctgaaggaggccgacaaggacgagttctgcagatgcgagctgaagctgcagaagtggtacggggacctgcggggaaagcccttcgccatcgaagccgagaacagcatcctggacatcagcggcttcagcaagcagtacaactgtgccttcatctggcagaaggacggcgtgaagaagctgaacctgtacctgatcatcaactacttcaagggcggcaagctgcggttcaagaagatcaaacctgaagccttcgaagccaacagattctacaccgtgatcaacaaaaagagcggcgagatcgtgcccatggaggtgaacttcaacttcgacgaccccaacctgatcatcctgcctctggcctttggcaagagacagggcagagaattcatctggaacgacctgctgtccctggaaaccggcagcctgaagctggccaacggaagagtgatcgagaagacactgtacaacagaagaacccggcaggatgagcctgccctgttcgtggccctgaccttcgagcggcgggaggtcctggactcctccaatatcaaaccaatgaacctgatcggcgtggcaagaggcgaaaacatccccgccgtgatcgccctgaccgaccccgagggctgcccactgagccggtttaaggatagcctgggaaacccaacccacatcctgagaatcggcgagagctataaggagaagcagcggaccatccaggccaagaaggaggtggagcagcggagagccggcggctacagccggaagtacgccagcaaagccaagaatctggcagacgatatggtgagaaacaccgctagagatctgctgtactacgccgtgacccaggatgccatgctgatcttcgccaacctgagccggggcttcggccggcagggcaagcggaccttcatggccgagagacagtacacacggatggaggactggctgaccgccaagctggcctacgagggcctgagcaagacctacctgtccaagacactggcccagtacacctccaagacatgcagcaactgtgggtttaccatcaccagcgccgactacgacagggtgctggagaagctgaagaagacagcaacaggctggatgaccacaattaacggcaaggagctgaaggtggagggccagattacctactacaacagatacaagagacagaacgtagtcaaggacctgtccgtcgagctggatagactgagcgaagaatctgtgaacaacgacatctcctcctggacaaagggcagaagcggagaagctctgagcctcctgaagaaaagattctcccatagacccgtgcaggagaagttcgtgtgcctgaactgcggcttcgagacacacgcagccgagcaagccgccctgaacatcgccagatcctggctgttcctgcggagccaggagtacaagaaataccagacaaacaagacaaccggcaacaccgataagagagccttcgtcgagacctggcagtccttttaccggaagaagcttaaggaggtgtggaaacctgccgtgcggtctggcggatctggcggaggctccaagcccgccgccgtgagcttcgccgacgtggccgtgtacttcagcgtggaggagtggggctgcctgaggcccgcccagagggccctgtacagggacgtgatgagggagacctacggccacctgggcgccctgggcttccccggccccaagcccgccctgatcagctggatggagcaggagagcgaggcctggagccccgccgcccaggaccccgaggagggcgagagcctgggcggcgccctgggcggcccaagcagcggcgcccctcctcccagcggcggcagcccagccggctccccaacctctaccgaggagggcacctctgagtccgccacccccgagagcggccctggcacctccaccgagcccagcgagggcagcgcacccggcagccctgccggcagccccacctccacagaggagggaaccagcaccgagcccagcgaaggcagcgccccaggcaccagcaccgagcctagtgagcaggagattaaacggatcaacaagatcagaagaagacttgtgaaagacagcaacaccaagaaggccggcaagacaggccccatgaaaaccctgctggttagagtgatgacacccgatctgagagagcggctggaaaacctgagaaagaagcctgaaaatatcccccagcccatcagcaatacatctagagccaacctgaataagctgctgaccgattacaccgaaatgaagaaggcgatcctgcatgtgtactgggaagagttccagaaggaccctgtgggcctgatgagccgggtggcccagcctgccagcaagaagatcgatcagaacaagctgaaacctgagatggacgagaagggcaacctgaccaccgccggctttgcctgctctcagtgtggccagcccctgttcgtgtacaagctggagcaggtgtctgagaagggcaaggcttacaccaactacttcggacggtgcaatgtggccgagcacgaaaagctgatcctgctggcccagctgaagcccgagaaggatagcgacgaagccgtgacatatagcctgggaaagtttgggcagagggccctggatttctacagcattcatgtgaccaaggagtccacccaccccgtgaagcccctggcccagatcgccggaaacagatacgcctccggacctgtgggaaaggccctgagcgacgcatgtatgggcacaatcgcctccttcctgtctaagtaccaggacatcatcatcgaacaccagaaggtggtgaagggcaaccagaagagactggagagcctgcgggagctggccggcaaggaaaacctggaataccctagcgtgaccctgccacctcagcctcacaccaaggagggcgttgatgcctacaacgaagtgatcgcccgggtgcgaatgtgggtgaacctgaacctgtggcagaagctgaagctaagcagagatgatgccaagcctctgctgagactgaagggattcccttcctttcctctggtcgagagacaggccaacgaagtggactggtgggacatggtgtgtaacgtgaagaagctgatcaacgagaaaaaggaggatggcaaggtgttttggcagaatctggctggctacaagagacaggaagccctgagaccatacctgagcagcgaggaagatcggaagaagggaaagaaattcgctcggtaccagctgggcgacctgctgctgcacctggaaaagaagcacggcgaggactggggaaaggtgtacgacgaggcctgggagcggattgacaagaaagtggaaggcctgagcaagcacatcaagctggaagaggaacggagaagcgaggacgcccagagcaaggccgccctgaccgactggctgcgggctaaggccagcttcgtgatcgagggcctgaaggaggccgacaaggacgagttctgcagatgcgagctgaagctgcagaagtggtacggggacctgcggggaaagcccttcgccatcgaagccgagaacagcatcctggacatcagcggcttcagcaagcagtacaactgtgccttcatctggcagaaggacggcgtgaagaagctgaacctgtacctgatcatcaactacttcaagggcggcaagctgcggttcaagaagatcaaacctgaagccttcgaagccaacagattctacaccgtgatcaacaaaaagagcggcgagatcgtgcccatggaggtgaacttcaacttcgacgaccccaacctgatcatcctgcctctggcctttggcaagagacagggcagagaattcatctggaacgacctgctgtccctggaaaccggcagcctgaagctggccaacggaagagtgatcgagaagacactgtacaacagaagaacccggcaggatgagcctgccctgttcgtggccctgaccttcgagcggcgggaggtcctggactcctccaatatcaaaccaatgaacctgatcggcgtggcaagaggcgaaaacatccccgccgtgatcgccctgaccgaccccgagggctgcccactgagccggtttaaggatagcctgggaaacccaacccacatcctgagaatcggcgagagctataaggagaagcagcggaccatccaggccaagaaggaggtggagcagcggagagccggcggctacagccggaagtacgccagcaaagccaagaatctggcagacgatatggtgagaaacaccgctagagatctgctgtactacgccgtgacccaggatgccatgctgatcttcgccaacctgagccggggcttcggccggcagggcaagcggaccttcatggccgagagacagtacacacggatggaggactggctgaccgccaagctggcctacgagggcctgagcaagacctacctgtccaagacactggcccagtacacctccaagacatgcagcaactgtgggtttaccatcaccagcgccgactacgacagggtgctggagaagctgaagaagacagcaacaggctggatgaccacaattaacggcaaggagctgaaggtggagggccagattacctactacaacagatacaagagacagaacgtagtcaaggacctgtccgtcgagctggatagactgagcgaagaatctgtgaacaacgacatctcctcctggacaaagggcagaagcggagaagctctgagcctcctgaagaaaagattctcccatagacccgtgcaggagaagttcgtgtgcctgaactgcggcttcgagacacacgcagccgagcaagccgccctgaacatcgccagatcctggctgttcctgcggagccaggagtacaagaaataccagacaaacaagacaaccggcaacaccgataagagagccttcgtcgagacctggcagtccttttaccggaagaagcttaaggaggtgtggaaacctgccgtgcggtctggcggatctggcggaggctcctaagcccgccgccgtgagcttcgccgacgtggccgtgtacttcagcgtggaggagtggggctgcctgaggcccgcccagagggccctgtacagggacgtgatgagggagacctacggccacctgggcgccctgggcttccccggccccaagcccgccctgatcagctggatggagcaggagagcgaggcctggagccccgccgcccaggaccccgaggagggcgagagcctgggcggcgccctgggatctggctccggcagcggccccaagaaaaagagaaaagtctaagctgccttctgcggggcttgccttctggccatgcccttcttctctcccttgcacctgtacctcttggtctttgaataaagcctgagtaggaaggctagcaaaaaaaaaaaaaaaaaaaaaaaaaaaaaaaaaaaaaaaaaaaaaaaaaaaaaaaaaaaaaaaaaaaaaaaaaaaaaaaa

SEQ ID NO: 15520 - RNA, 9485 nt, synthetic construct
  source 1..9485: mol_type = other RNA
aggaaataagagagaaaagaagagtaagaagaaatataagagccaccatggcccctaagaagaagcgtaaagtgagccggatggaacgcctcgtctacgaggtgcggcagaagtgcagaaacatcgaggacatctgcatctcctgcggatctctgaacgtgaccctggagcacccactgttcatcggcggcatgtgccagaactgtaaaaactgttttctggagtgtgcctatcaatacgacgatgacggctaccagagctactgcaccatctgttgcggcggaagagaggtgctgatgtgtggaaataacaactgctgccggtgcttctgcgtggaatgcgtggacctgctggtgggccccggcgccgcccaggccgctattaaggaagatccttggaactgctacatgtgcggccacaagggcacatacggcctgctgagacggagagaggactggcctagcagactgcagatgttcttcgccaataaccacgaccaggagttcgacccccctaaggtgtaccctcccgtccccgccgagaagagaaagcccatccgggtcctgagcctgttcgatggcatcgccaccggtctgctggtgctgaaggacctgggcatccaggtggataggtacattgcctccgaggtgtgcgaggactccatcaccgtgggaatggtgcgtcatcagggcaagatcatgtacgtgggcgacgtgcggagcgtgacacagaagcatatccaggagtggggccctttcgacctggtgatcggcggcagcccttgcaatgacctgagcatcgtgaacccagcccggaagggcctgtacgagggaaccggcagactgttcttcgagttttacagactgctgcacgacgcccggcctaaggaaggcgacgaccggcccttcttttggctgttcgagaatgtggtggccatgggagtcagcgacaagcgggatattagccggttcctggagagcaaccccgtgatgatcgatgccaaggaagtgagcgccgcccaccgggccagatacttctggggcaatctgcctggcatgaacagacccctggccagcaccgtgaacgacaagctggagctgcaggagtgcctggagcacggccggatcgccaagttcagcaaggtgagaaccatcaccacccgaagcaacagcatcaaacaaggcaaggaccagcactttcctgtgttcatgaacgagaaggaggacatcctgtggtgtaccgagatggagagagtgttcgggttcccagtccactacacagatgtcagcaacatgtctagactggccagacagagactgctgggaagaagctggtccgtccctgtgatcagacacctgttcgcccctctgaaggagtacttcgcctgcgtgagcagcggcaacagcaacgccaacagccggggccccagcttctctagcggcctggtgccactgtccctgagagggagccacatgggccccatggagatctacaaaaccgtgagcgcctggaagcggcagcctgtgcgcgtgctgagcctgtttcggaatatcgataaagtcctgaaaagcctgggattcctggagagcggctctggctccggcggtggcaccctgaagtacgtggaggatgtgacaaacgtggtcagacgggatgtggagaagtggggccccttcgatctggtgtacggcagcacccaacccctgggcagctcttgtgaccggtgccctggctggtacatgtttcagttccaccggatcctgcagtacgccctgccgagacaggagtcccagcggccattcttttggattttcatggacaacttgctgctgaccgaggatgaccaggaaactaccactcggttcctgcagaccgaagccgtgaccctgcaggacgtgagaggccgggactaccagaacgccatgcgggtgtggtccaacatccctggactgaaaagcaagcacgcacctctgacccctaaagaagaggagtacctgcaggcccaggtgcggagcagaagcaagctggacgcccctaaggtggatctgctggtgaagaattgcctcctgcccctgagagagtacttcaagtatttcagccagaatagtctgcccctgggaggcagcggcggcggcgccctggtgacatttgaggacgtcgccgtgcggttcacccaggaggaatgggctctgctggatccttctcagaaaatcctgtaccgggacgtgatgagagagacataccggaatctgacctccgtgggcatcaactgggaatgttgggaccttgaagcctgcttcagaagcctgggaagaaacctgagagtgcaggtggtgaagagaaagtgcgagctgaccaacagcggcccctgcgccgagggcggcccaagcagcggcgcccctcctcccagcggcggcagcccagccggctccccaacctctaccgaggagggcacctctgagtccgccacccccgagagcggccctggcacctccaccgagcccagcgagggcagcgcacccggcagccctgccggcagccccacctccacagaggagggaaccagcaccgagcccagcgaaggcagcgccccaggcaccagcaccgagcctagtgagcaggagattaaacggatcaacaagatcagaagaagacttgtgaaagacagcaacaccaagaaggccggcaagacaggccccatgaaaaccctgctggttagagtgatgacacccgatctgagagagcggctggaaaacctgagaaagaagcctgaaaatatcccccagcccatcagcaatacatctagagccaacctgaataagctgctgaccgattacaccgaaatgaagaaggcgatcctgcatgtgtactgggaagagttccagaaggaccctgtgggcctgatgagccgggtggcccagcctgccagcaagaagatcgatcagaacaagctgaaacctgagatggacgagaagggcaacctgaccaccgccggctttgcctgctctcagtgtggccagcccctgttcgtgtacaagctggagcaggtgtctgagaagggcaaggcttacaccaactacttcggacggtgcaatgtggccgagcacgaaaagctgatcctgctggcccagctgaagcccgagaaggatagcgacgaagccgtgacatatagcctgggaaagtttgggcagagggccctggatttctacagcattcatgtgaccaaggagtccacccaccccgtgaagcccctggcccagatcgccggaaacagatacgcctccggacctgtgggaaaggccctgagcgacgcatgtatgggcacaatcgcctccttcctgtctaagtaccaggacatcatcatcgaacaccagaaggtggtgaagggcaaccagaagagactggagagcctgcgggagctggccggcaaggaaaacctggaataccctagcgtgaccctgccacctcagcctcacaccaaggagggcgttgatgcctacaacgaagtgatcgcccgggtgcgaatgtgggtgaacctgaacctgtggcagaagctgaagctaagcagagatgatgccaagcctctgctgagactgaagggattcccttcctttcctctggtcgagagacaggccaacgaagtggactggtgggacatggtgtgtaacgtgaagaagctgatcaacgagaaaaaggaggatggcaaggtgttttggcagaatctggctggctacaagagacaggaagccctgagaccatacctgagcagcgaggaagatcggaagaagggaaagaaattcgctcggtaccagctgggcgacctgctgctgcacctggaaaagaagcacggcgaggactggggaaaggtgtacgacgaggcctgggagcggattgacaagaaagtggaaggcctgagcaagcacatcaagctggaagaggaacggagaagcgaggacgcccagagcaaggccgccctgaccgactggctgcgggctaaggccagcttcgtgatcgagggcctgaaggaggccgacaaggacgagttctgcagatgcgagctgaagctgcagaagtggtacggggacctgcggggaaagcccttcgccatcgaagccgagaacagcatcctggacatcagcggcttcagcaagcagtacaactgtgccttcatctggcagaaggacggcgtgaagaagctgaacctgtacctgatcatcaactacttcaagggcggcaagctgcggttcaagaagatcaaacctgaagccttcgaagccaacagattctacaccgtgatcaacaaaaagagcggcgagatcgtgcccatggaggtgaacttcaacttcgacgaccccaacctgatcatcctgcctctggcctttggcaagagacagggcagagaattcatctggaacgacctgctgtccctggaaaccggcagcctgaagctggccaacggaagagtgatcgagaagacactgtacaacagaagaacccggcaggatgagcctgccctgttcgtggccctgaccttcgagcggcgggaggtcctggactcctccaatatcaaaccaatgaacctgatcggcgtggcaagaggcgaaaacatccccgccgtgatcgccctgaccgaccccgagggctgcccactgagccggtttaaggatagcctgggaaacccaacccacatcctgagaatcggcgagagctataaggagaagcagcggaccatccaggccaagaaggaggtggagcagcggagagccggcggctacagccggaagtacgccagcaaagccaagaatctggcagacgatatggtgagaaacaccgctagagatctgctgtactacgccgtgacccaggatgccatgctgatcttcgccaacctgagccggggcttcggccggcagggcaagcggaccttcatggccgagagacagtacacacggatggaggactggctgaccgccaagctggcctacgagggcctgagcaagacctacctgtccaagacactggcccagtacacctccaagacatgcagcaactgtgggtttaccatcaccagcgccgactacgacagggtgctggagaagctgaagaagacagcaacaggctggatgaccacaattaacggcaaggagctgaaggtggagggccagattacctactacaacagatacaagagacagaacgtagtcaaggacctgtccgtcgagctggatagactgagcgaagaatctgtgaacaacgacatctcctcctggacaaagggcagaagcggagaagctctgagcctcctgaagaaaagattctcccatagacccgtgcaggagaagttcgtgtgcctgaactgcggcttcgagacacacgcagccgagcaagccgccctgaacatcgccagatcctggctgttcctgcggagccaggagtacaagaaataccagacaaacaagacaaccggcaacaccgataagagagccttcgtcgagacctggcagtccttttaccggaagaagcttaaggaggtgtggaaacctgccgtgcggtctggcggatctggcggaggctccctgcagggcagcgtgaccttccaggacgtggccgtggacttcagctgggaggagtggggccacctgggccccgcccagaaggagctgtacagggaggtgatgctggagaactacggcaacctggtgtgcctgggcctggccgtgagcagccccgacgtggtgtgccagctggagaggggcgagggcccctggatgcccgagggcgacgtgcccggcagcagctgcgccggctgggagaccaagggcggcccaagcagcggcgcccctcctcccagcggcggcagcccagccggctccccaacctctaccgaggagggcacctctgagtccgccacccccgagagcggccctggcacctccaccgagcccagcgagggcagcgcacccggcagccctgccggcagccccacctccacagaggagggaaccagcaccgagcccagcgaaggcagcgccccaggcaccagcaccgagcctagtgagcaggagattaaacggatcaacaagatcagaagaagacttgtgaaagacagcaacaccaagaaggccggcaagacaggccccatgaaaaccctgctggttagagtgatgacacccgatctgagagagcggctggaaaacctgagaaagaagcctgaaaatatcccccagcccatcagcaatacatctagagccaacctgaataagctgctgaccgattacaccgaaatgaagaaggcgatcctgcatgtgtactgggaagagttccagaaggaccctgtgggcctgatgagccgggtggcccagcctgccagcaagaagatcgatcagaacaagctgaaacctgagatggacgagaagggcaacctgaccaccgccggctttgcctgctctcagtgtggccagcccctgttcgtgtacaagctggagcaggtgtctgagaagggcaaggcttacaccaactacttcggacggtgcaatgtggccgagcacgaaaagctgatcctgctggcccagctgaagcccgagaaggatagcgacgaagccgtgacatatagcctgggaaagtttgggcagagggccctggatttctacagcattcatgtgaccaaggagtccacccaccccgtgaagcccctggcccagatcgccggaaacagatacgcctccggacctgtgggaaaggccctgagcgacgcatgtatgggcacaatcgcctccttcctgtctaagtaccaggacatcatcatcgaacaccagaaggtggtgaagggcaaccagaagagactggagagcctgcgggagctggccggcaaggaaaacctggaataccctagcgtgaccctgccacctcagcctcacaccaaggagggcgttgatgcctacaacgaagtgatcgcccgggtgcgaatgtgggtgaacctgaacctgtggcagaagctgaagctaagcagagatgatgccaagcctctgctgagactgaagggattcccttcctttcctctggtcgagagacaggccaacgaagtggactggtgggacatggtgtgtaacgtgaagaagctgatcaacgagaaaaaggaggatggcaaggtgttttggcagaatctggctggctacaagagacaggaagccctgagaccatacctgagcagcgaggaagatcggaagaagggaaagaaattcgctcggtaccagctgggcgacctgctgctgcacctggaaaagaagcacggcgaggactggggaaaggtgtacgacgaggcctgggagcggattgacaagaaagtggaaggcctgagcaagcacatcaagctggaagaggaacggagaagcgaggacgcccagagcaaggccgccctgaccgactggctgcgggctaaggccagcttcgtgatcgagggcctgaaggaggccgacaaggacgagttctgcagatgcgagctgaagctgcagaagtggtacggggacctgcggggaaagcccttcgccatcgaagccgagaacagcatcctggacatcagcggcttcagcaagcagtacaactgtgccttcatctggcagaaggacggcgtgaagaagctgaacctgtacctgatcatcaactacttcaagggcggcaagctgcggttcaagaagatcaaacctgaagccttcgaagccaacagattctacaccgtgatcaacaaaaagagcggcgagatcgtgcccatggaggtgaacttcaacttcgacgaccccaacctgatcatcctgcctctggcctttggcaagagacagggcagagaattcatctggaacgacctgctgtccctggaaaccggcagcctgaagctggccaacggaagagtgatcgagaagacactgtacaacagaagaacccggcaggatgagcctgccctgttcgtggccctgaccttcgagcggcgggaggtcctggactcctccaatatcaaaccaatgaacctgatcggcgtggcaagaggcgaaaacatccccgccgtgatcgccctgaccgaccccgagggctgcccactgagccggtttaaggatagcctgggaaacccaacccacatcctgagaatcggcgagagctataaggagaagcagcggaccatccaggccaagaaggaggtggagcagcggagagccggcggctacagccggaagtacgccagcaaagccaagaatctggcagacgatatggtgagaaacaccgctagagatctgctgtactacgccgtgacccaggatgccatgctgatcttcgccaacctgagccggggcttcggccggcagggcaagcggaccttcatggccgagagacagtacacacggatggaggactggctgaccgccaagctggcctacgagggcctgagcaagacctacctgtccaagacactggcccagtacacctccaagacatgcagcaactgtgggtttaccatcaccagcgccgactacgacagggtgctggagaagctgaagaagacagcaacaggctggatgaccacaattaacggcaaggagctgaaggtggagggccagattacctactacaacagatacaagagacagaacgtagtcaaggacctgtccgtcgagctggatagactgagcgaagaatctgtgaacaacgacatctcctcctggacaaagggcagaagcggagaagctctgagcctcctgaagaaaagattctcccatagacccgtgcaggagaagttcgtgtgcctgaactgcggcttcgagacacacgcagccgagcaagccgccctgaacatcgccagatcctggctgttcctgcggagccaggagtacaagaaataccagacaaacaagacaaccggcaacaccgataagagagccttcgtcgagacctggcagtccttttaccggaagaagcttaaggaggtgtggaaacctgccgtgcggtctggcggatctggcggaggctcctctgcagggcagcgtgaccttccaggacgtggccgtggacttcagctgggaggagtggggccacctgggccccgcccagaaggagctgtacagggaggtgatgctggagaactacggcaacctggtgtgcctgggcctggccgtgagcagccccgacgtggtgtgccagctggagaggggcgagggcccctggatgcccgagggcgacgtgcccggcagcagctgcgccggctgggagaccaagggatctggctccggcagcggccccaagaaaaagagaaaagtctaagctgccttctgcggggcttgccttctggccatgcccttcttctctcccttgcacctgtacctcttggtctttgaataaagcctgagtaggaaggctagcaaaaaaaaaaaaaaaaaaaaaaaaaaaaaaaaaaaaaaaaaaaaaaaaaaaaaaaaaaaaaaaaaaaaaaaaaaaaaaaa

SEQ ID NO: 15521 - RNA, 9485 nt, synthetic construct
  source 1..9485: mol_type = other RNA
aggaaataagagagaaaagaagagtaagaagaaatataagagccaccatggcccctaagaagaagcgtaaagtgagccggatggaacgcctcgtctacgaggtgcggcagaagtgcagaaacatcgaggacatctgcatctcctgcggatctctgaacgtgaccctggagcacccactgttcatcggcggcatgtgccagaactgtaaaaactgttttctggagtgtgcctatcaatacgacgatgacggctaccagagctactgcaccatctgttgcggcggaagagaggtgctgatgtgtggaaataacaactgctgccggtgcttctgcgtggaatgcgtggacctgctggtgggccccggcgccgcccaggccgctattaaggaagatccttggaactgctacatgtgcggccacaagggcacatacggcctgctgagacggagagaggactggcctagcagactgcagatgttcttcgccaataaccacgaccaggagttcgacccccctaaggtgtaccctcccgtccccgccgagaagagaaagcccatccgggtcctgagcctgttcgatggcatcgccaccggtctgctggtgctgaaggacctgggcatccaggtggataggtacattgcctccgaggtgtgcgaggactccatcaccgtgggaatggtgcgtcatcagggcaagatcatgtacgtgggcgacgtgcggagcgtgacacagaagcatatccaggagtggggccctttcgacctggtgatcggcggcagcccttgcaatgacctgagcatcgtgaacccagcccggaagggcctgtacgagggaaccggcagactgttcttcgagttttacagactgctgcacgacgcccggcctaaggaaggcgacgaccggcccttcttttggctgttcgagaatgtggtggccatgggagtcagcgacaagcgggatattagccggttcctggagagcaaccccgtgatgatcgatgccaaggaagtgagcgccgcccaccgggccagatacttctggggcaatctgcctggcatgaacagacccctggccagcaccgtgaacgacaagctggagctgcaggagtgcctggagcacggccggatcgccaagttcagcaaggtgagaaccatcaccacccgaagcaacagcatcaaacaaggcaaggaccagcactttcctgtgttcatgaacgagaaggaggacatcctgtggtgtaccgagatggagagagtgttcgggttcccagtccactacacagatgtcagcaacatgtctagactggccagacagagactgctgggaagaagctggtccgtccctgtgatcagacacctgttcgcccctctgaaggagtacttcgcctgcgtgagcagcggcaacagcaacgccaacagccggggccccagcttctctagcggcctggtgccactgtccctgagagggagccacatgggccccatggagatctacaaaaccgtgagcgcctggaagcggcagcctgtgcgcgtgctgagcctgtttcggaatatcgataaagtcctgaaaagcctgggattcctggagagcggctctggctccggcggtggcaccctgaagtacgtggaggatgtgacaaacgtggtcagacgggatgtggagaagtggggccccttcgatctggtgtacggcagcacccaacccctgggcagctcttgtgaccggtgccctggctggtacatgtttcagttccaccggatcctgcagtacgccctgccgagacaggagtcccagcggccattcttttggattttcatggacaacttgctgctgaccgaggatgaccaggaaactaccactcggttcctgcagaccgaagccgtgaccctgcaggacgtgagaggccgggactaccagaacgccatgcgggtgtggtccaacatccctggactgaaaagcaagcacgcacctctgacccctaaagaagaggagtacctgcaggcccaggtgcggagcagaagcaagctggacgcccctaaggtggatctgctggtgaagaattgcctcctgcccctgagagagtacttcaagtatttcagccagaatagtctgcccctgggaggcagcggcggcggcgccctggtgacatttgaggacgtcgccgtgcggttcacccaggaggaatgggctctgctggatccttctcagaaaatcctgtaccgggacgtgatgagagagacataccggaatctgacctccgtgggcatcaactgggaatgttgggaccttgaagcctgcttcagaagcctgggaagaaacctgagagtgcaggtggtgaagagaaagtgcgagctgaccaacagcggcccctgcgccgagggcggcccaagcagcggcgcccctcctcccagcggcggcagcccagccggctccccaacctctaccgaggagggcacctctgagtccgccacccccgagagcggccctggcacctccaccgagcccagcgagggcagcgcacccggcagccctgccggcagccccacctccacagaggagggaaccagcaccgagcccagcgaaggcagcgccccaggcaccagcaccgagcctagtgagcaggagattaaacggatcaacaagatcagaagaagacttgtgaaagacagcaacaccaagaaggccggcaagacaggccccatgaaaaccctgctggttagagtgatgacacccgatctgagagagcggctggaaaacctgagaaagaagcctgaaaatatcccccagcccatcagcaatacatctagagccaacctgaataagctgctgaccgattacaccgaaatgaagaaggcgatcctgcatgtgtactgggaagagttccagaaggaccctgtgggcctgatgagccgggtggcccagcctgccagcaagaagatcgatcagaacaagctgaaacctgagatggacgagaagggcaacctgaccaccgccggctttgcctgctctcagtgtggccagcccctgttcgtgtacaagctggagcaggtgtctgagaagggcaaggcttacaccaactacttcggacggtgcaatgtggccgagcacgaaaagctgatcctgctggcccagctgaagcccgagaaggatagcgacgaagccgtgacatatagcctgggaaagtttgggcagagggccctggatttctacagcattcatgtgaccaaggagtccacccaccccgtgaagcccctggcccagatcgccggaaacagatacgcctccggacctgtgggaaaggccctgagcgacgcatgtatgggcacaatcgcctccttcctgtctaagtaccaggacatcatcatcgaacaccagaaggtggtgaagggcaaccagaagagactggagagcctgcgggagctggccggcaaggaaaacctggaataccctagcgtgaccctgccacctcagcctcacaccaaggagggcgttgatgcctacaacgaagtgatcgcccgggtgcgaatgtgggtgaacctgaacctgtggcagaagctgaagctaagcagagatgatgccaagcctctgctgagactgaagggattcccttcctttcctctggtcgagagacaggccaacgaagtggactggtgggacatggtgtgtaacgtgaagaagctgatcaacgagaaaaaggaggatggcaaggtgttttggcagaatctggctggctacaagagacaggaagccctgagaccatacctgagcagcgaggaagatcggaagaagggaaagaaattcgctcggtaccagctgggcgacctgctgctgcacctggaaaagaagcacggcgaggactggggaaaggtgtacgacgaggcctgggagcggattgacaagaaagtggaaggcctgagcaagcacatcaagctggaagaggaacggagaagcgaggacgcccagagcaaggccgccctgaccgactggctgcgggctaaggccagcttcgtgatcgagggcctgaaggaggccgacaaggacgagttctgcagatgcgagctgaagctgcagaagtggtacggggacctgcggggaaagcccttcgccatcgaagccgagaacagcatcctggacatcagcggcttcagcaagcagtacaactgtgccttcatctggcagaaggacggcgtgaagaagctgaacctgtacctgatcatcaactacttcaagggcggcaagctgcggttcaagaagatcaaacctgaagccttcgaagccaacagattctacaccgtgatcaacaaaaagagcggcgagatcgtgcccatggaggtgaacttcaacttcgacgaccccaacctgatcatcctgcctctggcctttggcaagagacagggcagagaattcatctggaacgacctgctgtccctggaaaccggcagcctgaagctggccaacggaagagtgatcgagaagacactgtacaacagaagaacccggcaggatgagcctgccctgttcgtggccctgaccttcgagcggcgggaggtcctggactcctccaatatcaaaccaatgaacctgatcggcgtggcaagaggcgaaaacatccccgccgtgatcgccctgaccgaccccgagggctgcccactgagccggtttaaggatagcctgggaaacccaacccacatcctgagaatcggcgagagctataaggagaagcagcggaccatccaggccaagaaggaggtggagcagcggagagccggcggctacagccggaagtacgccagcaaagccaagaatctggcagacgatatggtgagaaacaccgctagagatctgctgtactacgccgtgacccaggatgccatgctgatcttcgccaacctgagccggggcttcggccggcagggcaagcggaccttcatggccgagagacagtacacacggatggaggactggctgaccgccaagctggcctacgagggcctgagcaagacctacctgtccaagacactggcccagtacacctccaagacatgcagcaactgtgggtttaccatcaccagcgccgactacgacagggtgctggagaagctgaagaagacagcaacaggctggatgaccacaattaacggcaaggagctgaaggtggagggccagattacctactacaacagatacaagagacagaacgtagtcaaggacctgtccgtcgagctggatagactgagcgaagaatctgtgaacaacgacatctcctcctggacaaagggcagaagcggagaagctctgagcctcctgaagaaaagattctcccatagacccgtgcaggagaagttcgtgtgcctgaactgcggcttcgagacacacgcagccgagcaagccgccctgaacatcgccagatcctggctgttcctgcggagccaggagtacaagaaataccagacaaacaagacaaccggcaacaccgataagagagccttcgtcgagacctggcagtccttttaccggaagaagcttaaggaggtgtggaaacctgccgtgcggtctggcggatctggcggaggctccaccctggagagcgtgaccttccaggacgtggccgtggacttcacccaggaggagtgggccctgctggacaccagccagaggaccctgttcagggaggtgatgctggagaacatcagccacctggtgagcgtgggcaaccagctgtacaagagcgacgtgatcagccacctggagcagggcgagcagctgagcagggagggcctgggcttcctgcagggccagagccccgtgatcagcgacaggggcggcccaagcagcggcgcccctcctcccagcggcggcagcccagccggctccccaacctctaccgaggagggcacctctgagtccgccacccccgagagcggccctggcacctccaccgagcccagcgagggcagcgcacccggcagccctgccggcagccccacctccacagaggagggaaccagcaccgagcccagcgaaggcagcgccccaggcaccagcaccgagcctagtgagcaggagattaaacggatcaacaagatcagaagaagacttgtgaaagacagcaacaccaagaaggccggcaagacaggccccatgaaaaccctgctggttagagtgatgacacccgatctgagagagcggctggaaaacctgagaaagaagcctgaaaatatcccccagcccatcagcaatacatctagagccaacctgaataagctgctgaccgattacaccgaaatgaagaaggcgatcctgcatgtgtactgggaagagttccagaaggaccctgtgggcctgatgagccgggtggcccagcctgccagcaagaagatcgatcagaacaagctgaaacctgagatggacgagaagggcaacctgaccaccgccggctttgcctgctctcagtgtggccagcccctgttcgtgtacaagctggagcaggtgtctgagaagggcaaggcttacaccaactacttcggacggtgcaatgtggccgagcacgaaaagctgatcctgctggcccagctgaagcccgagaaggatagcgacgaagccgtgacatatagcctgggaaagtttgggcagagggccctggatttctacagcattcatgtgaccaaggagtccacccaccccgtgaagcccctggcccagatcgccggaaacagatacgcctccggacctgtgggaaaggccctgagcgacgcatgtatgggcacaatcgcctccttcctgtctaagtaccaggacatcatcatcgaacaccagaaggtggtgaagggcaaccagaagagactggagagcctgcgggagctggccggcaaggaaaacctggaataccctagcgtgaccctgccacctcagcctcacaccaaggagggcgttgatgcctacaacgaagtgatcgcccgggtgcgaatgtgggtgaacctgaacctgtggcagaagctgaagctaagcagagatgatgccaagcctctgctgagactgaagggattcccttcctttcctctggtcgagagacaggccaacgaagtggactggtgggacatggtgtgtaacgtgaagaagctgatcaacgagaaaaaggaggatggcaaggtgttttggcagaatctggctggctacaagagacaggaagccctgagaccatacctgagcagcgaggaagatcggaagaagggaaagaaattcgctcggtaccagctgggcgacctgctgctgcacctggaaaagaagcacggcgaggactggggaaaggtgtacgacgaggcctgggagcggattgacaagaaagtggaaggcctgagcaagcacatcaagctggaagaggaacggagaagcgaggacgcccagagcaaggccgccctgaccgactggctgcgggctaaggccagcttcgtgatcgagggcctgaaggaggccgacaaggacgagttctgcagatgcgagctgaagctgcagaagtggtacggggacctgcggggaaagcccttcgccatcgaagccgagaacagcatcctggacatcagcggcttcagcaagcagtacaactgtgccttcatctggcagaaggacggcgtgaagaagctgaacctgtacctgatcatcaactacttcaagggcggcaagctgcggttcaagaagatcaaacctgaagccttcgaagccaacagattctacaccgtgatcaacaaaaagagcggcgagatcgtgcccatggaggtgaacttcaacttcgacgaccccaacctgatcatcctgcctctggcctttggcaagagacagggcagagaattcatctggaacgacctgctgtccctggaaaccggcagcctgaagctggccaacggaagagtgatcgagaagacactgtacaacagaagaacccggcaggatgagcctgccctgttcgtggccctgaccttcgagcggcgggaggtcctggactcctccaatatcaaaccaatgaacctgatcggcgtggcaagaggcgaaaacatccccgccgtgatcgccctgaccgaccccgagggctgcccactgagccggtttaaggatagcctgggaaacccaacccacatcctgagaatcggcgagagctataaggagaagcagcggaccatccaggccaagaaggaggtggagcagcggagagccggcggctacagccggaagtacgccagcaaagccaagaatctggcagacgatatggtgagaaacaccgctagagatctgctgtactacgccgtgacccaggatgccatgctgatcttcgccaacctgagccggggcttcggccggcagggcaagcggaccttcatggccgagagacagtacacacggatggaggactggctgaccgccaagctggcctacgagggcctgagcaagacctacctgtccaagacactggcccagtacacctccaagacatgcagcaactgtgggtttaccatcaccagcgccgactacgacagggtgctggagaagctgaagaagacagcaacaggctggatgaccacaattaacggcaaggagctgaaggtggagggccagattacctactacaacagatacaagagacagaacgtagtcaaggacctgtccgtcgagctggatagactgagcgaagaatctgtgaacaacgacatctcctcctggacaaagggcagaagcggagaagctctgagcctcctgaagaaaagattctcccatagacccgtgcaggagaagttcgtgtgcctgaactgcggcttcgagacacacgcagccgagcaagccgccctgaacatcgccagatcctggctgttcctgcggagccaggagtacaagaaataccagacaaacaagacaaccggcaacaccgataagagagccttcgtcgagacctggcagtccttttaccggaagaagcttaaggaggtgtggaaacctgccgtgcggtctggcggatctggcggaggctcctaccctggagagcgtgaccttccaggacgtggccgtggacttcacccaggaggagtgggccctgctggacaccagccagaggaccctgttcagggaggtgatgctggagaacatcagccacctggtgagcgtgggcaaccagctgtacaagagcgacgtgatcagccacctggagcagggcgagcagctgagcagggagggcctgggcttcctgcagggccagagccccgtgatcagcgacaggggatctggctccggcagcggccccaagaaaaagagaaaagtctaagctgccttctgcggggcttgccttctggccatgcccttcttctctcccttgcacctgtacctcttggtctttgaataaagcctgagtaggaaggctagcaaaaaaaaaaaaaaaaaaaaaaaaaaaaaaaaaaaaaaaaaaaaaaaaaaaaaaaaaaaaaaaaaaaaaaaaaaaaaaaa

SEQ ID NO: 15522 - RNA, 9485 nt, synthetic construct
  source 1..9485: mol_type = other RNA
aggaaataagagagaaaagaagagtaagaagaaatataagagccaccatggcccctaagaagaagcgtaaagtgagccggatggaacgcctcgtctacgaggtgcggcagaagtgcagaaacatcgaggacatctgcatctcctgcggatctctgaacgtgaccctggagcacccactgttcatcggcggcatgtgccagaactgtaaaaactgttttctggagtgtgcctatcaatacgacgatgacggctaccagagctactgcaccatctgttgcggcggaagagaggtgctgatgtgtggaaataacaactgctgccggtgcttctgcgtggaatgcgtggacctgctggtgggccccggcgccgcccaggccgctattaaggaagatccttggaactgctacatgtgcggccacaagggcacatacggcctgctgagacggagagaggactggcctagcagactgcagatgttcttcgccaataaccacgaccaggagttcgacccccctaaggtgtaccctcccgtccccgccgagaagagaaagcccatccgggtcctgagcctgttcgatggcatcgccaccggtctgctggtgctgaaggacctgggcatccaggtggataggtacattgcctccgaggtgtgcgaggactccatcaccgtgggaatggtgcgtcatcagggcaagatcatgtacgtgggcgacgtgcggagcgtgacacagaagcatatccaggagtggggccctttcgacctggtgatcggcggcagcccttgcaatgacctgagcatcgtgaacccagcccggaagggcctgtacgagggaaccggcagactgttcttcgagttttacagactgctgcacgacgcccggcctaaggaaggcgacgaccggcccttcttttggctgttcgagaatgtggtggccatgggagtcagcgacaagcgggatattagccggttcctggagagcaaccccgtgatgatcgatgccaaggaagtgagcgccgcccaccgggccagatacttctggggcaatctgcctggcatgaacagacccctggccagcaccgtgaacgacaagctggagctgcaggagtgcctggagcacggccggatcgccaagttcagcaaggtgagaaccatcaccacccgaagcaacagcatcaaacaaggcaaggaccagcactttcctgtgttcatgaacgagaaggaggacatcctgtggtgtaccgagatggagagagtgttcgggttcccagtccactacacagatgtcagcaacatgtctagactggccagacagagactgctgggaagaagctggtccgtccctgtgatcagacacctgttcgcccctctgaaggagtacttcgcctgcgtgagcagcggcaacagcaacgccaacagccggggccccagcttctctagcggcctggtgccactgtccctgagagggagccacatgggccccatggagatctacaaaaccgtgagcgcctggaagcggcagcctgtgcgcgtgctgagcctgtttcggaatatcgataaagtcctgaaaagcctgggattcctggagagcggctctggctccggcggtggcaccctgaagtacgtggaggatgtgacaaacgtggtcagacgggatgtggagaagtggggccccttcgatctggtgtacggcagcacccaacccctgggcagctcttgtgaccggtgccctggctggtacatgtttcagttccaccggatcctgcagtacgccctgccgagacaggagtcccagcggccattcttttggattttcatggacaacttgctgctgaccgaggatgaccaggaaactaccactcggttcctgcagaccgaagccgtgaccctgcaggacgtgagaggccgggactaccagaacgccatgcgggtgtggtccaacatccctggactgaaaagcaagcacgcacctctgacccctaaagaagaggagtacctgcaggcccaggtgcggagcagaagcaagctggacgcccctaaggtggatctgctggtgaagaattgcctcctgcccctgagagagtacttcaagtatttcagccagaatagtctgcccctgggaggcagcggcggcggcgccctggtgacatttgaggacgtcgccgtgcggttcacccaggaggaatgggctctgctggatccttctcagaaaatcctgtaccgggacgtgatgagagagacataccggaatctgacctccgtgggcatcaactgggaatgttgggaccttgaagcctgcttcagaagcctgggaagaaacctgagagtgcaggtggtgaagagaaagtgcgagctgaccaacagcggcccctgcgccgagggcggcccaagcagcggcgcccctcctcccagcggcggcagcccagccggctccccaacctctaccgaggagggcacctctgagtccgccacccccgagagcggccctggcacctccaccgagcccagcgagggcagcgcacccggcagccctgccggcagccccacctccacagaggagggaaccagcaccgagcccagcgaaggcagcgccccaggcaccagcaccgagcctagtgagcaggagattaaacggatcaacaagatcagaagaagacttgtgaaagacagcaacaccaagaaggccggcaagacaggccccatgaaaaccctgctggttagagtgatgacacccgatctgagagagcggctggaaaacctgagaaagaagcctgaaaatatcccccagcccatcagcaatacatctagagccaacctgaataagctgctgaccgattacaccgaaatgaagaaggcgatcctgcatgtgtactgggaagagttccagaaggaccctgtgggcctgatgagccgggtggcccagcctgccagcaagaagatcgatcagaacaagctgaaacctgagatggacgagaagggcaacctgaccaccgccggctttgcctgctctcagtgtggccagcccctgttcgtgtacaagctggagcaggtgtctgagaagggcaaggcttacaccaactacttcggacggtgcaatgtggccgagcacgaaaagctgatcctgctggcccagctgaagcccgagaaggatagcgacgaagccgtgacatatagcctgggaaagtttgggcagagggccctggatttctacagcattcatgtgaccaaggagtccacccaccccgtgaagcccctggcccagatcgccggaaacagatacgcctccggacctgtgggaaaggccctgagcgacgcatgtatgggcacaatcgcctccttcctgtctaagtaccaggacatcatcatcgaacaccagaaggtggtgaagggcaaccagaagagactggagagcctgcgggagctggccggcaaggaaaacctggaataccctagcgtgaccctgccacctcagcctcacaccaaggagggcgttgatgcctacaacgaagtgatcgcccgggtgcgaatgtgggtgaacctgaacctgtggcagaagctgaagctaagcagagatgatgccaagcctctgctgagactgaagggattcccttcctttcctctggtcgagagacaggccaacgaagtggactggtgggacatggtgtgtaacgtgaagaagctgatcaacgagaaaaaggaggatggcaaggtgttttggcagaatctggctggctacaagagacaggaagccctgagaccatacctgagcagcgaggaagatcggaagaagggaaagaaattcgctcggtaccagctgggcgacctgctgctgcacctggaaaagaagcacggcgaggactggggaaaggtgtacgacgaggcctgggagcggattgacaagaaagtggaaggcctgagcaagcacatcaagctggaagaggaacggagaagcgaggacgcccagagcaaggccgccctgaccgactggctgcgggctaaggccagcttcgtgatcgagggcctgaaggaggccgacaaggacgagttctgcagatgcgagctgaagctgcagaagtggtacggggacctgcggggaaagcccttcgccatcgaagccgagaacagcatcctggacatcagcggcttcagcaagcagtacaactgtgccttcatctggcagaaggacggcgtgaagaagctgaacctgtacctgatcatcaactacttcaagggcggcaagctgcggttcaagaagatcaaacctgaagccttcgaagccaacagattctacaccgtgatcaacaaaaagagcggcgagatcgtgcccatggaggtgaacttcaacttcgacgaccccaacctgatcatcctgcctctggcctttggcaagagacagggcagagaattcatctggaacgacctgctgtccctggaaaccggcagcctgaagctggccaacggaagagtgatcgagaagacactgtacaacagaagaacccggcaggatgagcctgccctgttcgtggccctgaccttcgagcggcgggaggtcctggactcctccaatatcaaaccaatgaacctgatcggcgtggcaagaggcgaaaacatccccgccgtgatcgccctgaccgaccccgagggctgcccactgagccggtttaaggatagcctgggaaacccaacccacatcctgagaatcggcgagagctataaggagaagcagcggaccatccaggccaagaaggaggtggagcagcggagagccggcggctacagccggaagtacgccagcaaagccaagaatctggcagacgatatggtgagaaacaccgctagagatctgctgtactacgccgtgacccaggatgccatgctgatcttcgccaacctgagccggggcttcggccggcagggcaagcggaccttcatggccgagagacagtacacacggatggaggactggctgaccgccaagctggcctacgagggcctgagcaagacctacctgtccaagacactggcccagtacacctccaagacatgcagcaactgtgggtttaccatcaccagcgccgactacgacagggtgctggagaagctgaagaagacagcaacaggctggatgaccacaattaacggcaaggagctgaaggtggagggccagattacctactacaacagatacaagagacagaacgtagtcaaggacctgtccgtcgagctggatagactgagcgaagaatctgtgaacaacgacatctcctcctggacaaagggcagaagcggagaagctctgagcctcctgaagaaaagattctcccatagacccgtgcaggagaagttcgtgtgcctgaactgcggcttcgagacacacgcagccgagcaagccgccctgaacatcgccagatcctggctgttcctgcggagccaggagtacaagaaataccagacaaacaagacaaccggcaacaccgataagagagccttcgtcgagacctggcagtccttttaccggaagaagcttaaggaggtgtggaaacctgccgtgcggtctggcggatctggcggaggctcccaccaggaggtggtgaccttcgaggacgtggccgtgtacttcacccagaccgagtgggccggcctgagccccgcccagagggccctgtacaggagcgtgatgctggagatctacggcaacctgaccagcctgggctaccccgtgcccaagcccgccctggtgagcctgctggagaggggcgacctgcccgtgggcctggagacccaggacaacccccccgcccagggcaccagggacatctacggcggcccaagcagcggcgcccctcctcccagcggcggcagcccagccggctccccaacctctaccgaggagggcacctctgagtccgccacccccgagagcggccctggcacctccaccgagcccagcgagggcagcgcacccggcagccctgccggcagccccacctccacagaggagggaaccagcaccgagcccagcgaaggcagcgccccaggcaccagcaccgagcctagtgagcaggagattaaacggatcaacaagatcagaagaagacttgtgaaagacagcaacaccaagaaggccggcaagacaggccccatgaaaaccctgctggttagagtgatgacacccgatctgagagagcggctggaaaacctgagaaagaagcctgaaaatatcccccagcccatcagcaatacatctagagccaacctgaataagctgctgaccgattacaccgaaatgaagaaggcgatcctgcatgtgtactgggaagagttccagaaggaccctgtgggcctgatgagccgggtggcccagcctgccagcaagaagatcgatcagaacaagctgaaacctgagatggacgagaagggcaacctgaccaccgccggctttgcctgctctcagtgtggccagcccctgttcgtgtacaagctggagcaggtgtctgagaagggcaaggcttacaccaactacttcggacggtgcaatgtggccgagcacgaaaagctgatcctgctggcccagctgaagcccgagaaggatagcgacgaagccgtgacatatagcctgggaaagtttgggcagagggccctggatttctacagcattcatgtgaccaaggagtccacccaccccgtgaagcccctggcccagatcgccggaaacagatacgcctccggacctgtgggaaaggccctgagcgacgcatgtatgggcacaatcgcctccttcctgtctaagtaccaggacatcatcatcgaacaccagaaggtggtgaagggcaaccagaagagactggagagcctgcgggagctggccggcaaggaaaacctggaataccctagcgtgaccctgccacctcagcctcacaccaaggagggcgttgatgcctacaacgaagtgatcgcccgggtgcgaatgtgggtgaacctgaacctgtggcagaagctgaagctaagcagagatgatgccaagcctctgctgagactgaagggattcccttcctttcctctggtcgagagacaggccaacgaagtggactggtgggacatggtgtgtaacgtgaagaagctgatcaacgagaaaaaggaggatggcaaggtgttttggcagaatctggctggctacaagagacaggaagccctgagaccatacctgagcagcgaggaagatcggaagaagggaaagaaattcgctcggtaccagctgggcgacctgctgctgcacctggaaaagaagcacggcgaggactggggaaaggtgtacgacgaggcctgggagcggattgacaagaaagtggaaggcctgagcaagcacatcaagctggaagaggaacggagaagcgaggacgcccagagcaaggccgccctgaccgactggctgcgggctaaggccagcttcgtgatcgagggcctgaaggaggccgacaaggacgagttctgcagatgcgagctgaagctgcagaagtggtacggggacctgcggggaaagcccttcgccatcgaagccgagaacagcatcctggacatcagcggcttcagcaagcagtacaactgtgccttcatctggcagaaggacggcgtgaagaagctgaacctgtacctgatcatcaactacttcaagggcggcaagctgcggttcaagaagatcaaacctgaagccttcgaagccaacagattctacaccgtgatcaacaaaaagagcggcgagatcgtgcccatggaggtgaacttcaacttcgacgaccccaacctgatcatcctgcctctggcctttggcaagagacagggcagagaattcatctggaacgacctgctgtccctggaaaccggcagcctgaagctggccaacggaagagtgatcgagaagacactgtacaacagaagaacccggcaggatgagcctgccctgttcgtggccctgaccttcgagcggcgggaggtcctggactcctccaatatcaaaccaatgaacctgatcggcgtggcaagaggcgaaaacatccccgccgtgatcgccctgaccgaccccgagggctgcccactgagccggtttaaggatagcctgggaaacccaacccacatcctgagaatcggcgagagctataaggagaagcagcggaccatccaggccaagaaggaggtggagcagcggagagccggcggctacagccggaagtacgccagcaaagccaagaatctggcagacgatatggtgagaaacaccgctagagatctgctgtactacgccgtgacccaggatgccatgctgatcttcgccaacctgagccggggcttcggccggcagggcaagcggaccttcatggccgagagacagtacacacggatggaggactggctgaccgccaagctggcctacgagggcctgagcaagacctacctgtccaagacactggcccagtacacctccaagacatgcagcaactgtgggtttaccatcaccagcgccgactacgacagggtgctggagaagctgaagaagacagcaacaggctggatgaccacaattaacggcaaggagctgaaggtggagggccagattacctactacaacagatacaagagacagaacgtagtcaaggacctgtccgtcgagctggatagactgagcgaagaatctgtgaacaacgacatctcctcctggacaaagggcagaagcggagaagctctgagcctcctgaagaaaagattctcccatagacccgtgcaggagaagttcgtgtgcctgaactgcggcttcgagacacacgcagccgagcaagccgccctgaacatcgccagatcctggctgttcctgcggagccaggagtacaagaaataccagacaaacaagacaaccggcaacaccgataagagagccttcgtcgagacctggcagtccttttaccggaagaagcttaaggaggtgtggaaacctgccgtgcggtctggcggatctggcggaggctcctcaccaggaggtggtgaccttcgaggacgtggccgtgtacttcacccagaccgagtgggccggcctgagccccgcccagagggccctgtacaggagcgtgatgctggagatctacggcaacctgaccagcctgggctaccccgtgcccaagcccgccctggtgagcctgctggagaggggcgacctgcccgtgggcctggagacccaggacaacccccccgcccagggcaccagggacatctacggatctggctccggcagcggccccaagaaaaagagaaaagtctaagctgccttctgcggggcttgccttctggccatgcccttcttctctcccttgcacctgtacctcttggtctttgaataaagcctgagtaggaaggctagcaaaaaaaaaaaaaaaaaaaaaaaaaaaaaaaaaaaaaaaaaaaaaaaaaaaaaaaaaaaaaaaaaaaaaaaaaaaaaaaa

SEQ ID NO: 15523 - RNA, 9485 nt, synthetic construct
  source 1..9485: mol_type = other RNA
aggaaataagagagaaaagaagagtaagaagaaatataagagccaccatggcccctaagaagaagcgtaaagtgagccggatggaacgcctcgtctacgaggtgcggcagaagtgcagaaacatcgaggacatctgcatctcctgcggatctctgaacgtgaccctggagcacccactgttcatcggcggcatgtgccagaactgtaaaaactgttttctggagtgtgcctatcaatacgacgatgacggctaccagagctactgcaccatctgttgcggcggaagagaggtgctgatgtgtggaaataacaactgctgccggtgcttctgcgtggaatgcgtggacctgctggtgggccccggcgccgcccaggccgctattaaggaagatccttggaactgctacatgtgcggccacaagggcacatacggcctgctgagacggagagaggactggcctagcagactgcagatgttcttcgccaataaccacgaccaggagttcgacccccctaaggtgtaccctcccgtccccgccgagaagagaaagcccatccgggtcctgagcctgttcgatggcatcgccaccggtctgctggtgctgaaggacctgggcatccaggtggataggtacattgcctccgaggtgtgcgaggactccatcaccgtgggaatggtgcgtcatcagggcaagatcatgtacgtgggcgacgtgcggagcgtgacacagaagcatatccaggagtggggccctttcgacctggtgatcggcggcagcccttgcaatgacctgagcatcgtgaacccagcccggaagggcctgtacgagggaaccggcagactgttcttcgagttttacagactgctgcacgacgcccggcctaaggaaggcgacgaccggcccttcttttggctgttcgagaatgtggtggccatgggagtcagcgacaagcgggatattagccggttcctggagagcaaccccgtgatgatcgatgccaaggaagtgagcgccgcccaccgggccagatacttctggggcaatctgcctggcatgaacagacccctggccagcaccgtgaacgacaagctggagctgcaggagtgcctggagcacggccggatcgccaagttcagcaaggtgagaaccatcaccacccgaagcaacagcatcaaacaaggcaaggaccagcactttcctgtgttcatgaacgagaaggaggacatcctgtggtgtaccgagatggagagagtgttcgggttcccagtccactacacagatgtcagcaacatgtctagactggccagacagagactgctgggaagaagctggtccgtccctgtgatcagacacctgttcgcccctctgaaggagtacttcgcctgcgtgagcagcggcaacagcaacgccaacagccggggccccagcttctctagcggcctggtgccactgtccctgagagggagccacatgggccccatggagatctacaaaaccgtgagcgcctggaagcggcagcctgtgcgcgtgctgagcctgtttcggaatatcgataaagtcctgaaaagcctgggattcctggagagcggctctggctccggcggtggcaccctgaagtacgtggaggatgtgacaaacgtggtcagacgggatgtggagaagtggggccccttcgatctggtgtacggcagcacccaacccctgggcagctcttgtgaccggtgccctggctggtacatgtttcagttccaccggatcctgcagtacgccctgccgagacaggagtcccagcggccattcttttggattttcatggacaacttgctgctgaccgaggatgaccaggaaactaccactcggttcctgcagaccgaagccgtgaccctgcaggacgtgagaggccgggactaccagaacgccatgcgggtgtggtccaacatccctggactgaaaagcaagcacgcacctctgacccctaaagaagaggagtacctgcaggcccaggtgcggagcagaagcaagctggacgcccctaaggtggatctgctggtgaagaattgcctcctgcccctgagagagtacttcaagtatttcagccagaatagtctgcccctgggaggcagcggcggcggcgccctggtgacatttgaggacgtcgccgtgcggttcacccaggaggaatgggctctgctggatccttctcagaaaatcctgtaccgggacgtgatgagagagacataccggaatctgacctccgtgggcatcaactgggaatgttgggaccttgaagcctgcttcagaagcctgggaagaaacctgagagtgcaggtggtgaagagaaagtgcgagctgaccaacagcggcccctgcgccgagggcggcccaagcagcggcgcccctcctcccagcggcggcagcccagccggctccccaacctctaccgaggagggcacctctgagtccgccacccccgagagcggccctggcacctccaccgagcccagcgagggcagcgcacccggcagccctgccggcagccccacctccacagaggagggaaccagcaccgagcccagcgaaggcagcgccccaggcaccagcaccgagcctagtgagcaggagattaaacggatcaacaagatcagaagaagacttgtgaaagacagcaacaccaagaaggccggcaagacaggccccatgaaaaccctgctggttagagtgatgacacccgatctgagagagcggctggaaaacctgagaaagaagcctgaaaatatcccccagcccatcagcaatacatctagagccaacctgaataagctgctgaccgattacaccgaaatgaagaaggcgatcctgcatgtgtactgggaagagttccagaaggaccctgtgggcctgatgagccgggtggcccagcctgccagcaagaagatcgatcagaacaagctgaaacctgagatggacgagaagggcaacctgaccaccgccggctttgcctgctctcagtgtggccagcccctgttcgtgtacaagctggagcaggtgtctgagaagggcaaggcttacaccaactacttcggacggtgcaatgtggccgagcacgaaaagctgatcctgctggcccagctgaagcccgagaaggatagcgacgaagccgtgacatatagcctgggaaagtttgggcagagggccctggatttctacagcattcatgtgaccaaggagtccacccaccccgtgaagcccctggcccagatcgccggaaacagatacgcctccggacctgtgggaaaggccctgagcgacgcatgtatgggcacaatcgcctccttcctgtctaagtaccaggacatcatcatcgaacaccagaaggtggtgaagggcaaccagaagagactggagagcctgcgggagctggccggcaaggaaaacctggaataccctagcgtgaccctgccacctcagcctcacaccaaggagggcgttgatgcctacaacgaagtgatcgcccgggtgcgaatgtgggtgaacctgaacctgtggcagaagctgaagctaagcagagatgatgccaagcctctgctgagactgaagggattcccttcctttcctctggtcgagagacaggccaacgaagtggactggtgggacatggtgtgtaacgtgaagaagctgatcaacgagaaaaaggaggatggcaaggtgttttggcagaatctggctggctacaagagacaggaagccctgagaccatacctgagcagcgaggaagatcggaagaagggaaagaaattcgctcggtaccagctgggcgacctgctgctgcacctggaaaagaagcacggcgaggactggggaaaggtgtacgacgaggcctgggagcggattgacaagaaagtggaaggcctgagcaagcacatcaagctggaagaggaacggagaagcgaggacgcccagagcaaggccgccctgaccgactggctgcgggctaaggccagcttcgtgatcgagggcctgaaggaggccgacaaggacgagttctgcagatgcgagctgaagctgcagaagtggtacggggacctgcggggaaagcccttcgccatcgaagccgagaacagcatcctggacatcagcggcttcagcaagcagtacaactgtgccttcatctggcagaaggacggcgtgaagaagctgaacctgtacctgatcatcaactacttcaagggcggcaagctgcggttcaagaagatcaaacctgaagccttcgaagccaacagattctacaccgtgatcaacaaaaagagcggcgagatcgtgcccatggaggtgaacttcaacttcgacgaccccaacctgatcatcctgcctctggcctttggcaagagacagggcagagaattcatctggaacgacctgctgtccctggaaaccggcagcctgaagctggccaacggaagagtgatcgagaagacactgtacaacagaagaacccggcaggatgagcctgccctgttcgtggccctgaccttcgagcggcgggaggtcctggactcctccaatatcaaaccaatgaacctgatcggcgtggcaagaggcgaaaacatccccgccgtgatcgccctgaccgaccccgagggctgcccactgagccggtttaaggatagcctgggaaacccaacccacatcctgagaatcggcgagagctataaggagaagcagcggaccatccaggccaagaaggaggtggagcagcggagagccggcggctacagccggaagtacgccagcaaagccaagaatctggcagacgatatggtgagaaacaccgctagagatctgctgtactacgccgtgacccaggatgccatgctgatcttcgccaacctgagccggggcttcggccggcagggcaagcggaccttcatggccgagagacagtacacacggatggaggactggctgaccgccaagctggcctacgagggcctgagcaagacctacctgtccaagacactggcccagtacacctccaagacatgcagcaactgtgggtttaccatcaccagcgccgactacgacagggtgctggagaagctgaagaagacagcaacaggctggatgaccacaattaacggcaaggagctgaaggtggagggccagattacctactacaacagatacaagagacagaacgtagtcaaggacctgtccgtcgagctggatagactgagcgaagaatctgtgaacaacgacatctcctcctggacaaagggcagaagcggagaagctctgagcctcctgaagaaaagattctcccatagacccgtgcaggagaagttcgtgtgcctgaactgcggcttcgagacacacgcagccgagcaagccgccctgaacatcgccagatcctggctgttcctgcggagccaggagtacaagaaataccagacaaacaagacaaccggcaacaccgataagagagccttcgtcgagacctggcagtccttttaccggaagaagcttaaggaggtgtggaaacctgccgtgcggtctggcggatctggcggaggctccctggacgcccccgtgaccttcgaggacgtggccgtgtacttcagcgagaacgagtggacctgcctgacctgcccccagagggccctgtacagggacgtgatgctggagaactacggcgccgtggccagcctggccttcctgttccccaagcccgccctgatcagcaggctggagaggggcgaggccccctggtgcagcgccccccagggcgccctggacggcgagggctggaagggcgtgagcggcggcccaagcagcggcgcccctcctcccagcggcggcagcccagccggctccccaacctctaccgaggagggcacctctgagtccgccacccccgagagcggccctggcacctccaccgagcccagcgagggcagcgcacccggcagccctgccggcagccccacctccacagaggagggaaccagcaccgagcccagcgaaggcagcgccccaggcaccagcaccgagcctagtgagcaggagattaaacggatcaacaagatcagaagaagacttgtgaaagacagcaacaccaagaaggccggcaagacaggccccatgaaaaccctgctggttagagtgatgacacccgatctgagagagcggctggaaaacctgagaaagaagcctgaaaatatcccccagcccatcagcaatacatctagagccaacctgaataagctgctgaccgattacaccgaaatgaagaaggcgatcctgcatgtgtactgggaagagttccagaaggaccctgtgggcctgatgagccgggtggcccagcctgccagcaagaagatcgatcagaacaagctgaaacctgagatggacgagaagggcaacctgaccaccgccggctttgcctgctctcagtgtggccagcccctgttcgtgtacaagctggagcaggtgtctgagaagggcaaggcttacaccaactacttcggacggtgcaatgtggccgagcacgaaaagctgatcctgctggcccagctgaagcccgagaaggatagcgacgaagccgtgacatatagcctgggaaagtttgggcagagggccctggatttctacagcattcatgtgaccaaggagtccacccaccccgtgaagcccctggcccagatcgccggaaacagatacgcctccggacctgtgggaaaggccctgagcgacgcatgtatgggcacaatcgcctccttcctgtctaagtaccaggacatcatcatcgaacaccagaaggtggtgaagggcaaccagaagagactggagagcctgcgggagctggccggcaaggaaaacctggaataccctagcgtgaccctgccacctcagcctcacaccaaggagggcgttgatgcctacaacgaagtgatcgcccgggtgcgaatgtgggtgaacctgaacctgtggcagaagctgaagctaagcagagatgatgccaagcctctgctgagactgaagggattcccttcctttcctctggtcgagagacaggccaacgaagtggactggtgggacatggtgtgtaacgtgaagaagctgatcaacgagaaaaaggaggatggcaaggtgttttggcagaatctggctggctacaagagacaggaagccctgagaccatacctgagcagcgaggaagatcggaagaagggaaagaaattcgctcggtaccagctgggcgacctgctgctgcacctggaaaagaagcacggcgaggactggggaaaggtgtacgacgaggcctgggagcggattgacaagaaagtggaaggcctgagcaagcacatcaagctggaagaggaacggagaagcgaggacgcccagagcaaggccgccctgaccgactggctgcgggctaaggccagcttcgtgatcgagggcctgaaggaggccgacaaggacgagttctgcagatgcgagctgaagctgcagaagtggtacggggacctgcggggaaagcccttcgccatcgaagccgagaacagcatcctggacatcagcggcttcagcaagcagtacaactgtgccttcatctggcagaaggacggcgtgaagaagctgaacctgtacctgatcatcaactacttcaagggcggcaagctgcggttcaagaagatcaaacctgaagccttcgaagccaacagattctacaccgtgatcaacaaaaagagcggcgagatcgtgcccatggaggtgaacttcaacttcgacgaccccaacctgatcatcctgcctctggcctttggcaagagacagggcagagaattcatctggaacgacctgctgtccctggaaaccggcagcctgaagctggccaacggaagagtgatcgagaagacactgtacaacagaagaacccggcaggatgagcctgccctgttcgtggccctgaccttcgagcggcgggaggtcctggactcctccaatatcaaaccaatgaacctgatcggcgtggcaagaggcgaaaacatccccgccgtgatcgccctgaccgaccccgagggctgcccactgagccggtttaaggatagcctgggaaacccaacccacatcctgagaatcggcgagagctataaggagaagcagcggaccatccaggccaagaaggaggtggagcagcggagagccggcggctacagccggaagtacgccagcaaagccaagaatctggcagacgatatggtgagaaacaccgctagagatctgctgtactacgccgtgacccaggatgccatgctgatcttcgccaacctgagccggggcttcggccggcagggcaagcggaccttcatggccgagagacagtacacacggatggaggactggctgaccgccaagctggcctacgagggcctgagcaagacctacctgtccaagacactggcccagtacacctccaagacatgcagcaactgtgggtttaccatcaccagcgccgactacgacagggtgctggagaagctgaagaagacagcaacaggctggatgaccacaattaacggcaaggagctgaaggtggagggccagattacctactacaacagatacaagagacagaacgtagtcaaggacctgtccgtcgagctggatagactgagcgaagaatctgtgaacaacgacatctcctcctggacaaagggcagaagcggagaagctctgagcctcctgaagaaaagattctcccatagacccgtgcaggagaagttcgtgtgcctgaactgcggcttcgagacacacgcagccgagcaagccgccctgaacatcgccagatcctggctgttcctgcggagccaggagtacaagaaataccagacaaacaagacaaccggcaacaccgataagagagccttcgtcgagacctggcagtccttttaccggaagaagcttaaggaggtgtggaaacctgccgtgcggtctggcggatctggcggaggctcctctggacgcccccgtgaccttcgaggacgtggccgtgtacttcagcgagaacgagtggacctgcctgacctgcccccagagggccctgtacagggacgtgatgctggagaactacggcgccgtggccagcctggccttcctgttccccaagcccgccctgatcagcaggctggagaggggcgaggccccctggtgcagcgccccccagggcgccctggacggcgagggctggaagggcgtgagcggatctggctccggcagcggccccaagaaaaagagaaaagtctaagctgccttctgcggggcttgccttctggccatgcccttcttctctcccttgcacctgtacctcttggtctttgaataaagcctgagtaggaaggctagcaaaaaaaaaaaaaaaaaaaaaaaaaaaaaaaaaaaaaaaaaaaaaaaaaaaaaaaaaaaaaaaaaaaaaaaaaaaaaaaa

SEQ ID NO: 15524 - RNA, 9485 nt, synthetic construct
  source 1..9485: mol_type = other RNA
aggaaataagagagaaaagaagagtaagaagaaatataagagccaccatggcccctaagaagaagcgtaaagtgagccggatggaacgcctcgtctacgaggtgcggcagaagtgcagaaacatcgaggacatctgcatctcctgcggatctctgaacgtgaccctggagcacccactgttcatcggcggcatgtgccagaactgtaaaaactgttttctggagtgtgcctatcaatacgacgatgacggctaccagagctactgcaccatctgttgcggcggaagagaggtgctgatgtgtggaaataacaactgctgccggtgcttctgcgtggaatgcgtggacctgctggtgggccccggcgccgcccaggccgctattaaggaagatccttggaactgctacatgtgcggccacaagggcacatacggcctgctgagacggagagaggactggcctagcagactgcagatgttcttcgccaataaccacgaccaggagttcgacccccctaaggtgtaccctcccgtccccgccgagaagagaaagcccatccgggtcctgagcctgttcgatggcatcgccaccggtctgctggtgctgaaggacctgggcatccaggtggataggtacattgcctccgaggtgtgcgaggactccatcaccgtgggaatggtgcgtcatcagggcaagatcatgtacgtgggcgacgtgcggagcgtgacacagaagcatatccaggagtggggccctttcgacctggtgatcggcggcagcccttgcaatgacctgagcatcgtgaacccagcccggaagggcctgtacgagggaaccggcagactgttcttcgagttttacagactgctgcacgacgcccggcctaaggaaggcgacgaccggcccttcttttggctgttcgagaatgtggtggccatgggagtcagcgacaagcgggatattagccggttcctggagagcaaccccgtgatgatcgatgccaaggaagtgagcgccgcccaccgggccagatacttctggggcaatctgcctggcatgaacagacccctggccagcaccgtgaacgacaagctggagctgcaggagtgcctggagcacggccggatcgccaagttcagcaaggtgagaaccatcaccacccgaagcaacagcatcaaacaaggcaaggaccagcactttcctgtgttcatgaacgagaaggaggacatcctgtggtgtaccgagatggagagagtgttcgggttcccagtccactacacagatgtcagcaacatgtctagactggccagacagagactgctgggaagaagctggtccgtccctgtgatcagacacctgttcgcccctctgaaggagtacttcgcctgcgtgagcagcggcaacagcaacgccaacagccggggccccagcttctctagcggcctggtgccactgtccctgagagggagccacatgggccccatggagatctacaaaaccgtgagcgcctggaagcggcagcctgtgcgcgtgctgagcctgtttcggaatatcgataaagtcctgaaaagcctgggattcctggagagcggctctggctccggcggtggcaccctgaagtacgtggaggatgtgacaaacgtggtcagacgggatgtggagaagtggggccccttcgatctggtgtacggcagcacccaacccctgggcagctcttgtgaccggtgccctggctggtacatgtttcagttccaccggatcctgcagtacgccctgccgagacaggagtcccagcggccattcttttggattttcatggacaacttgctgctgaccgaggatgaccaggaaactaccactcggttcctgcagaccgaagccgtgaccctgcaggacgtgagaggccgggactaccagaacgccatgcgggtgtggtccaacatccctggactgaaaagcaagcacgcacctctgacccctaaagaagaggagtacctgcaggcccaggtgcggagcagaagcaagctggacgcccctaaggtggatctgctggtgaagaattgcctcctgcccctgagagagtacttcaagtatttcagccagaatagtctgcccctgggaggcagcggcggcggcgccctggtgacatttgaggacgtcgccgtgcggttcacccaggaggaatgggctctgctggatccttctcagaaaatcctgtaccgggacgtgatgagagagacataccggaatctgacctccgtgggcatcaactgggaatgttgggaccttgaagcctgcttcagaagcctgggaagaaacctgagagtgcaggtggtgaagagaaagtgcgagctgaccaacagcggcccctgcgccgagggcggcccaagcagcggcgcccctcctcccagcggcggcagcccagccggctccccaacctctaccgaggagggcacctctgagtccgccacccccgagagcggccctggcacctccaccgagcccagcgagggcagcgcacccggcagccctgccggcagccccacctccacagaggagggaaccagcaccgagcccagcgaaggcagcgccccaggcaccagcaccgagcctagtgagcaggagattaaacggatcaacaagatcagaagaagacttgtgaaagacagcaacaccaagaaggccggcaagacaggccccatgaaaaccctgctggttagagtgatgacacccgatctgagagagcggctggaaaacctgagaaagaagcctgaaaatatcccccagcccatcagcaatacatctagagccaacctgaataagctgctgaccgattacaccgaaatgaagaaggcgatcctgcatgtgtactgggaagagttccagaaggaccctgtgggcctgatgagccgggtggcccagcctgccagcaagaagatcgatcagaacaagctgaaacctgagatggacgagaagggcaacctgaccaccgccggctttgcctgctctcagtgtggccagcccctgttcgtgtacaagctggagcaggtgtctgagaagggcaaggcttacaccaactacttcggacggtgcaatgtggccgagcacgaaaagctgatcctgctggcccagctgaagcccgagaaggatagcgacgaagccgtgacatatagcctgggaaagtttgggcagagggccctggatttctacagcattcatgtgaccaaggagtccacccaccccgtgaagcccctggcccagatcgccggaaacagatacgcctccggacctgtgggaaaggccctgagcgacgcatgtatgggcacaatcgcctccttcctgtctaagtaccaggacatcatcatcgaacaccagaaggtggtgaagggcaaccagaagagactggagagcctgcgggagctggccggcaaggaaaacctggaataccctagcgtgaccctgccacctcagcctcacaccaaggagggcgttgatgcctacaacgaagtgatcgcccgggtgcgaatgtgggtgaacctgaacctgtggcagaagctgaagctaagcagagatgatgccaagcctctgctgagactgaagggattcccttcctttcctctggtcgagagacaggccaacgaagtggactggtgggacatggtgtgtaacgtgaagaagctgatcaacgagaaaaaggaggatggcaaggtgttttggcagaatctggctggctacaagagacaggaagccctgagaccatacctgagcagcgaggaagatcggaagaagggaaagaaattcgctcggtaccagctgggcgacctgctgctgcacctggaaaagaagcacggcgaggactggggaaaggtgtacgacgaggcctgggagcggattgacaagaaagtggaaggcctgagcaagcacatcaagctggaagaggaacggagaagcgaggacgcccagagcaaggccgccctgaccgactggctgcgggctaaggccagcttcgtgatcgagggcctgaaggaggccgacaaggacgagttctgcagatgcgagctgaagctgcagaagtggtacggggacctgcggggaaagcccttcgccatcgaagccgagaacagcatcctggacatcagcggcttcagcaagcagtacaactgtgccttcatctggcagaaggacggcgtgaagaagctgaacctgtacctgatcatcaactacttcaagggcggcaagctgcggttcaagaagatcaaacctgaagccttcgaagccaacagattctacaccgtgatcaacaaaaagagcggcgagatcgtgcccatggaggtgaacttcaacttcgacgaccccaacctgatcatcctgcctctggcctttggcaagagacagggcagagaattcatctggaacgacctgctgtccctggaaaccggcagcctgaagctggccaacggaagagtgatcgagaagacactgtacaacagaagaacccggcaggatgagcctgccctgttcgtggccctgaccttcgagcggcgggaggtcctggactcctccaatatcaaaccaatgaacctgatcggcgtggcaagaggcgaaaacatccccgccgtgatcgccctgaccgaccccgagggctgcccactgagccggtttaaggatagcctgggaaacccaacccacatcctgagaatcggcgagagctataaggagaagcagcggaccatccaggccaagaaggaggtggagcagcggagagccggcggctacagccggaagtacgccagcaaagccaagaatctggcagacgatatggtgagaaacaccgctagagatctgctgtactacgccgtgacccaggatgccatgctgatcttcgccaacctgagccggggcttcggccggcagggcaagcggaccttcatggccgagagacagtacacacggatggaggactggctgaccgccaagctggcctacgagggcctgagcaagacctacctgtccaagacactggcccagtacacctccaagacatgcagcaactgtgggtttaccatcaccagcgccgactacgacagggtgctggagaagctgaagaagacagcaacaggctggatgaccacaattaacggcaaggagctgaaggtggagggccagattacctactacaacagatacaagagacagaacgtagtcaaggacctgtccgtcgagctggatagactgagcgaagaatctgtgaacaacgacatctcctcctggacaaagggcagaagcggagaagctctgagcctcctgaagaaaagattctcccatagacccgtgcaggagaagttcgtgtgcctgaactgcggcttcgagacacacgcagccgagcaagccgccctgaacatcgccagatcctggctgttcctgcggagccaggagtacaagaaataccagacaaacaagacaaccggcaacaccgataagagagccttcgtcgagacctggcagtccttttaccggaagaagcttaaggaggtgtggaaacctgccgtgcggtctggcggatctggcggaggctccatggccgccatgcccctgaaggcccagtaccaggagatggtgaccttcgaggacgtggccgtgcacttcaccaagaccgagtggaccggcctgagccccgcccagagggccctgtacaggagcgtgatgctggagaacttcggcaacctgaccgccctgggctaccccgtgcccaagcccgccctgatcagcctgctggagggcggcgacatggcctggggcctggaggcccaggacgaccccggcggcccaagcagcggcgcccctcctcccagcggcggcagcccagccggctccccaacctctaccgaggagggcacctctgagtccgccacccccgagagcggccctggcacctccaccgagcccagcgagggcagcgcacccggcagccctgccggcagccccacctccacagaggagggaaccagcaccgagcccagcgaaggcagcgccccaggcaccagcaccgagcctagtgagcaggagattaaacggatcaacaagatcagaagaagacttgtgaaagacagcaacaccaagaaggccggcaagacaggccccatgaaaaccctgctggttagagtgatgacacccgatctgagagagcggctggaaaacctgagaaagaagcctgaaaatatcccccagcccatcagcaatacatctagagccaacctgaataagctgctgaccgattacaccgaaatgaagaaggcgatcctgcatgtgtactgggaagagttccagaaggaccctgtgggcctgatgagccgggtggcccagcctgccagcaagaagatcgatcagaacaagctgaaacctgagatggacgagaagggcaacctgaccaccgccggctttgcctgctctcagtgtggccagcccctgttcgtgtacaagctggagcaggtgtctgagaagggcaaggcttacaccaactacttcggacggtgcaatgtggccgagcacgaaaagctgatcctgctggcccagctgaagcccgagaaggatagcgacgaagccgtgacatatagcctgggaaagtttgggcagagggccctggatttctacagcattcatgtgaccaaggagtccacccaccccgtgaagcccctggcccagatcgccggaaacagatacgcctccggacctgtgggaaaggccctgagcgacgcatgtatgggcacaatcgcctccttcctgtctaagtaccaggacatcatcatcgaacaccagaaggtggtgaagggcaaccagaagagactggagagcctgcgggagctggccggcaaggaaaacctggaataccctagcgtgaccctgccacctcagcctcacaccaaggagggcgttgatgcctacaacgaagtgatcgcccgggtgcgaatgtgggtgaacctgaacctgtggcagaagctgaagctaagcagagatgatgccaagcctctgctgagactgaagggattcccttcctttcctctggtcgagagacaggccaacgaagtggactggtgggacatggtgtgtaacgtgaagaagctgatcaacgagaaaaaggaggatggcaaggtgttttggcagaatctggctggctacaagagacaggaagccctgagaccatacctgagcagcgaggaagatcggaagaagggaaagaaattcgctcggtaccagctgggcgacctgctgctgcacctggaaaagaagcacggcgaggactggggaaaggtgtacgacgaggcctgggagcggattgacaagaaagtggaaggcctgagcaagcacatcaagctggaagaggaacggagaagcgaggacgcccagagcaaggccgccctgaccgactggctgcgggctaaggccagcttcgtgatcgagggcctgaaggaggccgacaaggacgagttctgcagatgcgagctgaagctgcagaagtggtacggggacctgcggggaaagcccttcgccatcgaagccgagaacagcatcctggacatcagcggcttcagcaagcagtacaactgtgccttcatctggcagaaggacggcgtgaagaagctgaacctgtacctgatcatcaactacttcaagggcggcaagctgcggttcaagaagatcaaacctgaagccttcgaagccaacagattctacaccgtgatcaacaaaaagagcggcgagatcgtgcccatggaggtgaacttcaacttcgacgaccccaacctgatcatcctgcctctggcctttggcaagagacagggcagagaattcatctggaacgacctgctgtccctggaaaccggcagcctgaagctggccaacggaagagtgatcgagaagacactgtacaacagaagaacccggcaggatgagcctgccctgttcgtggccctgaccttcgagcggcgggaggtcctggactcctccaatatcaaaccaatgaacctgatcggcgtggcaagaggcgaaaacatccccgccgtgatcgccctgaccgaccccgagggctgcccactgagccggtttaaggatagcctgggaaacccaacccacatcctgagaatcggcgagagctataaggagaagcagcggaccatccaggccaagaaggaggtggagcagcggagagccggcggctacagccggaagtacgccagcaaagccaagaatctggcagacgatatggtgagaaacaccgctagagatctgctgtactacgccgtgacccaggatgccatgctgatcttcgccaacctgagccggggcttcggccggcagggcaagcggaccttcatggccgagagacagtacacacggatggaggactggctgaccgccaagctggcctacgagggcctgagcaagacctacctgtccaagacactggcccagtacacctccaagacatgcagcaactgtgggtttaccatcaccagcgccgactacgacagggtgctggagaagctgaagaagacagcaacaggctggatgaccacaattaacggcaaggagctgaaggtggagggccagattacctactacaacagatacaagagacagaacgtagtcaaggacctgtccgtcgagctggatagactgagcgaagaatctgtgaacaacgacatctcctcctggacaaagggcagaagcggagaagctctgagcctcctgaagaaaagattctcccatagacccgtgcaggagaagttcgtgtgcctgaactgcggcttcgagacacacgcagccgagcaagccgccctgaacatcgccagatcctggctgttcctgcggagccaggagtacaagaaataccagacaaacaagacaaccggcaacaccgataagagagccttcgtcgagacctggcagtccttttaccggaagaagcttaaggaggtgtggaaacctgccgtgcggtctggcggatctggcggaggctcctatggccgccatgcccctgaaggcccagtaccaggagatggtgaccttcgaggacgtggccgtgcacttcaccaagaccgagtggaccggcctgagccccgcccagagggccctgtacaggagcgtgatgctggagaacttcggcaacctgaccgccctgggctaccccgtgcccaagcccgccctgatcagcctgctggagggcggcgacatggcctggggcctggaggcccaggacgaccccggatctggctccggcagcggccccaagaaaaagagaaaagtctaagctgccttctgcggggcttgccttctggccatgcccttcttctctcccttgcacctgtacctcttggtctttgaataaagcctgagtaggaaggctagcaaaaaaaaaaaaaaaaaaaaaaaaaaaaaaaaaaaaaaaaaaaaaaaaaaaaaaaaaaaaaaaaaaaaaaaaaaaaaaaa

SEQ ID NO: 15525 - RNA, 9485 nt, synthetic construct
  source 1..9485: mol_type = other RNA
aggaaataagagagaaaagaagagtaagaagaaatataagagccaccatggcccctaagaagaagcgtaaagtgagccggatggaacgcctcgtctacgaggtgcggcagaagtgcagaaacatcgaggacatctgcatctcctgcggatctctgaacgtgaccctggagcacccactgttcatcggcggcatgtgccagaactgtaaaaactgttttctggagtgtgcctatcaatacgacgatgacggctaccagagctactgcaccatctgttgcggcggaagagaggtgctgatgtgtggaaataacaactgctgccggtgcttctgcgtggaatgcgtggacctgctggtgggccccggcgccgcccaggccgctattaaggaagatccttggaactgctacatgtgcggccacaagggcacatacggcctgctgagacggagagaggactggcctagcagactgcagatgttcttcgccaataaccacgaccaggagttcgacccccctaaggtgtaccctcccgtccccgccgagaagagaaagcccatccgggtcctgagcctgttcgatggcatcgccaccggtctgctggtgctgaaggacctgggcatccaggtggataggtacattgcctccgaggtgtgcgaggactccatcaccgtgggaatggtgcgtcatcagggcaagatcatgtacgtgggcgacgtgcggagcgtgacacagaagcatatccaggagtggggccctttcgacctggtgatcggcggcagcccttgcaatgacctgagcatcgtgaacccagcccggaagggcctgtacgagggaaccggcagactgttcttcgagttttacagactgctgcacgacgcccggcctaaggaaggcgacgaccggcccttcttttggctgttcgagaatgtggtggccatgggagtcagcgacaagcgggatattagccggttcctggagagcaaccccgtgatgatcgatgccaaggaagtgagcgccgcccaccgggccagatacttctggggcaatctgcctggcatgaacagacccctggccagcaccgtgaacgacaagctggagctgcaggagtgcctggagcacggccggatcgccaagttcagcaaggtgagaaccatcaccacccgaagcaacagcatcaaacaaggcaaggaccagcactttcctgtgttcatgaacgagaaggaggacatcctgtggtgtaccgagatggagagagtgttcgggttcccagtccactacacagatgtcagcaacatgtctagactggccagacagagactgctgggaagaagctggtccgtccctgtgatcagacacctgttcgcccctctgaaggagtacttcgcctgcgtgagcagcggcaacagcaacgccaacagccggggccccagcttctctagcggcctggtgccactgtccctgagagggagccacatgggccccatggagatctacaaaaccgtgagcgcctggaagcggcagcctgtgcgcgtgctgagcctgtttcggaatatcgataaagtcctgaaaagcctgggattcctggagagcggctctggctccggcggtggcaccctgaagtacgtggaggatgtgacaaacgtggtcagacgggatgtggagaagtggggccccttcgatctggtgtacggcagcacccaacccctgggcagctcttgtgaccggtgccctggctggtacatgtttcagttccaccggatcctgcagtacgccctgccgagacaggagtcccagcggccattcttttggattttcatggacaacttgctgctgaccgaggatgaccaggaaactaccactcggttcctgcagaccgaagccgtgaccctgcaggacgtgagaggccgggactaccagaacgccatgcgggtgtggtccaacatccctggactgaaaagcaagcacgcacctctgacccctaaagaagaggagtacctgcaggcccaggtgcggagcagaagcaagctggacgcccctaaggtggatctgctggtgaagaattgcctcctgcccctgagagagtacttcaagtatttcagccagaatagtctgcccctgggaggcagcggcggcggcgccctggtgacatttgaggacgtcgccgtgcggttcacccaggaggaatgggctctgctggatccttctcagaaaatcctgtaccgggacgtgatgagagagacataccggaatctgacctccgtgggcatcaactgggaatgttgggaccttgaagcctgcttcagaagcctgggaagaaacctgagagtgcaggtggtgaagagaaagtgcgagctgaccaacagcggcccctgcgccgagggcggcccaagcagcggcgcccctcctcccagcggcggcagcccagccggctccccaacctctaccgaggagggcacctctgagtccgccacccccgagagcggccctggcacctccaccgagcccagcgagggcagcgcacccggcagccctgccggcagccccacctccacagaggagggaaccagcaccgagcccagcgaaggcagcgccccaggcaccagcaccgagcctagtgagcaggagattaaacggatcaacaagatcagaagaagacttgtgaaagacagcaacaccaagaaggccggcaagacaggccccatgaaaaccctgctggttagagtgatgacacccgatctgagagagcggctggaaaacctgagaaagaagcctgaaaatatcccccagcccatcagcaatacatctagagccaacctgaataagctgctgaccgattacaccgaaatgaagaaggcgatcctgcatgtgtactgggaagagttccagaaggaccctgtgggcctgatgagccgggtggcccagcctgccagcaagaagatcgatcagaacaagctgaaacctgagatggacgagaagggcaacctgaccaccgccggctttgcctgctctcagtgtggccagcccctgttcgtgtacaagctggagcaggtgtctgagaagggcaaggcttacaccaactacttcggacggtgcaatgtggccgagcacgaaaagctgatcctgctggcccagctgaagcccgagaaggatagcgacgaagccgtgacatatagcctgggaaagtttgggcagagggccctggatttctacagcattcatgtgaccaaggagtccacccaccccgtgaagcccctggcccagatcgccggaaacagatacgcctccggacctgtgggaaaggccctgagcgacgcatgtatgggcacaatcgcctccttcctgtctaagtaccaggacatcatcatcgaacaccagaaggtggtgaagggcaaccagaagagactggagagcctgcgggagctggccggcaaggaaaacctggaataccctagcgtgaccctgccacctcagcctcacaccaaggagggcgttgatgcctacaacgaagtgatcgcccgggtgcgaatgtgggtgaacctgaacctgtggcagaagctgaagctaagcagagatgatgccaagcctctgctgagactgaagggattcccttcctttcctctggtcgagagacaggccaacgaagtggactggtgggacatggtgtgtaacgtgaagaagctgatcaacgagaaaaaggaggatggcaaggtgttttggcagaatctggctggctacaagagacaggaagccctgagaccatacctgagcagcgaggaagatcggaagaagggaaagaaattcgctcggtaccagctgggcgacctgctgctgcacctggaaaagaagcacggcgaggactggggaaaggtgtacgacgaggcctgggagcggattgacaagaaagtggaaggcctgagcaagcacatcaagctggaagaggaacggagaagcgaggacgcccagagcaaggccgccctgaccgactggctgcgggctaaggccagcttcgtgatcgagggcctgaaggaggccgacaaggacgagttctgcagatgcgagctgaagctgcagaagtggtacggggacctgcggggaaagcccttcgccatcgaagccgagaacagcatcctggacatcagcggcttcagcaagcagtacaactgtgccttcatctggcagaaggacggcgtgaagaagctgaacctgtacctgatcatcaactacttcaagggcggcaagctgcggttcaagaagatcaaacctgaagccttcgaagccaacagattctacaccgtgatcaacaaaaagagcggcgagatcgtgcccatggaggtgaacttcaacttcgacgaccccaacctgatcatcctgcctctggcctttggcaagagacagggcagagaattcatctggaacgacctgctgtccctggaaaccggcagcctgaagctggccaacggaagagtgatcgagaagacactgtacaacagaagaacccggcaggatgagcctgccctgttcgtggccctgaccttcgagcggcgggaggtcctggactcctccaatatcaaaccaatgaacctgatcggcgtggcaagaggcgaaaacatccccgccgtgatcgccctgaccgaccccgagggctgcccactgagccggtttaaggatagcctgggaaacccaacccacatcctgagaatcggcgagagctataaggagaagcagcggaccatccaggccaagaaggaggtggagcagcggagagccggcggctacagccggaagtacgccagcaaagccaagaatctggcagacgatatggtgagaaacaccgctagagatctgctgtactacgccgtgacccaggatgccatgctgatcttcgccaacctgagccggggcttcggccggcagggcaagcggaccttcatggccgagagacagtacacacggatggaggactggctgaccgccaagctggcctacgagggcctgagcaagacctacctgtccaagacactggcccagtacacctccaagacatgcagcaactgtgggtttaccatcaccagcgccgactacgacagggtgctggagaagctgaagaagacagcaacaggctggatgaccacaattaacggcaaggagctgaaggtggagggccagattacctactacaacagatacaagagacagaacgtagtcaaggacctgtccgtcgagctggatagactgagcgaagaatctgtgaacaacgacatctcctcctggacaaagggcagaagcggagaagctctgagcctcctgaagaaaagattctcccatagacccgtgcaggagaagttcgtgtgcctgaactgcggcttcgagacacacgcagccgagcaagccgccctgaacatcgccagatcctggctgttcctgcggagccaggagtacaagaaataccagacaaacaagacaaccggcaacaccgataagagagccttcgtcgagacctggcagtccttttaccggaagaagcttaaggaggtgtggaaacctgccgtgcggtctggcggatctggcggaggctccagcgtgaccttcagggacgtgatcgtggacttcacccaggaggagtggcagcagctgaagcccgcccagaaggacctgtacagggacgtgatgatggaggtgtactggaacctggtgagcctggacgtggagaccaggcccgacgccaaggagagcgacccccaggaggacgactgggaggacaggcccagcgtggtggtgatcgccgagggccccaccaggaacggcgccaggagctacaccggcggcccaagcagcggcgcccctcctcccagcggcggcagcccagccggctccccaacctctaccgaggagggcacctctgagtccgccacccccgagagcggccctggcacctccaccgagcccagcgagggcagcgcacccggcagccctgccggcagccccacctccacagaggagggaaccagcaccgagcccagcgaaggcagcgccccaggcaccagcaccgagcctagtgagcaggagattaaacggatcaacaagatcagaagaagacttgtgaaagacagcaacaccaagaaggccggcaagacaggccccatgaaaaccctgctggttagagtgatgacacccgatctgagagagcggctggaaaacctgagaaagaagcctgaaaatatcccccagcccatcagcaatacatctagagccaacctgaataagctgctgaccgattacaccgaaatgaagaaggcgatcctgcatgtgtactgggaagagttccagaaggaccctgtgggcctgatgagccgggtggcccagcctgccagcaagaagatcgatcagaacaagctgaaacctgagatggacgagaagggcaacctgaccaccgccggctttgcctgctctcagtgtggccagcccctgttcgtgtacaagctggagcaggtgtctgagaagggcaaggcttacaccaactacttcggacggtgcaatgtggccgagcacgaaaagctgatcctgctggcccagctgaagcccgagaaggatagcgacgaagccgtgacatatagcctgggaaagtttgggcagagggccctggatttctacagcattcatgtgaccaaggagtccacccaccccgtgaagcccctggcccagatcgccggaaacagatacgcctccggacctgtgggaaaggccctgagcgacgcatgtatgggcacaatcgcctccttcctgtctaagtaccaggacatcatcatcgaacaccagaaggtggtgaagggcaaccagaagagactggagagcctgcgggagctggccggcaaggaaaacctggaataccctagcgtgaccctgccacctcagcctcacaccaaggagggcgttgatgcctacaacgaagtgatcgcccgggtgcgaatgtgggtgaacctgaacctgtggcagaagctgaagctaagcagagatgatgccaagcctctgctgagactgaagggattcccttcctttcctctggtcgagagacaggccaacgaagtggactggtgggacatggtgtgtaacgtgaagaagctgatcaacgagaaaaaggaggatggcaaggtgttttggcagaatctggctggctacaagagacaggaagccctgagaccatacctgagcagcgaggaagatcggaagaagggaaagaaattcgctcggtaccagctgggcgacctgctgctgcacctggaaaagaagcacggcgaggactggggaaaggtgtacgacgaggcctgggagcggattgacaagaaagtggaaggcctgagcaagcacatcaagctggaagaggaacggagaagcgaggacgcccagagcaaggccgccctgaccgactggctgcgggctaaggccagcttcgtgatcgagggcctgaaggaggccgacaaggacgagttctgcagatgcgagctgaagctgcagaagtggtacggggacctgcggggaaagcccttcgccatcgaagccgagaacagcatcctggacatcagcggcttcagcaagcagtacaactgtgccttcatctggcagaaggacggcgtgaagaagctgaacctgtacctgatcatcaactacttcaagggcggcaagctgcggttcaagaagatcaaacctgaagccttcgaagccaacagattctacaccgtgatcaacaaaaagagcggcgagatcgtgcccatggaggtgaacttcaacttcgacgaccccaacctgatcatcctgcctctggcctttggcaagagacagggcagagaattcatctggaacgacctgctgtccctggaaaccggcagcctgaagctggccaacggaagagtgatcgagaagacactgtacaacagaagaacccggcaggatgagcctgccctgttcgtggccctgaccttcgagcggcgggaggtcctggactcctccaatatcaaaccaatgaacctgatcggcgtggcaagaggcgaaaacatccccgccgtgatcgccctgaccgaccccgagggctgcccactgagccggtttaaggatagcctgggaaacccaacccacatcctgagaatcggcgagagctataaggagaagcagcggaccatccaggccaagaaggaggtggagcagcggagagccggcggctacagccggaagtacgccagcaaagccaagaatctggcagacgatatggtgagaaacaccgctagagatctgctgtactacgccgtgacccaggatgccatgctgatcttcgccaacctgagccggggcttcggccggcagggcaagcggaccttcatggccgagagacagtacacacggatggaggactggctgaccgccaagctggcctacgagggcctgagcaagacctacctgtccaagacactggcccagtacacctccaagacatgcagcaactgtgggtttaccatcaccagcgccgactacgacagggtgctggagaagctgaagaagacagcaacaggctggatgaccacaattaacggcaaggagctgaaggtggagggccagattacctactacaacagatacaagagacagaacgtagtcaaggacctgtccgtcgagctggatagactgagcgaagaatctgtgaacaacgacatctcctcctggacaaagggcagaagcggagaagctctgagcctcctgaagaaaagattctcccatagacccgtgcaggagaagttcgtgtgcctgaactgcggcttcgagacacacgcagccgagcaagccgccctgaacatcgccagatcctggctgttcctgcggagccaggagtacaagaaataccagacaaacaagacaaccggcaacaccgataagagagccttcgtcgagacctggcagtccttttaccggaagaagcttaaggaggtgtggaaacctgccgtgcggtctggcggatctggcggaggctcctagcgtgaccttcagggacgtgatcgtggacttcacccaggaggagtggcagcagctgaagcccgcccagaaggacctgtacagggacgtgatgatggaggtgtactggaacctggtgagcctggacgtggagaccaggcccgacgccaaggagagcgacccccaggaggacgactgggaggacaggcccagcgtggtggtgatcgccgagggccccaccaggaacggcgccaggagctacaccggatctggctccggcagcggccccaagaaaaagagaaaagtctaagctgccttctgcggggcttgccttctggccatgcccttcttctctcccttgcacctgtacctcttggtctttgaataaagcctgagtaggaaggctagcaaaaaaaaaaaaaaaaaaaaaaaaaaaaaaaaaaaaaaaaaaaaaaaaaaaaaaaaaaaaaaaaaaaaaaaaaaaaaaaa

SEQ ID NO: 15526 - RNA, 9485 nt, synthetic construct
  source 1..9485: mol_type = other RNA
aggaaataagagagaaaagaagagtaagaagaaatataagagccaccatggcccctaagaagaagcgtaaagtgagccggatggaacgcctcgtctacgaggtgcggcagaagtgcagaaacatcgaggacatctgcatctcctgcggatctctgaacgtgaccctggagcacccactgttcatcggcggcatgtgccagaactgtaaaaactgttttctggagtgtgcctatcaatacgacgatgacggctaccagagctactgcaccatctgttgcggcggaagagaggtgctgatgtgtggaaataacaactgctgccggtgcttctgcgtggaatgcgtggacctgctggtgggccccggcgccgcccaggccgctattaaggaagatccttggaactgctacatgtgcggccacaagggcacatacggcctgctgagacggagagaggactggcctagcagactgcagatgttcttcgccaataaccacgaccaggagttcgacccccctaaggtgtaccctcccgtccccgccgagaagagaaagcccatccgggtcctgagcctgttcgatggcatcgccaccggtctgctggtgctgaaggacctgggcatccaggtggataggtacattgcctccgaggtgtgcgaggactccatcaccgtgggaatggtgcgtcatcagggcaagatcatgtacgtgggcgacgtgcggagcgtgacacagaagcatatccaggagtggggccctttcgacctggtgatcggcggcagcccttgcaatgacctgagcatcgtgaacccagcccggaagggcctgtacgagggaaccggcagactgttcttcgagttttacagactgctgcacgacgcccggcctaaggaaggcgacgaccggcccttcttttggctgttcgagaatgtggtggccatgggagtcagcgacaagcgggatattagccggttcctggagagcaaccccgtgatgatcgatgccaaggaagtgagcgccgcccaccgggccagatacttctggggcaatctgcctggcatgaacagacccctggccagcaccgtgaacgacaagctggagctgcaggagtgcctggagcacggccggatcgccaagttcagcaaggtgagaaccatcaccacccgaagcaacagcatcaaacaaggcaaggaccagcactttcctgtgttcatgaacgagaaggaggacatcctgtggtgtaccgagatggagagagtgttcgggttcccagtccactacacagatgtcagcaacatgtctagactggccagacagagactgctgggaagaagctggtccgtccctgtgatcagacacctgttcgcccctctgaaggagtacttcgcctgcgtgagcagcggcaacagcaacgccaacagccggggccccagcttctctagcggcctggtgccactgtccctgagagggagccacatgggccccatggagatctacaaaaccgtgagcgcctggaagcggcagcctgtgcgcgtgctgagcctgtttcggaatatcgataaagtcctgaaaagcctgggattcctggagagcggctctggctccggcggtggcaccctgaagtacgtggaggatgtgacaaacgtggtcagacgggatgtggagaagtggggccccttcgatctggtgtacggcagcacccaacccctgggcagctcttgtgaccggtgccctggctggtacatgtttcagttccaccggatcctgcagtacgccctgccgagacaggagtcccagcggccattcttttggattttcatggacaacttgctgctgaccgaggatgaccaggaaactaccactcggttcctgcagaccgaagccgtgaccctgcaggacgtgagaggccgggactaccagaacgccatgcgggtgtggtccaacatccctggactgaaaagcaagcacgcacctctgacccctaaagaagaggagtacctgcaggcccaggtgcggagcagaagcaagctggacgcccctaaggtggatctgctggtgaagaattgcctcctgcccctgagagagtacttcaagtatttcagccagaatagtctgcccctgggaggcagcggcggcggcgccctggtgacatttgaggacgtcgccgtgcggttcacccaggaggaatgggctctgctggatccttctcagaaaatcctgtaccgggacgtgatgagagagacataccggaatctgacctccgtgggcatcaactgggaatgttgggaccttgaagcctgcttcagaagcctgggaagaaacctgagagtgcaggtggtgaagagaaagtgcgagctgaccaacagcggcccctgcgccgagggcggcccaagcagcggcgcccctcctcccagcggcggcagcccagccggctccccaacctctaccgaggagggcacctctgagtccgccacccccgagagcggccctggcacctccaccgagcccagcgagggcagcgcacccggcagccctgccggcagccccacctccacagaggagggaaccagcaccgagcccagcgaaggcagcgccccaggcaccagcaccgagcctagtgagcaggagattaaacggatcaacaagatcagaagaagacttgtgaaagacagcaacaccaagaaggccggcaagacaggccccatgaaaaccctgctggttagagtgatgacacccgatctgagagagcggctggaaaacctgagaaagaagcctgaaaatatcccccagcccatcagcaatacatctagagccaacctgaataagctgctgaccgattacaccgaaatgaagaaggcgatcctgcatgtgtactgggaagagttccagaaggaccctgtgggcctgatgagccgggtggcccagcctgccagcaagaagatcgatcagaacaagctgaaacctgagatggacgagaagggcaacctgaccaccgccggctttgcctgctctcagtgtggccagcccctgttcgtgtacaagctggagcaggtgtctgagaagggcaaggcttacaccaactacttcggacggtgcaatgtggccgagcacgaaaagctgatcctgctggcccagctgaagcccgagaaggatagcgacgaagccgtgacatatagcctgggaaagtttgggcagagggccctggatttctacagcattcatgtgaccaaggagtccacccaccccgtgaagcccctggcccagatcgccggaaacagatacgcctccggacctgtgggaaaggccctgagcgacgcatgtatgggcacaatcgcctccttcctgtctaagtaccaggacatcatcatcgaacaccagaaggtggtgaagggcaaccagaagagactggagagcctgcgggagctggccggcaaggaaaacctggaataccctagcgtgaccctgccacctcagcctcacaccaaggagggcgttgatgcctacaacgaagtgatcgcccgggtgcgaatgtgggtgaacctgaacctgtggcagaagctgaagctaagcagagatgatgccaagcctctgctgagactgaagggattcccttcctttcctctggtcgagagacaggccaacgaagtggactggtgggacatggtgtgtaacgtgaagaagctgatcaacgagaaaaaggaggatggcaaggtgttttggcagaatctggctggctacaagagacaggaagccctgagaccatacctgagcagcgaggaagatcggaagaagggaaagaaattcgctcggtaccagctgggcgacctgctgctgcacctggaaaagaagcacggcgaggactggggaaaggtgtacgacgaggcctgggagcggattgacaagaaagtggaaggcctgagcaagcacatcaagctggaagaggaacggagaagcgaggacgcccagagcaaggccgccctgaccgactggctgcgggctaaggccagcttcgtgatcgagggcctgaaggaggccgacaaggacgagttctgcagatgcgagctgaagctgcagaagtggtacggggacctgcggggaaagcccttcgccatcgaagccgagaacagcatcctggacatcagcggcttcagcaagcagtacaactgtgccttcatctggcagaaggacggcgtgaagaagctgaacctgtacctgatcatcaactacttcaagggcggcaagctgcggttcaagaagatcaaacctgaagccttcgaagccaacagattctacaccgtgatcaacaaaaagagcggcgagatcgtgcccatggaggtgaacttcaacttcgacgaccccaacctgatcatcctgcctctggcctttggcaagagacagggcagagaattcatctggaacgacctgctgtccctggaaaccggcagcctgaagctggccaacggaagagtgatcgagaagacactgtacaacagaagaacccggcaggatgagcctgccctgttcgtggccctgaccttcgagcggcgggaggtcctggactcctccaatatcaaaccaatgaacctgatcggcgtggcaagaggcgaaaacatccccgccgtgatcgccctgaccgaccccgagggctgcccactgagccggtttaaggatagcctgggaaacccaacccacatcctgagaatcggcgagagctataaggagaagcagcggaccatccaggccaagaaggaggtggagcagcggagagccggcggctacagccggaagtacgccagcaaagccaagaatctggcagacgatatggtgagaaacaccgctagagatctgctgtactacgccgtgacccaggatgccatgctgatcttcgccaacctgagccggggcttcggccggcagggcaagcggaccttcatggccgagagacagtacacacggatggaggactggctgaccgccaagctggcctacgagggcctgagcaagacctacctgtccaagacactggcccagtacacctccaagacatgcagcaactgtgggtttaccatcaccagcgccgactacgacagggtgctggagaagctgaagaagacagcaacaggctggatgaccacaattaacggcaaggagctgaaggtggagggccagattacctactacaacagatacaagagacagaacgtagtcaaggacctgtccgtcgagctggatagactgagcgaagaatctgtgaacaacgacatctcctcctggacaaagggcagaagcggagaagctctgagcctcctgaagaaaagattctcccatagacccgtgcaggagaagttcgtgtgcctgaactgcggcttcgagacacacgcagccgagcaagccgccctgaacatcgccagatcctggctgttcctgcggagccaggagtacaagaaataccagacaaacaagacaaccggcaacaccgataagagagccttcgtcgagacctggcagtccttttaccggaagaagcttaaggaggtgtggaaacctgccgtgcggtctggcggatctggcggaggctccagccacgagctgctgaccttcaaggacatcagcgtggacttcacccaggaggagtggggccagctggcccccgcctaccagaacctgtacagggaggtgatgctggagaactacagcaacctggtgagcgtggccggctaccagctgagcaagcccagcgtgatcagccagctggagaagggcgaggagccctggatggccgagaaggagggccccggcgaccccagcagcgacctgaagagcggcggcccaagcagcggcgcccctcctcccagcggcggcagcccagccggctccccaacctctaccgaggagggcacctctgagtccgccacccccgagagcggccctggcacctccaccgagcccagcgagggcagcgcacccggcagccctgccggcagccccacctccacagaggagggaaccagcaccgagcccagcgaaggcagcgccccaggcaccagcaccgagcctagtgagcaggagattaaacggatcaacaagatcagaagaagacttgtgaaagacagcaacaccaagaaggccggcaagacaggccccatgaaaaccctgctggttagagtgatgacacccgatctgagagagcggctggaaaacctgagaaagaagcctgaaaatatcccccagcccatcagcaatacatctagagccaacctgaataagctgctgaccgattacaccgaaatgaagaaggcgatcctgcatgtgtactgggaagagttccagaaggaccctgtgggcctgatgagccgggtggcccagcctgccagcaagaagatcgatcagaacaagctgaaacctgagatggacgagaagggcaacctgaccaccgccggctttgcctgctctcagtgtggccagcccctgttcgtgtacaagctggagcaggtgtctgagaagggcaaggcttacaccaactacttcggacggtgcaatgtggccgagcacgaaaagctgatcctgctggcccagctgaagcccgagaaggatagcgacgaagccgtgacatatagcctgggaaagtttgggcagagggccctggatttctacagcattcatgtgaccaaggagtccacccaccccgtgaagcccctggcccagatcgccggaaacagatacgcctccggacctgtgggaaaggccctgagcgacgcatgtatgggcacaatcgcctccttcctgtctaagtaccaggacatcatcatcgaacaccagaaggtggtgaagggcaaccagaagagactggagagcctgcgggagctggccggcaaggaaaacctggaataccctagcgtgaccctgccacctcagcctcacaccaaggagggcgttgatgcctacaacgaagtgatcgcccgggtgcgaatgtgggtgaacctgaacctgtggcagaagctgaagctaagcagagatgatgccaagcctctgctgagactgaagggattcccttcctttcctctggtcgagagacaggccaacgaagtggactggtgggacatggtgtgtaacgtgaagaagctgatcaacgagaaaaaggaggatggcaaggtgttttggcagaatctggctggctacaagagacaggaagccctgagaccatacctgagcagcgaggaagatcggaagaagggaaagaaattcgctcggtaccagctgggcgacctgctgctgcacctggaaaagaagcacggcgaggactggggaaaggtgtacgacgaggcctgggagcggattgacaagaaagtggaaggcctgagcaagcacatcaagctggaagaggaacggagaagcgaggacgcccagagcaaggccgccctgaccgactggctgcgggctaaggccagcttcgtgatcgagggcctgaaggaggccgacaaggacgagttctgcagatgcgagctgaagctgcagaagtggtacggggacctgcggggaaagcccttcgccatcgaagccgagaacagcatcctggacatcagcggcttcagcaagcagtacaactgtgccttcatctggcagaaggacggcgtgaagaagctgaacctgtacctgatcatcaactacttcaagggcggcaagctgcggttcaagaagatcaaacctgaagccttcgaagccaacagattctacaccgtgatcaacaaaaagagcggcgagatcgtgcccatggaggtgaacttcaacttcgacgaccccaacctgatcatcctgcctctggcctttggcaagagacagggcagagaattcatctggaacgacctgctgtccctggaaaccggcagcctgaagctggccaacggaagagtgatcgagaagacactgtacaacagaagaacccggcaggatgagcctgccctgttcgtggccctgaccttcgagcggcgggaggtcctggactcctccaatatcaaaccaatgaacctgatcggcgtggcaagaggcgaaaacatccccgccgtgatcgccctgaccgaccccgagggctgcccactgagccggtttaaggatagcctgggaaacccaacccacatcctgagaatcggcgagagctataaggagaagcagcggaccatccaggccaagaaggaggtggagcagcggagagccggcggctacagccggaagtacgccagcaaagccaagaatctggcagacgatatggtgagaaacaccgctagagatctgctgtactacgccgtgacccaggatgccatgctgatcttcgccaacctgagccggggcttcggccggcagggcaagcggaccttcatggccgagagacagtacacacggatggaggactggctgaccgccaagctggcctacgagggcctgagcaagacctacctgtccaagacactggcccagtacacctccaagacatgcagcaactgtgggtttaccatcaccagcgccgactacgacagggtgctggagaagctgaagaagacagcaacaggctggatgaccacaattaacggcaaggagctgaaggtggagggccagattacctactacaacagatacaagagacagaacgtagtcaaggacctgtccgtcgagctggatagactgagcgaagaatctgtgaacaacgacatctcctcctggacaaagggcagaagcggagaagctctgagcctcctgaagaaaagattctcccatagacccgtgcaggagaagttcgtgtgcctgaactgcggcttcgagacacacgcagccgagcaagccgccctgaacatcgccagatcctggctgttcctgcggagccaggagtacaagaaataccagacaaacaagacaaccggcaacaccgataagagagccttcgtcgagacctggcagtccttttaccggaagaagcttaaggaggtgtggaaacctgccgtgcggtctggcggatctggcggaggctcctagccacgagctgctgaccttcaaggacatcagcgtggacttcacccaggaggagtggggccagctggcccccgcctaccagaacctgtacagggaggtgatgctggagaactacagcaacctggtgagcgtggccggctaccagctgagcaagcccagcgtgatcagccagctggagaagggcgaggagccctggatggccgagaaggagggccccggcgaccccagcagcgacctgaagagcggatctggctccggcagcggccccaagaaaaagagaaaagtctaagctgccttctgcggggcttgccttctggccatgcccttcttctctcccttgcacctgtacctcttggtctttgaataaagcctgagtaggaaggctagcaaaaaaaaaaaaaaaaaaaaaaaaaaaaaaaaaaaaaaaaaaaaaaaaaaaaaaaaaaaaaaaaaaaaaaaaaaaaaaaa

SEQ ID NO: 15527 - RNA, 9485 nt, synthetic construct
  source 1..9485: mol_type = other RNA
aggaaataagagagaaaagaagagtaagaagaaatataagagccaccatggcccctaagaagaagcgtaaagtgagccggatggaacgcctcgtctacgaggtgcggcagaagtgcagaaacatcgaggacatctgcatctcctgcggatctctgaacgtgaccctggagcacccactgttcatcggcggcatgtgccagaactgtaaaaactgttttctggagtgtgcctatcaatacgacgatgacggctaccagagctactgcaccatctgttgcggcggaagagaggtgctgatgtgtggaaataacaactgctgccggtgcttctgcgtggaatgcgtggacctgctggtgggccccggcgccgcccaggccgctattaaggaagatccttggaactgctacatgtgcggccacaagggcacatacggcctgctgagacggagagaggactggcctagcagactgcagatgttcttcgccaataaccacgaccaggagttcgacccccctaaggtgtaccctcccgtccccgccgagaagagaaagcccatccgggtcctgagcctgttcgatggcatcgccaccggtctgctggtgctgaaggacctgggcatccaggtggataggtacattgcctccgaggtgtgcgaggactccatcaccgtgggaatggtgcgtcatcagggcaagatcatgtacgtgggcgacgtgcggagcgtgacacagaagcatatccaggagtggggccctttcgacctggtgatcggcggcagcccttgcaatgacctgagcatcgtgaacccagcccggaagggcctgtacgagggaaccggcagactgttcttcgagttttacagactgctgcacgacgcccggcctaaggaaggcgacgaccggcccttcttttggctgttcgagaatgtggtggccatgggagtcagcgacaagcgggatattagccggttcctggagagcaaccccgtgatgatcgatgccaaggaagtgagcgccgcccaccgggccagatacttctggggcaatctgcctggcatgaacagacccctggccagcaccgtgaacgacaagctggagctgcaggagtgcctggagcacggccggatcgccaagttcagcaaggtgagaaccatcaccacccgaagcaacagcatcaaacaaggcaaggaccagcactttcctgtgttcatgaacgagaaggaggacatcctgtggtgtaccgagatggagagagtgttcgggttcccagtccactacacagatgtcagcaacatgtctagactggccagacagagactgctgggaagaagctggtccgtccctgtgatcagacacctgttcgcccctctgaaggagtacttcgcctgcgtgagcagcggcaacagcaacgccaacagccggggccccagcttctctagcggcctggtgccactgtccctgagagggagccacatgggccccatggagatctacaaaaccgtgagcgcctggaagcggcagcctgtgcgcgtgctgagcctgtttcggaatatcgataaagtcctgaaaagcctgggattcctggagagcggctctggctccggcggtggcaccctgaagtacgtggaggatgtgacaaacgtggtcagacgggatgtggagaagtggggccccttcgatctggtgtacggcagcacccaacccctgggcagctcttgtgaccggtgccctggctggtacatgtttcagttccaccggatcctgcagtacgccctgccgagacaggagtcccagcggccattcttttggattttcatggacaacttgctgctgaccgaggatgaccaggaaactaccactcggttcctgcagaccgaagccgtgaccctgcaggacgtgagaggccgggactaccagaacgccatgcgggtgtggtccaacatccctggactgaaaagcaagcacgcacctctgacccctaaagaagaggagtacctgcaggcccaggtgcggagcagaagcaagctggacgcccctaaggtggatctgctggtgaagaattgcctcctgcccctgagagagtacttcaagtatttcagccagaatagtctgcccctgggaggcagcggcggcggcgccctggtgacatttgaggacgtcgccgtgcggttcacccaggaggaatgggctctgctggatccttctcagaaaatcctgtaccgggacgtgatgagagagacataccggaatctgacctccgtgggcatcaactgggaatgttgggaccttgaagcctgcttcagaagcctgggaagaaacctgagagtgcaggtggtgaagagaaagtgcgagctgaccaacagcggcccctgcgccgagggcggcccaagcagcggcgcccctcctcccagcggcggcagcccagccggctccccaacctctaccgaggagggcacctctgagtccgccacccccgagagcggccctggcacctccaccgagcccagcgagggcagcgcacccggcagccctgccggcagccccacctccacagaggagggaaccagcaccgagcccagcgaaggcagcgccccaggcaccagcaccgagcctagtgagcaggagattaaacggatcaacaagatcagaagaagacttgtgaaagacagcaacaccaagaaggccggcaagacaggccccatgaaaaccctgctggttagagtgatgacacccgatctgagagagcggctggaaaacctgagaaagaagcctgaaaatatcccccagcccatcagcaatacatctagagccaacctgaataagctgctgaccgattacaccgaaatgaagaaggcgatcctgcatgtgtactgggaagagttccagaaggaccctgtgggcctgatgagccgggtggcccagcctgccagcaagaagatcgatcagaacaagctgaaacctgagatggacgagaagggcaacctgaccaccgccggctttgcctgctctcagtgtggccagcccctgttcgtgtacaagctggagcaggtgtctgagaagggcaaggcttacaccaactacttcggacggtgcaatgtggccgagcacgaaaagctgatcctgctggcccagctgaagcccgagaaggatagcgacgaagccgtgacatatagcctgggaaagtttgggcagagggccctggatttctacagcattcatgtgaccaaggagtccacccaccccgtgaagcccctggcccagatcgccggaaacagatacgcctccggacctgtgggaaaggccctgagcgacgcatgtatgggcacaatcgcctccttcctgtctaagtaccaggacatcatcatcgaacaccagaaggtggtgaagggcaaccagaagagactggagagcctgcgggagctggccggcaaggaaaacctggaataccctagcgtgaccctgccacctcagcctcacaccaaggagggcgttgatgcctacaacgaagtgatcgcccgggtgcgaatgtgggtgaacctgaacctgtggcagaagctgaagctaagcagagatgatgccaagcctctgctgagactgaagggattcccttcctttcctctggtcgagagacaggccaacgaagtggactggtgggacatggtgtgtaacgtgaagaagctgatcaacgagaaaaaggaggatggcaaggtgttttggcagaatctggctggctacaagagacaggaagccctgagaccatacctgagcagcgaggaagatcggaagaagggaaagaaattcgctcggtaccagctgggcgacctgctgctgcacctggaaaagaagcacggcgaggactggggaaaggtgtacgacgaggcctgggagcggattgacaagaaagtggaaggcctgagcaagcacatcaagctggaagaggaacggagaagcgaggacgcccagagcaaggccgccctgaccgactggctgcgggctaaggccagcttcgtgatcgagggcctgaaggaggccgacaaggacgagttctgcagatgcgagctgaagctgcagaagtggtacggggacctgcggggaaagcccttcgccatcgaagccgagaacagcatcctggacatcagcggcttcagcaagcagtacaactgtgccttcatctggcagaaggacggcgtgaagaagctgaacctgtacctgatcatcaactacttcaagggcggcaagctgcggttcaagaagatcaaacctgaagccttcgaagccaacagattctacaccgtgatcaacaaaaagagcggcgagatcgtgcccatggaggtgaacttcaacttcgacgaccccaacctgatcatcctgcctctggcctttggcaagagacagggcagagaattcatctggaacgacctgctgtccctggaaaccggcagcctgaagctggccaacggaagagtgatcgagaagacactgtacaacagaagaacccggcaggatgagcctgccctgttcgtggccctgaccttcgagcggcgggaggtcctggactcctccaatatcaaaccaatgaacctgatcggcgtggcaagaggcgaaaacatccccgccgtgatcgccctgaccgaccccgagggctgcccactgagccggtttaaggatagcctgggaaacccaacccacatcctgagaatcggcgagagctataaggagaagcagcggaccatccaggccaagaaggaggtggagcagcggagagccggcggctacagccggaagtacgccagcaaagccaagaatctggcagacgatatggtgagaaacaccgctagagatctgctgtactacgccgtgacccaggatgccatgctgatcttcgccaacctgagccggggcttcggccggcagggcaagcggaccttcatggccgagagacagtacacacggatggaggactggctgaccgccaagctggcctacgagggcctgagcaagacctacctgtccaagacactggcccagtacacctccaagacatgcagcaactgtgggtttaccatcaccagcgccgactacgacagggtgctggagaagctgaagaagacagcaacaggctggatgaccacaattaacggcaaggagctgaaggtggagggccagattacctactacaacagatacaagagacagaacgtagtcaaggacctgtccgtcgagctggatagactgagcgaagaatctgtgaacaacgacatctcctcctggacaaagggcagaagcggagaagctctgagcctcctgaagaaaagattctcccatagacccgtgcaggagaagttcgtgtgcctgaactgcggcttcgagacacacgcagccgagcaagccgccctgaacatcgccagatcctggctgttcctgcggagccaggagtacaagaaataccagacaaacaagacaaccggcaacaccgataagagagccttcgtcgagacctggcagtccttttaccggaagaagcttaaggaggtgtggaaacctgccgtgcggtctggcggatctggcggaggctccatggagctggtgaccttcgaggacgtggccgtgtacttcaccaggaaggagtggggctggctggaccccgcccagagggacctgtacagggacgtgatgctggagaactacggcaacttcgtgagcatgggcctgcccttcagcaagcccgacgtgatcagccagctggagcagggcgaggagagctgggtggaggacctgcaggagtgcgaggagggcgagttcagccccgtggtgcacagcggcggcccaagcagcggcgcccctcctcccagcggcggcagcccagccggctccccaacctctaccgaggagggcacctctgagtccgccacccccgagagcggccctggcacctccaccgagcccagcgagggcagcgcacccggcagccctgccggcagccccacctccacagaggagggaaccagcaccgagcccagcgaaggcagcgccccaggcaccagcaccgagcctagtgagcaggagattaaacggatcaacaagatcagaagaagacttgtgaaagacagcaacaccaagaaggccggcaagacaggccccatgaaaaccctgctggttagagtgatgacacccgatctgagagagcggctggaaaacctgagaaagaagcctgaaaatatcccccagcccatcagcaatacatctagagccaacctgaataagctgctgaccgattacaccgaaatgaagaaggcgatcctgcatgtgtactgggaagagttccagaaggaccctgtgggcctgatgagccgggtggcccagcctgccagcaagaagatcgatcagaacaagctgaaacctgagatggacgagaagggcaacctgaccaccgccggctttgcctgctctcagtgtggccagcccctgttcgtgtacaagctggagcaggtgtctgagaagggcaaggcttacaccaactacttcggacggtgcaatgtggccgagcacgaaaagctgatcctgctggcccagctgaagcccgagaaggatagcgacgaagccgtgacatatagcctgggaaagtttgggcagagggccctggatttctacagcattcatgtgaccaaggagtccacccaccccgtgaagcccctggcccagatcgccggaaacagatacgcctccggacctgtgggaaaggccctgagcgacgcatgtatgggcacaatcgcctccttcctgtctaagtaccaggacatcatcatcgaacaccagaaggtggtgaagggcaaccagaagagactggagagcctgcgggagctggccggcaaggaaaacctggaataccctagcgtgaccctgccacctcagcctcacaccaaggagggcgttgatgcctacaacgaagtgatcgcccgggtgcgaatgtgggtgaacctgaacctgtggcagaagctgaagctaagcagagatgatgccaagcctctgctgagactgaagggattcccttcctttcctctggtcgagagacaggccaacgaagtggactggtgggacatggtgtgtaacgtgaagaagctgatcaacgagaaaaaggaggatggcaaggtgttttggcagaatctggctggctacaagagacaggaagccctgagaccatacctgagcagcgaggaagatcggaagaagggaaagaaattcgctcggtaccagctgggcgacctgctgctgcacctggaaaagaagcacggcgaggactggggaaaggtgtacgacgaggcctgggagcggattgacaagaaagtggaaggcctgagcaagcacatcaagctggaagaggaacggagaagcgaggacgcccagagcaaggccgccctgaccgactggctgcgggctaaggccagcttcgtgatcgagggcctgaaggaggccgacaaggacgagttctgcagatgcgagctgaagctgcagaagtggtacggggacctgcggggaaagcccttcgccatcgaagccgagaacagcatcctggacatcagcggcttcagcaagcagtacaactgtgccttcatctggcagaaggacggcgtgaagaagctgaacctgtacctgatcatcaactacttcaagggcggcaagctgcggttcaagaagatcaaacctgaagccttcgaagccaacagattctacaccgtgatcaacaaaaagagcggcgagatcgtgcccatggaggtgaacttcaacttcgacgaccccaacctgatcatcctgcctctggcctttggcaagagacagggcagagaattcatctggaacgacctgctgtccctggaaaccggcagcctgaagctggccaacggaagagtgatcgagaagacactgtacaacagaagaacccggcaggatgagcctgccctgttcgtggccctgaccttcgagcggcgggaggtcctggactcctccaatatcaaaccaatgaacctgatcggcgtggcaagaggcgaaaacatccccgccgtgatcgccctgaccgaccccgagggctgcccactgagccggtttaaggatagcctgggaaacccaacccacatcctgagaatcggcgagagctataaggagaagcagcggaccatccaggccaagaaggaggtggagcagcggagagccggcggctacagccggaagtacgccagcaaagccaagaatctggcagacgatatggtgagaaacaccgctagagatctgctgtactacgccgtgacccaggatgccatgctgatcttcgccaacctgagccggggcttcggccggcagggcaagcggaccttcatggccgagagacagtacacacggatggaggactggctgaccgccaagctggcctacgagggcctgagcaagacctacctgtccaagacactggcccagtacacctccaagacatgcagcaactgtgggtttaccatcaccagcgccgactacgacagggtgctggagaagctgaagaagacagcaacaggctggatgaccacaattaacggcaaggagctgaaggtggagggccagattacctactacaacagatacaagagacagaacgtagtcaaggacctgtccgtcgagctggatagactgagcgaagaatctgtgaacaacgacatctcctcctggacaaagggcagaagcggagaagctctgagcctcctgaagaaaagattctcccatagacccgtgcaggagaagttcgtgtgcctgaactgcggcttcgagacacacgcagccgagcaagccgccctgaacatcgccagatcctggctgttcctgcggagccaggagtacaagaaataccagacaaacaagacaaccggcaacaccgataagagagccttcgtcgagacctggcagtccttttaccggaagaagcttaaggaggtgtggaaacctgccgtgcggtctggcggatctggcggaggctcctatggagctggtgaccttcgaggacgtggccgtgtacttcaccaggaaggagtggggctggctggaccccgcccagagggacctgtacagggacgtgatgctggagaactacggcaacttcgtgagcatgggcctgcccttcagcaagcccgacgtgatcagccagctggagcagggcgaggagagctgggtggaggacctgcaggagtgcgaggagggcgagttcagccccgtggtgcacagcggatctggctccggcagcggccccaagaaaaagagaaaagtctaagctgccttctgcggggcttgccttctggccatgcccttcttctctcccttgcacctgtacctcttggtctttgaataaagcctgagtaggaaggctagcaaaaaaaaaaaaaaaaaaaaaaaaaaaaaaaaaaaaaaaaaaaaaaaaaaaaaaaaaaaaaaaaaaaaaaaaaaaaaaaa

SEQ ID NO: 15528 - RNA, 9485 nt, synthetic construct
  source 1..9485: mol_type = other RNA
aggaaataagagagaaaagaagagtaagaagaaatataagagccaccatggcccctaagaagaagcgtaaagtgagccggatggaacgcctcgtctacgaggtgcggcagaagtgcagaaacatcgaggacatctgcatctcctgcggatctctgaacgtgaccctggagcacccactgttcatcggcggcatgtgccagaactgtaaaaactgttttctggagtgtgcctatcaatacgacgatgacggctaccagagctactgcaccatctgttgcggcggaagagaggtgctgatgtgtggaaataacaactgctgccggtgcttctgcgtggaatgcgtggacctgctggtgggccccggcgccgcccaggccgctattaaggaagatccttggaactgctacatgtgcggccacaagggcacatacggcctgctgagacggagagaggactggcctagcagactgcagatgttcttcgccaataaccacgaccaggagttcgacccccctaaggtgtaccctcccgtccccgccgagaagagaaagcccatccgggtcctgagcctgttcgatggcatcgccaccggtctgctggtgctgaaggacctgggcatccaggtggataggtacattgcctccgaggtgtgcgaggactccatcaccgtgggaatggtgcgtcatcagggcaagatcatgtacgtgggcgacgtgcggagcgtgacacagaagcatatccaggagtggggccctttcgacctggtgatcggcggcagcccttgcaatgacctgagcatcgtgaacccagcccggaagggcctgtacgagggaaccggcagactgttcttcgagttttacagactgctgcacgacgcccggcctaaggaaggcgacgaccggcccttcttttggctgttcgagaatgtggtggccatgggagtcagcgacaagcgggatattagccggttcctggagagcaaccccgtgatgatcgatgccaaggaagtgagcgccgcccaccgggccagatacttctggggcaatctgcctggcatgaacagacccctggccagcaccgtgaacgacaagctggagctgcaggagtgcctggagcacggccggatcgccaagttcagcaaggtgagaaccatcaccacccgaagcaacagcatcaaacaaggcaaggaccagcactttcctgtgttcatgaacgagaaggaggacatcctgtggtgtaccgagatggagagagtgttcgggttcccagtccactacacagatgtcagcaacatgtctagactggccagacagagactgctgggaagaagctggtccgtccctgtgatcagacacctgttcgcccctctgaaggagtacttcgcctgcgtgagcagcggcaacagcaacgccaacagccggggccccagcttctctagcggcctggtgccactgtccctgagagggagccacatgggccccatggagatctacaaaaccgtgagcgcctggaagcggcagcctgtgcgcgtgctgagcctgtttcggaatatcgataaagtcctgaaaagcctgggattcctggagagcggctctggctccggcggtggcaccctgaagtacgtggaggatgtgacaaacgtggtcagacgggatgtggagaagtggggccccttcgatctggtgtacggcagcacccaacccctgggcagctcttgtgaccggtgccctggctggtacatgtttcagttccaccggatcctgcagtacgccctgccgagacaggagtcccagcggccattcttttggattttcatggacaacttgctgctgaccgaggatgaccaggaaactaccactcggttcctgcagaccgaagccgtgaccctgcaggacgtgagaggccgggactaccagaacgccatgcgggtgtggtccaacatccctggactgaaaagcaagcacgcacctctgacccctaaagaagaggagtacctgcaggcccaggtgcggagcagaagcaagctggacgcccctaaggtggatctgctggtgaagaattgcctcctgcccctgagagagtacttcaagtatttcagccagaatagtctgcccctgggaggcagcggcggcggcgccctggtgacatttgaggacgtcgccgtgcggttcacccaggaggaatgggctctgctggatccttctcagaaaatcctgtaccgggacgtgatgagagagacataccggaatctgacctccgtgggcatcaactgggaatgttgggaccttgaagcctgcttcagaagcctgggaagaaacctgagagtgcaggtggtgaagagaaagtgcgagctgaccaacagcggcccctgcgccgagggcggcccaagcagcggcgcccctcctcccagcggcggcagcccagccggctccccaacctctaccgaggagggcacctctgagtccgccacccccgagagcggccctggcacctccaccgagcccagcgagggcagcgcacccggcagccctgccggcagccccacctccacagaggagggaaccagcaccgagcccagcgaaggcagcgccccaggcaccagcaccgagcctagtgagcaggagattaaacggatcaacaagatcagaagaagacttgtgaaagacagcaacaccaagaaggccggcaagacaggccccatgaaaaccctgctggttagagtgatgacacccgatctgagagagcggctggaaaacctgagaaagaagcctgaaaatatcccccagcccatcagcaatacatctagagccaacctgaataagctgctgaccgattacaccgaaatgaagaaggcgatcctgcatgtgtactgggaagagttccagaaggaccctgtgggcctgatgagccgggtggcccagcctgccagcaagaagatcgatcagaacaagctgaaacctgagatggacgagaagggcaacctgaccaccgccggctttgcctgctctcagtgtggccagcccctgttcgtgtacaagctggagcaggtgtctgagaagggcaaggcttacaccaactacttcggacggtgcaatgtggccgagcacgaaaagctgatcctgctggcccagctgaagcccgagaaggatagcgacgaagccgtgacatatagcctgggaaagtttgggcagagggccctggatttctacagcattcatgtgaccaaggagtccacccaccccgtgaagcccctggcccagatcgccggaaacagatacgcctccggacctgtgggaaaggccctgagcgacgcatgtatgggcacaatcgcctccttcctgtctaagtaccaggacatcatcatcgaacaccagaaggtggtgaagggcaaccagaagagactggagagcctgcgggagctggccggcaaggaaaacctggaataccctagcgtgaccctgccacctcagcctcacaccaaggagggcgttgatgcctacaacgaagtgatcgcccgggtgcgaatgtgggtgaacctgaacctgtggcagaagctgaagctaagcagagatgatgccaagcctctgctgagactgaagggattcccttcctttcctctggtcgagagacaggccaacgaagtggactggtgggacatggtgtgtaacgtgaagaagctgatcaacgagaaaaaggaggatggcaaggtgttttggcagaatctggctggctacaagagacaggaagccctgagaccatacctgagcagcgaggaagatcggaagaagggaaagaaattcgctcggtaccagctgggcgacctgctgctgcacctggaaaagaagcacggcgaggactggggaaaggtgtacgacgaggcctgggagcggattgacaagaaagtggaaggcctgagcaagcacatcaagctggaagaggaacggagaagcgaggacgcccagagcaaggccgccctgaccgactggctgcgggctaaggccagcttcgtgatcgagggcctgaaggaggccgacaaggacgagttctgcagatgcgagctgaagctgcagaagtggtacggggacctgcggggaaagcccttcgccatcgaagccgagaacagcatcctggacatcagcggcttcagcaagcagtacaactgtgccttcatctggcagaaggacggcgtgaagaagctgaacctgtacctgatcatcaactacttcaagggcggcaagctgcggttcaagaagatcaaacctgaagccttcgaagccaacagattctacaccgtgatcaacaaaaagagcggcgagatcgtgcccatggaggtgaacttcaacttcgacgaccccaacctgatcatcctgcctctggcctttggcaagagacagggcagagaattcatctggaacgacctgctgtccctggaaaccggcagcctgaagctggccaacggaagagtgatcgagaagacactgtacaacagaagaacccggcaggatgagcctgccctgttcgtggccctgaccttcgagcggcgggaggtcctggactcctccaatatcaaaccaatgaacctgatcggcgtggcaagaggcgaaaacatccccgccgtgatcgccctgaccgaccccgagggctgcccactgagccggtttaaggatagcctgggaaacccaacccacatcctgagaatcggcgagagctataaggagaagcagcggaccatccaggccaagaaggaggtggagcagcggagagccggcggctacagccggaagtacgccagcaaagccaagaatctggcagacgatatggtgagaaacaccgctagagatctgctgtactacgccgtgacccaggatgccatgctgatcttcgccaacctgagccggggcttcggccggcagggcaagcggaccttcatggccgagagacagtacacacggatggaggactggctgaccgccaagctggcctacgagggcctgagcaagacctacctgtccaagacactggcccagtacacctccaagacatgcagcaactgtgggtttaccatcaccagcgccgactacgacagggtgctggagaagctgaagaagacagcaacaggctggatgaccacaattaacggcaaggagctgaaggtggagggccagattacctactacaacagatacaagagacagaacgtagtcaaggacctgtccgtcgagctggatagactgagcgaagaatctgtgaacaacgacatctcctcctggacaaagggcagaagcggagaagctctgagcctcctgaagaaaagattctcccatagacccgtgcaggagaagttcgtgtgcctgaactgcggcttcgagacacacgcagccgagcaagccgccctgaacatcgccagatcctggctgttcctgcggagccaggagtacaagaaataccagacaaacaagacaaccggcaacaccgataagagagccttcgtcgagacctggcagtccttttaccggaagaagcttaaggaggtgtggaaacctgccgtgcggtctggcggatctggcggaggctccatggccgccatgcccctgaaggccaggtaccaggagatggtgaccttcgaggacgtggccgtgcacttcaccaagaccgagtggaccggcctgagccccgcccagagggccctgtacaggagcgtgatgctggagaacttcggcaacctgaccgccctgggctaccccgtgcccaagcccgccctgatcagcctgctggagggcggcgacatggcctggggcctggaggcccaggacgaccccggcggcccaagcagcggcgcccctcctcccagcggcggcagcccagccggctccccaacctctaccgaggagggcacctctgagtccgccacccccgagagcggccctggcacctccaccgagcccagcgagggcagcgcacccggcagccctgccggcagccccacctccacagaggagggaaccagcaccgagcccagcgaaggcagcgccccaggcaccagcaccgagcctagtgagcaggagattaaacggatcaacaagatcagaagaagacttgtgaaagacagcaacaccaagaaggccggcaagacaggccccatgaaaaccctgctggttagagtgatgacacccgatctgagagagcggctggaaaacctgagaaagaagcctgaaaatatcccccagcccatcagcaatacatctagagccaacctgaataagctgctgaccgattacaccgaaatgaagaaggcgatcctgcatgtgtactgggaagagttccagaaggaccctgtgggcctgatgagccgggtggcccagcctgccagcaagaagatcgatcagaacaagctgaaacctgagatggacgagaagggcaacctgaccaccgccggctttgcctgctctcagtgtggccagcccctgttcgtgtacaagctggagcaggtgtctgagaagggcaaggcttacaccaactacttcggacggtgcaatgtggccgagcacgaaaagctgatcctgctggcccagctgaagcccgagaaggatagcgacgaagccgtgacatatagcctgggaaagtttgggcagagggccctggatttctacagcattcatgtgaccaaggagtccacccaccccgtgaagcccctggcccagatcgccggaaacagatacgcctccggacctgtgggaaaggccctgagcgacgcatgtatgggcacaatcgcctccttcctgtctaagtaccaggacatcatcatcgaacaccagaaggtggtgaagggcaaccagaagagactggagagcctgcgggagctggccggcaaggaaaacctggaataccctagcgtgaccctgccacctcagcctcacaccaaggagggcgttgatgcctacaacgaagtgatcgcccgggtgcgaatgtgggtgaacctgaacctgtggcagaagctgaagctaagcagagatgatgccaagcctctgctgagactgaagggattcccttcctttcctctggtcgagagacaggccaacgaagtggactggtgggacatggtgtgtaacgtgaagaagctgatcaacgagaaaaaggaggatggcaaggtgttttggcagaatctggctggctacaagagacaggaagccctgagaccatacctgagcagcgaggaagatcggaagaagggaaagaaattcgctcggtaccagctgggcgacctgctgctgcacctggaaaagaagcacggcgaggactggggaaaggtgtacgacgaggcctgggagcggattgacaagaaagtggaaggcctgagcaagcacatcaagctggaagaggaacggagaagcgaggacgcccagagcaaggccgccctgaccgactggctgcgggctaaggccagcttcgtgatcgagggcctgaaggaggccgacaaggacgagttctgcagatgcgagctgaagctgcagaagtggtacggggacctgcggggaaagcccttcgccatcgaagccgagaacagcatcctggacatcagcggcttcagcaagcagtacaactgtgccttcatctggcagaaggacggcgtgaagaagctgaacctgtacctgatcatcaactacttcaagggcggcaagctgcggttcaagaagatcaaacctgaagccttcgaagccaacagattctacaccgtgatcaacaaaaagagcggcgagatcgtgcccatggaggtgaacttcaacttcgacgaccccaacctgatcatcctgcctctggcctttggcaagagacagggcagagaattcatctggaacgacctgctgtccctggaaaccggcagcctgaagctggccaacggaagagtgatcgagaagacactgtacaacagaagaacccggcaggatgagcctgccctgttcgtggccctgaccttcgagcggcgggaggtcctggactcctccaatatcaaaccaatgaacctgatcggcgtggcaagaggcgaaaacatccccgccgtgatcgccctgaccgaccccgagggctgcccactgagccggtttaaggatagcctgggaaacccaacccacatcctgagaatcggcgagagctataaggagaagcagcggaccatccaggccaagaaggaggtggagcagcggagagccggcggctacagccggaagtacgccagcaaagccaagaatctggcagacgatatggtgagaaacaccgctagagatctgctgtactacgccgtgacccaggatgccatgctgatcttcgccaacctgagccggggcttcggccggcagggcaagcggaccttcatggccgagagacagtacacacggatggaggactggctgaccgccaagctggcctacgagggcctgagcaagacctacctgtccaagacactggcccagtacacctccaagacatgcagcaactgtgggtttaccatcaccagcgccgactacgacagggtgctggagaagctgaagaagacagcaacaggctggatgaccacaattaacggcaaggagctgaaggtggagggccagattacctactacaacagatacaagagacagaacgtagtcaaggacctgtccgtcgagctggatagactgagcgaagaatctgtgaacaacgacatctcctcctggacaaagggcagaagcggagaagctctgagcctcctgaagaaaagattctcccatagacccgtgcaggagaagttcgtgtgcctgaactgcggcttcgagacacacgcagccgagcaagccgccctgaacatcgccagatcctggctgttcctgcggagccaggagtacaagaaataccagacaaacaagacaaccggcaacaccgataagagagccttcgtcgagacctggcagtccttttaccggaagaagcttaaggaggtgtggaaacctgccgtgcggtctggcggatctggcggaggctcctatggccgccatgcccctgaaggccaggtaccaggagatggtgaccttcgaggacgtggccgtgcacttcaccaagaccgagtggaccggcctgagccccgcccagagggccctgtacaggagcgtgatgctggagaacttcggcaacctgaccgccctgggctaccccgtgcccaagcccgccctgatcagcctgctggagggcggcgacatggcctggggcctggaggcccaggacgaccccggatctggctccggcagcggccccaagaaaaagagaaaagtctaagctgccttctgcggggcttgccttctggccatgcccttcttctctcccttgcacctgtacctcttggtctttgaataaagcctgagtaggaaggctagcaaaaaaaaaaaaaaaaaaaaaaaaaaaaaaaaaaaaaaaaaaaaaaaaaaaaaaaaaaaaaaaaaaaaaaaaaaaaaaaa

SEQ ID NO: 15529 - RNA, 9485 nt, synthetic construct
  source 1..9485: mol_type = other RNA
aggaaataagagagaaaagaagagtaagaagaaatataagagccaccatggcccctaagaagaagcgtaaagtgagccggatggaacgcctcgtctacgaggtgcggcagaagtgcagaaacatcgaggacatctgcatctcctgcggatctctgaacgtgaccctggagcacccactgttcatcggcggcatgtgccagaactgtaaaaactgttttctggagtgtgcctatcaatacgacgatgacggctaccagagctactgcaccatctgttgcggcggaagagaggtgctgatgtgtggaaataacaactgctgccggtgcttctgcgtggaatgcgtggacctgctggtgggccccggcgccgcccaggccgctattaaggaagatccttggaactgctacatgtgcggccacaagggcacatacggcctgctgagacggagagaggactggcctagcagactgcagatgttcttcgccaataaccacgaccaggagttcgacccccctaaggtgtaccctcccgtccccgccgagaagagaaagcccatccgggtcctgagcctgttcgatggcatcgccaccggtctgctggtgctgaaggacctgggcatccaggtggataggtacattgcctccgaggtgtgcgaggactccatcaccgtgggaatggtgcgtcatcagggcaagatcatgtacgtgggcgacgtgcggagcgtgacacagaagcatatccaggagtggggccctttcgacctggtgatcggcggcagcccttgcaatgacctgagcatcgtgaacccagcccggaagggcctgtacgagggaaccggcagactgttcttcgagttttacagactgctgcacgacgcccggcctaaggaaggcgacgaccggcccttcttttggctgttcgagaatgtggtggccatgggagtcagcgacaagcgggatattagccggttcctggagagcaaccccgtgatgatcgatgccaaggaagtgagcgccgcccaccgggccagatacttctggggcaatctgcctggcatgaacagacccctggccagcaccgtgaacgacaagctggagctgcaggagtgcctggagcacggccggatcgccaagttcagcaaggtgagaaccatcaccacccgaagcaacagcatcaaacaaggcaaggaccagcactttcctgtgttcatgaacgagaaggaggacatcctgtggtgtaccgagatggagagagtgttcgggttcccagtccactacacagatgtcagcaacatgtctagactggccagacagagactgctgggaagaagctggtccgtccctgtgatcagacacctgttcgcccctctgaaggagtacttcgcctgcgtgagcagcggcaacagcaacgccaacagccggggccccagcttctctagcggcctggtgccactgtccctgagagggagccacatgggccccatggagatctacaaaaccgtgagcgcctggaagcggcagcctgtgcgcgtgctgagcctgtttcggaatatcgataaagtcctgaaaagcctgggattcctggagagcggctctggctccggcggtggcaccctgaagtacgtggaggatgtgacaaacgtggtcagacgggatgtggagaagtggggccccttcgatctggtgtacggcagcacccaacccctgggcagctcttgtgaccggtgccctggctggtacatgtttcagttccaccggatcctgcagtacgccctgccgagacaggagtcccagcggccattcttttggattttcatggacaacttgctgctgaccgaggatgaccaggaaactaccactcggttcctgcagaccgaagccgtgaccctgcaggacgtgagaggccgggactaccagaacgccatgcgggtgtggtccaacatccctggactgaaaagcaagcacgcacctctgacccctaaagaagaggagtacctgcaggcccaggtgcggagcagaagcaagctggacgcccctaaggtggatctgctggtgaagaattgcctcctgcccctgagagagtacttcaagtatttcagccagaatagtctgcccctgggaggcagcggcggcggcgccctggtgacatttgaggacgtcgccgtgcggttcacccaggaggaatgggctctgctggatccttctcagaaaatcctgtaccgggacgtgatgagagagacataccggaatctgacctccgtgggcatcaactgggaatgttgggaccttgaagcctgcttcagaagcctgggaagaaacctgagagtgcaggtggtgaagagaaagtgcgagctgaccaacagcggcccctgcgccgagggcggcccaagcagcggcgcccctcctcccagcggcggcagcccagccggctccccaacctctaccgaggagggcacctctgagtccgccacccccgagagcggccctggcacctccaccgagcccagcgagggcagcgcacccggcagccctgccggcagccccacctccacagaggagggaaccagcaccgagcccagcgaaggcagcgccccaggcaccagcaccgagcctagtgagcaggagattaaacggatcaacaagatcagaagaagacttgtgaaagacagcaacaccaagaaggccggcaagacaggccccatgaaaaccctgctggttagagtgatgacacccgatctgagagagcggctggaaaacctgagaaagaagcctgaaaatatcccccagcccatcagcaatacatctagagccaacctgaataagctgctgaccgattacaccgaaatgaagaaggcgatcctgcatgtgtactgggaagagttccagaaggaccctgtgggcctgatgagccgggtggcccagcctgccagcaagaagatcgatcagaacaagctgaaacctgagatggacgagaagggcaacctgaccaccgccggctttgcctgctctcagtgtggccagcccctgttcgtgtacaagctggagcaggtgtctgagaagggcaaggcttacaccaactacttcggacggtgcaatgtggccgagcacgaaaagctgatcctgctggcccagctgaagcccgagaaggatagcgacgaagccgtgacatatagcctgggaaagtttgggcagagggccctggatttctacagcattcatgtgaccaaggagtccacccaccccgtgaagcccctggcccagatcgccggaaacagatacgcctccggacctgtgggaaaggccctgagcgacgcatgtatgggcacaatcgcctccttcctgtctaagtaccaggacatcatcatcgaacaccagaaggtggtgaagggcaaccagaagagactggagagcctgcgggagctggccggcaaggaaaacctggaataccctagcgtgaccctgccacctcagcctcacaccaaggagggcgttgatgcctacaacgaagtgatcgcccgggtgcgaatgtgggtgaacctgaacctgtggcagaagctgaagctaagcagagatgatgccaagcctctgctgagactgaagggattcccttcctttcctctggtcgagagacaggccaacgaagtggactggtgggacatggtgtgtaacgtgaagaagctgatcaacgagaaaaaggaggatggcaaggtgttttggcagaatctggctggctacaagagacaggaagccctgagaccatacctgagcagcgaggaagatcggaagaagggaaagaaattcgctcggtaccagctgggcgacctgctgctgcacctggaaaagaagcacggcgaggactggggaaaggtgtacgacgaggcctgggagcggattgacaagaaagtggaaggcctgagcaagcacatcaagctggaagaggaacggagaagcgaggacgcccagagcaaggccgccctgaccgactggctgcgggctaaggccagcttcgtgatcgagggcctgaaggaggccgacaaggacgagttctgcagatgcgagctgaagctgcagaagtggtacggggacctgcggggaaagcccttcgccatcgaagccgagaacagcatcctggacatcagcggcttcagcaagcagtacaactgtgccttcatctggcagaaggacggcgtgaagaagctgaacctgtacctgatcatcaactacttcaagggcggcaagctgcggttcaagaagatcaaacctgaagccttcgaagccaacagattctacaccgtgatcaacaaaaagagcggcgagatcgtgcccatggaggtgaacttcaacttcgacgaccccaacctgatcatcctgcctctggcctttggcaagagacagggcagagaattcatctggaacgacctgctgtccctggaaaccggcagcctgaagctggccaacggaagagtgatcgagaagacactgtacaacagaagaacccggcaggatgagcctgccctgttcgtggccctgaccttcgagcggcgggaggtcctggactcctccaatatcaaaccaatgaacctgatcggcgtggcaagaggcgaaaacatccccgccgtgatcgccctgaccgaccccgagggctgcccactgagccggtttaaggatagcctgggaaacccaacccacatcctgagaatcggcgagagctataaggagaagcagcggaccatccaggccaagaaggaggtggagcagcggagagccggcggctacagccggaagtacgccagcaaagccaagaatctggcagacgatatggtgagaaacaccgctagagatctgctgtactacgccgtgacccaggatgccatgctgatcttcgccaacctgagccggggcttcggccggcagggcaagcggaccttcatggccgagagacagtacacacggatggaggactggctgaccgccaagctggcctacgagggcctgagcaagacctacctgtccaagacactggcccagtacacctccaagacatgcagcaactgtgggtttaccatcaccagcgccgactacgacagggtgctggagaagctgaagaagacagcaacaggctggatgaccacaattaacggcaaggagctgaaggtggagggccagattacctactacaacagatacaagagacagaacgtagtcaaggacctgtccgtcgagctggatagactgagcgaagaatctgtgaacaacgacatctcctcctggacaaagggcagaagcggagaagctctgagcctcctgaagaaaagattctcccatagacccgtgcaggagaagttcgtgtgcctgaactgcggcttcgagacacacgcagccgagcaagccgccctgaacatcgccagatcctggctgttcctgcggagccaggagtacaagaaataccagacaaacaagacaaccggcaacaccgataagagagccttcgtcgagacctggcagtccttttaccggaagaagcttaaggaggtgtggaaacctgccgtgcggtctggcggatctggcggaggctccgcccaggagagcgtggtgttcagcgacgtgagcatcgacttcagccaggaggagtgggagtgcctgaacgacgaccagagggacctgtacagggacgtgatgctggagaactacagccacctggtgagcatggccggccacagcgtgagcaagcccgacgtgatcagcgtgctggagcagggcaaggagccctggctggtggacagggagctgaccagggagcagtggcccgtgctggagagcggcggcccaagcagcggcgcccctcctcccagcggcggcagcccagccggctccccaacctctaccgaggagggcacctctgagtccgccacccccgagagcggccctggcacctccaccgagcccagcgagggcagcgcacccggcagccctgccggcagccccacctccacagaggagggaaccagcaccgagcccagcgaaggcagcgccccaggcaccagcaccgagcctagtgagcaggagattaaacggatcaacaagatcagaagaagacttgtgaaagacagcaacaccaagaaggccggcaagacaggccccatgaaaaccctgctggttagagtgatgacacccgatctgagagagcggctggaaaacctgagaaagaagcctgaaaatatcccccagcccatcagcaatacatctagagccaacctgaataagctgctgaccgattacaccgaaatgaagaaggcgatcctgcatgtgtactgggaagagttccagaaggaccctgtgggcctgatgagccgggtggcccagcctgccagcaagaagatcgatcagaacaagctgaaacctgagatggacgagaagggcaacctgaccaccgccggctttgcctgctctcagtgtggccagcccctgttcgtgtacaagctggagcaggtgtctgagaagggcaaggcttacaccaactacttcggacggtgcaatgtggccgagcacgaaaagctgatcctgctggcccagctgaagcccgagaaggatagcgacgaagccgtgacatatagcctgggaaagtttgggcagagggccctggatttctacagcattcatgtgaccaaggagtccacccaccccgtgaagcccctggcccagatcgccggaaacagatacgcctccggacctgtgggaaaggccctgagcgacgcatgtatgggcacaatcgcctccttcctgtctaagtaccaggacatcatcatcgaacaccagaaggtggtgaagggcaaccagaagagactggagagcctgcgggagctggccggcaaggaaaacctggaataccctagcgtgaccctgccacctcagcctcacaccaaggagggcgttgatgcctacaacgaagtgatcgcccgggtgcgaatgtgggtgaacctgaacctgtggcagaagctgaagctaagcagagatgatgccaagcctctgctgagactgaagggattcccttcctttcctctggtcgagagacaggccaacgaagtggactggtgggacatggtgtgtaacgtgaagaagctgatcaacgagaaaaaggaggatggcaaggtgttttggcagaatctggctggctacaagagacaggaagccctgagaccatacctgagcagcgaggaagatcggaagaagggaaagaaattcgctcggtaccagctgggcgacctgctgctgcacctggaaaagaagcacggcgaggactggggaaaggtgtacgacgaggcctgggagcggattgacaagaaagtggaaggcctgagcaagcacatcaagctggaagaggaacggagaagcgaggacgcccagagcaaggccgccctgaccgactggctgcgggctaaggccagcttcgtgatcgagggcctgaaggaggccgacaaggacgagttctgcagatgcgagctgaagctgcagaagtggtacggggacctgcggggaaagcccttcgccatcgaagccgagaacagcatcctggacatcagcggcttcagcaagcagtacaactgtgccttcatctggcagaaggacggcgtgaagaagctgaacctgtacctgatcatcaactacttcaagggcggcaagctgcggttcaagaagatcaaacctgaagccttcgaagccaacagattctacaccgtgatcaacaaaaagagcggcgagatcgtgcccatggaggtgaacttcaacttcgacgaccccaacctgatcatcctgcctctggcctttggcaagagacagggcagagaattcatctggaacgacctgctgtccctggaaaccggcagcctgaagctggccaacggaagagtgatcgagaagacactgtacaacagaagaacccggcaggatgagcctgccctgttcgtggccctgaccttcgagcggcgggaggtcctggactcctccaatatcaaaccaatgaacctgatcggcgtggcaagaggcgaaaacatccccgccgtgatcgccctgaccgaccccgagggctgcccactgagccggtttaaggatagcctgggaaacccaacccacatcctgagaatcggcgagagctataaggagaagcagcggaccatccaggccaagaaggaggtggagcagcggagagccggcggctacagccggaagtacgccagcaaagccaagaatctggcagacgatatggtgagaaacaccgctagagatctgctgtactacgccgtgacccaggatgccatgctgatcttcgccaacctgagccggggcttcggccggcagggcaagcggaccttcatggccgagagacagtacacacggatggaggactggctgaccgccaagctggcctacgagggcctgagcaagacctacctgtccaagacactggcccagtacacctccaagacatgcagcaactgtgggtttaccatcaccagcgccgactacgacagggtgctggagaagctgaagaagacagcaacaggctggatgaccacaattaacggcaaggagctgaaggtggagggccagattacctactacaacagatacaagagacagaacgtagtcaaggacctgtccgtcgagctggatagactgagcgaagaatctgtgaacaacgacatctcctcctggacaaagggcagaagcggagaagctctgagcctcctgaagaaaagattctcccatagacccgtgcaggagaagttcgtgtgcctgaactgcggcttcgagacacacgcagccgagcaagccgccctgaacatcgccagatcctggctgttcctgcggagccaggagtacaagaaataccagacaaacaagacaaccggcaacaccgataagagagccttcgtcgagacctggcagtccttttaccggaagaagcttaaggaggtgtggaaacctgccgtgcggtctggcggatctggcggaggctcctgcccaggagagcgtggtgttcagcgacgtgagcatcgacttcagccaggaggagtgggagtgcctgaacgacgaccagagggacctgtacagggacgtgatgctggagaactacagccacctggtgagcatggccggccacagcgtgagcaagcccgacgtgatcagcgtgctggagcagggcaaggagccctggctggtggacagggagctgaccagggagcagtggcccgtgctggagagcggatctggctccggcagcggccccaagaaaaagagaaaagtctaagctgccttctgcggggcttgccttctggccatgcccttcttctctcccttgcacctgtacctcttggtctttgaataaagcctgagtaggaaggctagcaaaaaaaaaaaaaaaaaaaaaaaaaaaaaaaaaaaaaaaaaaaaaaaaaaaaaaaaaaaaaaaaaaaaaaaaaaaaaaaa

SEQ ID NO: 15530 - RNA, 9485 nt, synthetic construct
  source 1..9485: mol_type = other RNA
aggaaataagagagaaaagaagagtaagaagaaatataagagccaccatggcccctaagaagaagcgtaaagtgagccggatggaacgcctcgtctacgaggtgcggcagaagtgcagaaacatcgaggacatctgcatctcctgcggatctctgaacgtgaccctggagcacccactgttcatcggcggcatgtgccagaactgtaaaaactgttttctggagtgtgcctatcaatacgacgatgacggctaccagagctactgcaccatctgttgcggcggaagagaggtgctgatgtgtggaaataacaactgctgccggtgcttctgcgtggaatgcgtggacctgctggtgggccccggcgccgcccaggccgctattaaggaagatccttggaactgctacatgtgcggccacaagggcacatacggcctgctgagacggagagaggactggcctagcagactgcagatgttcttcgccaataaccacgaccaggagttcgacccccctaaggtgtaccctcccgtccccgccgagaagagaaagcccatccgggtcctgagcctgttcgatggcatcgccaccggtctgctggtgctgaaggacctgggcatccaggtggataggtacattgcctccgaggtgtgcgaggactccatcaccgtgggaatggtgcgtcatcagggcaagatcatgtacgtgggcgacgtgcggagcgtgacacagaagcatatccaggagtggggccctttcgacctggtgatcggcggcagcccttgcaatgacctgagcatcgtgaacccagcccggaagggcctgtacgagggaaccggcagactgttcttcgagttttacagactgctgcacgacgcccggcctaaggaaggcgacgaccggcccttcttttggctgttcgagaatgtggtggccatgggagtcagcgacaagcgggatattagccggttcctggagagcaaccccgtgatgatcgatgccaaggaagtgagcgccgcccaccgggccagatacttctggggcaatctgcctggcatgaacagacccctggccagcaccgtgaacgacaagctggagctgcaggagtgcctggagcacggccggatcgccaagttcagcaaggtgagaaccatcaccacccgaagcaacagcatcaaacaaggcaaggaccagcactttcctgtgttcatgaacgagaaggaggacatcctgtggtgtaccgagatggagagagtgttcgggttcccagtccactacacagatgtcagcaacatgtctagactggccagacagagactgctgggaagaagctggtccgtccctgtgatcagacacctgttcgcccctctgaaggagtacttcgcctgcgtgagcagcggcaacagcaacgccaacagccggggccccagcttctctagcggcctggtgccactgtccctgagagggagccacatgggccccatggagatctacaaaaccgtgagcgcctggaagcggcagcctgtgcgcgtgctgagcctgtttcggaatatcgataaagtcctgaaaagcctgggattcctggagagcggctctggctccggcggtggcaccctgaagtacgtggaggatgtgacaaacgtggtcagacgggatgtggagaagtggggccccttcgatctggtgtacggcagcacccaacccctgggcagctcttgtgaccggtgccctggctggtacatgtttcagttccaccggatcctgcagtacgccctgccgagacaggagtcccagcggccattcttttggattttcatggacaacttgctgctgaccgaggatgaccaggaaactaccactcggttcctgcagaccgaagccgtgaccctgcaggacgtgagaggccgggactaccagaacgccatgcgggtgtggtccaacatccctggactgaaaagcaagcacgcacctctgacccctaaagaagaggagtacctgcaggcccaggtgcggagcagaagcaagctggacgcccctaaggtggatctgctggtgaagaattgcctcctgcccctgagagagtacttcaagtatttcagccagaatagtctgcccctgggaggcagcggcggcggcgccctggtgacatttgaggacgtcgccgtgcggttcacccaggaggaatgggctctgctggatccttctcagaaaatcctgtaccgggacgtgatgagagagacataccggaatctgacctccgtgggcatcaactgggaatgttgggaccttgaagcctgcttcagaagcctgggaagaaacctgagagtgcaggtggtgaagagaaagtgcgagctgaccaacagcggcccctgcgccgagggcggcccaagcagcggcgcccctcctcccagcggcggcagcccagccggctccccaacctctaccgaggagggcacctctgagtccgccacccccgagagcggccctggcacctccaccgagcccagcgagggcagcgcacccggcagccctgccggcagccccacctccacagaggagggaaccagcaccgagcccagcgaaggcagcgccccaggcaccagcaccgagcctagtgagcaggagattaaacggatcaacaagatcagaagaagacttgtgaaagacagcaacaccaagaaggccggcaagacaggccccatgaaaaccctgctggttagagtgatgacacccgatctgagagagcggctggaaaacctgagaaagaagcctgaaaatatcccccagcccatcagcaatacatctagagccaacctgaataagctgctgaccgattacaccgaaatgaagaaggcgatcctgcatgtgtactgggaagagttccagaaggaccctgtgggcctgatgagccgggtggcccagcctgccagcaagaagatcgatcagaacaagctgaaacctgagatggacgagaagggcaacctgaccaccgccggctttgcctgctctcagtgtggccagcccctgttcgtgtacaagctggagcaggtgtctgagaagggcaaggcttacaccaactacttcggacggtgcaatgtggccgagcacgaaaagctgatcctgctggcccagctgaagcccgagaaggatagcgacgaagccgtgacatatagcctgggaaagtttgggcagagggccctggatttctacagcattcatgtgaccaaggagtccacccaccccgtgaagcccctggcccagatcgccggaaacagatacgcctccggacctgtgggaaaggccctgagcgacgcatgtatgggcacaatcgcctccttcctgtctaagtaccaggacatcatcatcgaacaccagaaggtggtgaagggcaaccagaagagactggagagcctgcgggagctggccggcaaggaaaacctggaataccctagcgtgaccctgccacctcagcctcacaccaaggagggcgttgatgcctacaacgaagtgatcgcccgggtgcgaatgtgggtgaacctgaacctgtggcagaagctgaagctaagcagagatgatgccaagcctctgctgagactgaagggattcccttcctttcctctggtcgagagacaggccaacgaagtggactggtgggacatggtgtgtaacgtgaagaagctgatcaacgagaaaaaggaggatggcaaggtgttttggcagaatctggctggctacaagagacaggaagccctgagaccatacctgagcagcgaggaagatcggaagaagggaaagaaattcgctcggtaccagctgggcgacctgctgctgcacctggaaaagaagcacggcgaggactggggaaaggtgtacgacgaggcctgggagcggattgacaagaaagtggaaggcctgagcaagcacatcaagctggaagaggaacggagaagcgaggacgcccagagcaaggccgccctgaccgactggctgcgggctaaggccagcttcgtgatcgagggcctgaaggaggccgacaaggacgagttctgcagatgcgagctgaagctgcagaagtggtacggggacctgcggggaaagcccttcgccatcgaagccgagaacagcatcctggacatcagcggcttcagcaagcagtacaactgtgccttcatctggcagaaggacggcgtgaagaagctgaacctgtacctgatcatcaactacttcaagggcggcaagctgcggttcaagaagatcaaacctgaagccttcgaagccaacagattctacaccgtgatcaacaaaaagagcggcgagatcgtgcccatggaggtgaacttcaacttcgacgaccccaacctgatcatcctgcctctggcctttggcaagagacagggcagagaattcatctggaacgacctgctgtccctggaaaccggcagcctgaagctggccaacggaagagtgatcgagaagacactgtacaacagaagaacccggcaggatgagcctgccctgttcgtggccctgaccttcgagcggcgggaggtcctggactcctccaatatcaaaccaatgaacctgatcggcgtggcaagaggcgaaaacatccccgccgtgatcgccctgaccgaccccgagggctgcccactgagccggtttaaggatagcctgggaaacccaacccacatcctgagaatcggcgagagctataaggagaagcagcggaccatccaggccaagaaggaggtggagcagcggagagccggcggctacagccggaagtacgccagcaaagccaagaatctggcagacgatatggtgagaaacaccgctagagatctgctgtactacgccgtgacccaggatgccatgctgatcttcgccaacctgagccggggcttcggccggcagggcaagcggaccttcatggccgagagacagtacacacggatggaggactggctgaccgccaagctggcctacgagggcctgagcaagacctacctgtccaagacactggcccagtacacctccaagacatgcagcaactgtgggtttaccatcaccagcgccgactacgacagggtgctggagaagctgaagaagacagcaacaggctggatgaccacaattaacggcaaggagctgaaggtggagggccagattacctactacaacagatacaagagacagaacgtagtcaaggacctgtccgtcgagctggatagactgagcgaagaatctgtgaacaacgacatctcctcctggacaaagggcagaagcggagaagctctgagcctcctgaagaaaagattctcccatagacccgtgcaggagaagttcgtgtgcctgaactgcggcttcgagacacacgcagccgagcaagccgccctgaacatcgccagatcctggctgttcctgcggagccaggagtacaagaaataccagacaaacaagacaaccggcaacaccgataagagagccttcgtcgagacctggcagtccttttaccggaagaagcttaaggaggtgtggaaacctgccgtgcggtctggcggatctggcggaggctccatggagggcctggtgatgttccaggacctgttcatcgacttcagccaggaggagtgggagtgcctggacaccgcccagaaggacctgtacagggacgtgatgatggagaactacagcagcctggtgagcctgggcctgtgcatccccaagcccgacgtgatcagcctgctggagcagggcaaggagccctggatggtgagcagggacgtgctgggcggctggtgccccgacagcgagttcaggggcggcccaagcagcggcgcccctcctcccagcggcggcagcccagccggctccccaacctctaccgaggagggcacctctgagtccgccacccccgagagcggccctggcacctccaccgagcccagcgagggcagcgcacccggcagccctgccggcagccccacctccacagaggagggaaccagcaccgagcccagcgaaggcagcgccccaggcaccagcaccgagcctagtgagcaggagattaaacggatcaacaagatcagaagaagacttgtgaaagacagcaacaccaagaaggccggcaagacaggccccatgaaaaccctgctggttagagtgatgacacccgatctgagagagcggctggaaaacctgagaaagaagcctgaaaatatcccccagcccatcagcaatacatctagagccaacctgaataagctgctgaccgattacaccgaaatgaagaaggcgatcctgcatgtgtactgggaagagttccagaaggaccctgtgggcctgatgagccgggtggcccagcctgccagcaagaagatcgatcagaacaagctgaaacctgagatggacgagaagggcaacctgaccaccgccggctttgcctgctctcagtgtggccagcccctgttcgtgtacaagctggagcaggtgtctgagaagggcaaggcttacaccaactacttcggacggtgcaatgtggccgagcacgaaaagctgatcctgctggcccagctgaagcccgagaaggatagcgacgaagccgtgacatatagcctgggaaagtttgggcagagggccctggatttctacagcattcatgtgaccaaggagtccacccaccccgtgaagcccctggcccagatcgccggaaacagatacgcctccggacctgtgggaaaggccctgagcgacgcatgtatgggcacaatcgcctccttcctgtctaagtaccaggacatcatcatcgaacaccagaaggtggtgaagggcaaccagaagagactggagagcctgcgggagctggccggcaaggaaaacctggaataccctagcgtgaccctgccacctcagcctcacaccaaggagggcgttgatgcctacaacgaagtgatcgcccgggtgcgaatgtgggtgaacctgaacctgtggcagaagctgaagctaagcagagatgatgccaagcctctgctgagactgaagggattcccttcctttcctctggtcgagagacaggccaacgaagtggactggtgggacatggtgtgtaacgtgaagaagctgatcaacgagaaaaaggaggatggcaaggtgttttggcagaatctggctggctacaagagacaggaagccctgagaccatacctgagcagcgaggaagatcggaagaagggaaagaaattcgctcggtaccagctgggcgacctgctgctgcacctggaaaagaagcacggcgaggactggggaaaggtgtacgacgaggcctgggagcggattgacaagaaagtggaaggcctgagcaagcacatcaagctggaagaggaacggagaagcgaggacgcccagagcaaggccgccctgaccgactggctgcgggctaaggccagcttcgtgatcgagggcctgaaggaggccgacaaggacgagttctgcagatgcgagctgaagctgcagaagtggtacggggacctgcggggaaagcccttcgccatcgaagccgagaacagcatcctggacatcagcggcttcagcaagcagtacaactgtgccttcatctggcagaaggacggcgtgaagaagctgaacctgtacctgatcatcaactacttcaagggcggcaagctgcggttcaagaagatcaaacctgaagccttcgaagccaacagattctacaccgtgatcaacaaaaagagcggcgagatcgtgcccatggaggtgaacttcaacttcgacgaccccaacctgatcatcctgcctctggcctttggcaagagacagggcagagaattcatctggaacgacctgctgtccctggaaaccggcagcctgaagctggccaacggaagagtgatcgagaagacactgtacaacagaagaacccggcaggatgagcctgccctgttcgtggccctgaccttcgagcggcgggaggtcctggactcctccaatatcaaaccaatgaacctgatcggcgtggcaagaggcgaaaacatccccgccgtgatcgccctgaccgaccccgagggctgcccactgagccggtttaaggatagcctgggaaacccaacccacatcctgagaatcggcgagagctataaggagaagcagcggaccatccaggccaagaaggaggtggagcagcggagagccggcggctacagccggaagtacgccagcaaagccaagaatctggcagacgatatggtgagaaacaccgctagagatctgctgtactacgccgtgacccaggatgccatgctgatcttcgccaacctgagccggggcttcggccggcagggcaagcggaccttcatggccgagagacagtacacacggatggaggactggctgaccgccaagctggcctacgagggcctgagcaagacctacctgtccaagacactggcccagtacacctccaagacatgcagcaactgtgggtttaccatcaccagcgccgactacgacagggtgctggagaagctgaagaagacagcaacaggctggatgaccacaattaacggcaaggagctgaaggtggagggccagattacctactacaacagatacaagagacagaacgtagtcaaggacctgtccgtcgagctggatagactgagcgaagaatctgtgaacaacgacatctcctcctggacaaagggcagaagcggagaagctctgagcctcctgaagaaaagattctcccatagacccgtgcaggagaagttcgtgtgcctgaactgcggcttcgagacacacgcagccgagcaagccgccctgaacatcgccagatcctggctgttcctgcggagccaggagtacaagaaataccagacaaacaagacaaccggcaacaccgataagagagccttcgtcgagacctggcagtccttttaccggaagaagcttaaggaggtgtggaaacctgccgtgcggtctggcggatctggcggaggctcctatggagggcctggtgatgttccaggacctgttcatcgacttcagccaggaggagtgggagtgcctggacaccgcccagaaggacctgtacagggacgtgatgatggagaactacagcagcctggtgagcctgggcctgtgcatccccaagcccgacgtgatcagcctgctggagcagggcaaggagccctggatggtgagcagggacgtgctgggcggctggtgccccgacagcgagttcaggggatctggctccggcagcggccccaagaaaaagagaaaagtctaagctgccttctgcggggcttgccttctggccatgcccttcttctctcccttgcacctgtacctcttggtctttgaataaagcctgagtaggaaggctagcaaaaaaaaaaaaaaaaaaaaaaaaaaaaaaaaaaaaaaaaaaaaaaaaaaaaaaaaaaaaaaaaaaaaaaaaaaaaaaaa

SEQ ID NO: 15531 - RNA, 9485 nt, synthetic construct
  source 1..9485: mol_type = other RNA
aggaaataagagagaaaagaagagtaagaagaaatataagagccaccatggcccctaagaagaagcgtaaagtgagccggatggaacgcctcgtctacgaggtgcggcagaagtgcagaaacatcgaggacatctgcatctcctgcggatctctgaacgtgaccctggagcacccactgttcatcggcggcatgtgccagaactgtaaaaactgttttctggagtgtgcctatcaatacgacgatgacggctaccagagctactgcaccatctgttgcggcggaagagaggtgctgatgtgtggaaataacaactgctgccggtgcttctgcgtggaatgcgtggacctgctggtgggccccggcgccgcccaggccgctattaaggaagatccttggaactgctacatgtgcggccacaagggcacatacggcctgctgagacggagagaggactggcctagcagactgcagatgttcttcgccaataaccacgaccaggagttcgacccccctaaggtgtaccctcccgtccccgccgagaagagaaagcccatccgggtcctgagcctgttcgatggcatcgccaccggtctgctggtgctgaaggacctgggcatccaggtggataggtacattgcctccgaggtgtgcgaggactccatcaccgtgggaatggtgcgtcatcagggcaagatcatgtacgtgggcgacgtgcggagcgtgacacagaagcatatccaggagtggggccctttcgacctggtgatcggcggcagcccttgcaatgacctgagcatcgtgaacccagcccggaagggcctgtacgagggaaccggcagactgttcttcgagttttacagactgctgcacgacgcccggcctaaggaaggcgacgaccggcccttcttttggctgttcgagaatgtggtggccatgggagtcagcgacaagcgggatattagccggttcctggagagcaaccccgtgatgatcgatgccaaggaagtgagcgccgcccaccgggccagatacttctggggcaatctgcctggcatgaacagacccctggccagcaccgtgaacgacaagctggagctgcaggagtgcctggagcacggccggatcgccaagttcagcaaggtgagaaccatcaccacccgaagcaacagcatcaaacaaggcaaggaccagcactttcctgtgttcatgaacgagaaggaggacatcctgtggtgtaccgagatggagagagtgttcgggttcccagtccactacacagatgtcagcaacatgtctagactggccagacagagactgctgggaagaagctggtccgtccctgtgatcagacacctgttcgcccctctgaaggagtacttcgcctgcgtgagcagcggcaacagcaacgccaacagccggggccccagcttctctagcggcctggtgccactgtccctgagagggagccacatgggccccatggagatctacaaaaccgtgagcgcctggaagcggcagcctgtgcgcgtgctgagcctgtttcggaatatcgataaagtcctgaaaagcctgggattcctggagagcggctctggctccggcggtggcaccctgaagtacgtggaggatgtgacaaacgtggtcagacgggatgtggagaagtggggccccttcgatctggtgtacggcagcacccaacccctgggcagctcttgtgaccggtgccctggctggtacatgtttcagttccaccggatcctgcagtacgccctgccgagacaggagtcccagcggccattcttttggattttcatggacaacttgctgctgaccgaggatgaccaggaaactaccactcggttcctgcagaccgaagccgtgaccctgcaggacgtgagaggccgggactaccagaacgccatgcgggtgtggtccaacatccctggactgaaaagcaagcacgcacctctgacccctaaagaagaggagtacctgcaggcccaggtgcggagcagaagcaagctggacgcccctaaggtggatctgctggtgaagaattgcctcctgcccctgagagagtacttcaagtatttcagccagaatagtctgcccctgggaggcagcggcggcggcgccctggtgacatttgaggacgtcgccgtgcggttcacccaggaggaatgggctctgctggatccttctcagaaaatcctgtaccgggacgtgatgagagagacataccggaatctgacctccgtgggcatcaactgggaatgttgggaccttgaagcctgcttcagaagcctgggaagaaacctgagagtgcaggtggtgaagagaaagtgcgagctgaccaacagcggcccctgcgccgagggcggcccaagcagcggcgcccctcctcccagcggcggcagcccagccggctccccaacctctaccgaggagggcacctctgagtccgccacccccgagagcggccctggcacctccaccgagcccagcgagggcagcgcacccggcagccctgccggcagccccacctccacagaggagggaaccagcaccgagcccagcgaaggcagcgccccaggcaccagcaccgagcctagtgagcaggagattaaacggatcaacaagatcagaagaagacttgtgaaagacagcaacaccaagaaggccggcaagacaggccccatgaaaaccctgctggttagagtgatgacacccgatctgagagagcggctggaaaacctgagaaagaagcctgaaaatatcccccagcccatcagcaatacatctagagccaacctgaataagctgctgaccgattacaccgaaatgaagaaggcgatcctgcatgtgtactgggaagagttccagaaggaccctgtgggcctgatgagccgggtggcccagcctgccagcaagaagatcgatcagaacaagctgaaacctgagatggacgagaagggcaacctgaccaccgccggctttgcctgctctcagtgtggccagcccctgttcgtgtacaagctggagcaggtgtctgagaagggcaaggcttacaccaactacttcggacggtgcaatgtggccgagcacgaaaagctgatcctgctggcccagctgaagcccgagaaggatagcgacgaagccgtgacatatagcctgggaaagtttgggcagagggccctggatttctacagcattcatgtgaccaaggagtccacccaccccgtgaagcccctggcccagatcgccggaaacagatacgcctccggacctgtgggaaaggccctgagcgacgcatgtatgggcacaatcgcctccttcctgtctaagtaccaggacatcatcatcgaacaccagaaggtggtgaagggcaaccagaagagactggagagcctgcgggagctggccggcaaggaaaacctggaataccctagcgtgaccctgccacctcagcctcacaccaaggagggcgttgatgcctacaacgaagtgatcgcccgggtgcgaatgtgggtgaacctgaacctgtggcagaagctgaagctaagcagagatgatgccaagcctctgctgagactgaagggattcccttcctttcctctggtcgagagacaggccaacgaagtggactggtgggacatggtgtgtaacgtgaagaagctgatcaacgagaaaaaggaggatggcaaggtgttttggcagaatctggctggctacaagagacaggaagccctgagaccatacctgagcagcgaggaagatcggaagaagggaaagaaattcgctcggtaccagctgggcgacctgctgctgcacctggaaaagaagcacggcgaggactggggaaaggtgtacgacgaggcctgggagcggattgacaagaaagtggaaggcctgagcaagcacatcaagctggaagaggaacggagaagcgaggacgcccagagcaaggccgccctgaccgactggctgcgggctaaggccagcttcgtgatcgagggcctgaaggaggccgacaaggacgagttctgcagatgcgagctgaagctgcagaagtggtacggggacctgcggggaaagcccttcgccatcgaagccgagaacagcatcctggacatcagcggcttcagcaagcagtacaactgtgccttcatctggcagaaggacggcgtgaagaagctgaacctgtacctgatcatcaactacttcaagggcggcaagctgcggttcaagaagatcaaacctgaagccttcgaagccaacagattctacaccgtgatcaacaaaaagagcggcgagatcgtgcccatggaggtgaacttcaacttcgacgaccccaacctgatcatcctgcctctggcctttggcaagagacagggcagagaattcatctggaacgacctgctgtccctggaaaccggcagcctgaagctggccaacggaagagtgatcgagaagacactgtacaacagaagaacccggcaggatgagcctgccctgttcgtggccctgaccttcgagcggcgggaggtcctggactcctccaatatcaaaccaatgaacctgatcggcgtggcaagaggcgaaaacatccccgccgtgatcgccctgaccgaccccgagggctgcccactgagccggtttaaggatagcctgggaaacccaacccacatcctgagaatcggcgagagctataaggagaagcagcggaccatccaggccaagaaggaggtggagcagcggagagccggcggctacagccggaagtacgccagcaaagccaagaatctggcagacgatatggtgagaaacaccgctagagatctgctgtactacgccgtgacccaggatgccatgctgatcttcgccaacctgagccggggcttcggccggcagggcaagcggaccttcatggccgagagacagtacacacggatggaggactggctgaccgccaagctggcctacgagggcctgagcaagacctacctgtccaagacactggcccagtacacctccaagacatgcagcaactgtgggtttaccatcaccagcgccgactacgacagggtgctggagaagctgaagaagacagcaacaggctggatgaccacaattaacggcaaggagctgaaggtggagggccagattacctactacaacagatacaagagacagaacgtagtcaaggacctgtccgtcgagctggatagactgagcgaagaatctgtgaacaacgacatctcctcctggacaaagggcagaagcggagaagctctgagcctcctgaagaaaagattctcccatagacccgtgcaggagaagttcgtgtgcctgaactgcggcttcgagacacacgcagccgagcaagccgccctgaacatcgccagatcctggctgttcctgcggagccaggagtacaagaaataccagacaaacaagacaaccggcaacaccgataagagagccttcgtcgagacctggcagtccttttaccggaagaagcttaaggaggtgtggaaacctgccgtgcggtctggcggatctggcggaggctccaggaccagcgccttccccttccaggcccccgtgaccttcggcgacctggccatctacttcagccaggaggagtgggagtggctgagccccatccagaaggacctgtacgaggacgtgatgctggagaactaccagaacctggtgagcctgggcctgtgcttcaggaggcccaacgtgatcaccctgctggagaagggcaaggccccctggatggtggaccccgtgaagaggaggaggggcctgggcggcccaagcagcggcgcccctcctcccagcggcggcagcccagccggctccccaacctctaccgaggagggcacctctgagtccgccacccccgagagcggccctggcacctccaccgagcccagcgagggcagcgcacccggcagccctgccggcagccccacctccacagaggagggaaccagcaccgagcccagcgaaggcagcgccccaggcaccagcaccgagcctagtgagcaggagattaaacggatcaacaagatcagaagaagacttgtgaaagacagcaacaccaagaaggccggcaagacaggccccatgaaaaccctgctggttagagtgatgacacccgatctgagagagcggctggaaaacctgagaaagaagcctgaaaatatcccccagcccatcagcaatacatctagagccaacctgaataagctgctgaccgattacaccgaaatgaagaaggcgatcctgcatgtgtactgggaagagttccagaaggaccctgtgggcctgatgagccgggtggcccagcctgccagcaagaagatcgatcagaacaagctgaaacctgagatggacgagaagggcaacctgaccaccgccggctttgcctgctctcagtgtggccagcccctgttcgtgtacaagctggagcaggtgtctgagaagggcaaggcttacaccaactacttcggacggtgcaatgtggccgagcacgaaaagctgatcctgctggcccagctgaagcccgagaaggatagcgacgaagccgtgacatatagcctgggaaagtttgggcagagggccctggatttctacagcattcatgtgaccaaggagtccacccaccccgtgaagcccctggcccagatcgccggaaacagatacgcctccggacctgtgggaaaggccctgagcgacgcatgtatgggcacaatcgcctccttcctgtctaagtaccaggacatcatcatcgaacaccagaaggtggtgaagggcaaccagaagagactggagagcctgcgggagctggccggcaaggaaaacctggaataccctagcgtgaccctgccacctcagcctcacaccaaggagggcgttgatgcctacaacgaagtgatcgcccgggtgcgaatgtgggtgaacctgaacctgtggcagaagctgaagctaagcagagatgatgccaagcctctgctgagactgaagggattcccttcctttcctctggtcgagagacaggccaacgaagtggactggtgggacatggtgtgtaacgtgaagaagctgatcaacgagaaaaaggaggatggcaaggtgttttggcagaatctggctggctacaagagacaggaagccctgagaccatacctgagcagcgaggaagatcggaagaagggaaagaaattcgctcggtaccagctgggcgacctgctgctgcacctggaaaagaagcacggcgaggactggggaaaggtgtacgacgaggcctgggagcggattgacaagaaagtggaaggcctgagcaagcacatcaagctggaagaggaacggagaagcgaggacgcccagagcaaggccgccctgaccgactggctgcgggctaaggccagcttcgtgatcgagggcctgaaggaggccgacaaggacgagttctgcagatgcgagctgaagctgcagaagtggtacggggacctgcggggaaagcccttcgccatcgaagccgagaacagcatcctggacatcagcggcttcagcaagcagtacaactgtgccttcatctggcagaaggacggcgtgaagaagctgaacctgtacctgatcatcaactacttcaagggcggcaagctgcggttcaagaagatcaaacctgaagccttcgaagccaacagattctacaccgtgatcaacaaaaagagcggcgagatcgtgcccatggaggtgaacttcaacttcgacgaccccaacctgatcatcctgcctctggcctttggcaagagacagggcagagaattcatctggaacgacctgctgtccctggaaaccggcagcctgaagctggccaacggaagagtgatcgagaagacactgtacaacagaagaacccggcaggatgagcctgccctgttcgtggccctgaccttcgagcggcgggaggtcctggactcctccaatatcaaaccaatgaacctgatcggcgtggcaagaggcgaaaacatccccgccgtgatcgccctgaccgaccccgagggctgcccactgagccggtttaaggatagcctgggaaacccaacccacatcctgagaatcggcgagagctataaggagaagcagcggaccatccaggccaagaaggaggtggagcagcggagagccggcggctacagccggaagtacgccagcaaagccaagaatctggcagacgatatggtgagaaacaccgctagagatctgctgtactacgccgtgacccaggatgccatgctgatcttcgccaacctgagccggggcttcggccggcagggcaagcggaccttcatggccgagagacagtacacacggatggaggactggctgaccgccaagctggcctacgagggcctgagcaagacctacctgtccaagacactggcccagtacacctccaagacatgcagcaactgtgggtttaccatcaccagcgccgactacgacagggtgctggagaagctgaagaagacagcaacaggctggatgaccacaattaacggcaaggagctgaaggtggagggccagattacctactacaacagatacaagagacagaacgtagtcaaggacctgtccgtcgagctggatagactgagcgaagaatctgtgaacaacgacatctcctcctggacaaagggcagaagcggagaagctctgagcctcctgaagaaaagattctcccatagacccgtgcaggagaagttcgtgtgcctgaactgcggcttcgagacacacgcagccgagcaagccgccctgaacatcgccagatcctggctgttcctgcggagccaggagtacaagaaataccagacaaacaagacaaccggcaacaccgataagagagccttcgtcgagacctggcagtccttttaccggaagaagcttaaggaggtgtggaaacctgccgtgcggtctggcggatctggcggaggctcctaggaccagcgccttccccttccaggcccccgtgaccttcggcgacctggccatctacttcagccaggaggagtgggagtggctgagccccatccagaaggacctgtacgaggacgtgatgctggagaactaccagaacctggtgagcctgggcctgtgcttcaggaggcccaacgtgatcaccctgctggagaagggcaaggccccctggatggtggaccccgtgaagaggaggaggggcctgggatctggctccggcagcggccccaagaaaaagagaaaagtctaagctgccttctgcggggcttgccttctggccatgcccttcttctctcccttgcacctgtacctcttggtctttgaataaagcctgagtaggaaggctagcaaaaaaaaaaaaaaaaaaaaaaaaaaaaaaaaaaaaaaaaaaaaaaaaaaaaaaaaaaaaaaaaaaaaaaaaaaaaaaaa

SEQ ID NO: 15532 - RNA, 9485 nt, synthetic construct
  source 1..9485: mol_type = other RNA
aggaaataagagagaaaagaagagtaagaagaaatataagagccaccatggcccctaagaagaagcgtaaagtgagccggatggaacgcctcgtctacgaggtgcggcagaagtgcagaaacatcgaggacatctgcatctcctgcggatctctgaacgtgaccctggagcacccactgttcatcggcggcatgtgccagaactgtaaaaactgttttctggagtgtgcctatcaatacgacgatgacggctaccagagctactgcaccatctgttgcggcggaagagaggtgctgatgtgtggaaataacaactgctgccggtgcttctgcgtggaatgcgtggacctgctggtgggccccggcgccgcccaggccgctattaaggaagatccttggaactgctacatgtgcggccacaagggcacatacggcctgctgagacggagagaggactggcctagcagactgcagatgttcttcgccaataaccacgaccaggagttcgacccccctaaggtgtaccctcccgtccccgccgagaagagaaagcccatccgggtcctgagcctgttcgatggcatcgccaccggtctgctggtgctgaaggacctgggcatccaggtggataggtacattgcctccgaggtgtgcgaggactccatcaccgtgggaatggtgcgtcatcagggcaagatcatgtacgtgggcgacgtgcggagcgtgacacagaagcatatccaggagtggggccctttcgacctggtgatcggcggcagcccttgcaatgacctgagcatcgtgaacccagcccggaagggcctgtacgagggaaccggcagactgttcttcgagttttacagactgctgcacgacgcccggcctaaggaaggcgacgaccggcccttcttttggctgttcgagaatgtggtggccatgggagtcagcgacaagcgggatattagccggttcctggagagcaaccccgtgatgatcgatgccaaggaagtgagcgccgcccaccgggccagatacttctggggcaatctgcctggcatgaacagacccctggccagcaccgtgaacgacaagctggagctgcaggagtgcctggagcacggccggatcgccaagttcagcaaggtgagaaccatcaccacccgaagcaacagcatcaaacaaggcaaggaccagcactttcctgtgttcatgaacgagaaggaggacatcctgtggtgtaccgagatggagagagtgttcgggttcccagtccactacacagatgtcagcaacatgtctagactggccagacagagactgctgggaagaagctggtccgtccctgtgatcagacacctgttcgcccctctgaaggagtacttcgcctgcgtgagcagcggcaacagcaacgccaacagccggggccccagcttctctagcggcctggtgccactgtccctgagagggagccacatgggccccatggagatctacaaaaccgtgagcgcctggaagcggcagcctgtgcgcgtgctgagcctgtttcggaatatcgataaagtcctgaaaagcctgggattcctggagagcggctctggctccggcggtggcaccctgaagtacgtggaggatgtgacaaacgtggtcagacgggatgtggagaagtggggccccttcgatctggtgtacggcagcacccaacccctgggcagctcttgtgaccggtgccctggctggtacatgtttcagttccaccggatcctgcagtacgccctgccgagacaggagtcccagcggccattcttttggattttcatggacaacttgctgctgaccgaggatgaccaggaaactaccactcggttcctgcagaccgaagccgtgaccctgcaggacgtgagaggccgggactaccagaacgccatgcgggtgtggtccaacatccctggactgaaaagcaagcacgcacctctgacccctaaagaagaggagtacctgcaggcccaggtgcggagcagaagcaagctggacgcccctaaggtggatctgctggtgaagaattgcctcctgcccctgagagagtacttcaagtatttcagccagaatagtctgcccctgggaggcagcggcggcggcgccctggtgacatttgaggacgtcgccgtgcggttcacccaggaggaatgggctctgctggatccttctcagaaaatcctgtaccgggacgtgatgagagagacataccggaatctgacctccgtgggcatcaactgggaatgttgggaccttgaagcctgcttcagaagcctgggaagaaacctgagagtgcaggtggtgaagagaaagtgcgagctgaccaacagcggcccctgcgccgagggcggcccaagcagcggcgcccctcctcccagcggcggcagcccagccggctccccaacctctaccgaggagggcacctctgagtccgccacccccgagagcggccctggcacctccaccgagcccagcgagggcagcgcacccggcagccctgccggcagccccacctccacagaggagggaaccagcaccgagcccagcgaaggcagcgccccaggcaccagcaccgagcctagtgagcaggagattaaacggatcaacaagatcagaagaagacttgtgaaagacagcaacaccaagaaggccggcaagacaggccccatgaaaaccctgctggttagagtgatgacacccgatctgagagagcggctggaaaacctgagaaagaagcctgaaaatatcccccagcccatcagcaatacatctagagccaacctgaataagctgctgaccgattacaccgaaatgaagaaggcgatcctgcatgtgtactgggaagagttccagaaggaccctgtgggcctgatgagccgggtggcccagcctgccagcaagaagatcgatcagaacaagctgaaacctgagatggacgagaagggcaacctgaccaccgccggctttgcctgctctcagtgtggccagcccctgttcgtgtacaagctggagcaggtgtctgagaagggcaaggcttacaccaactacttcggacggtgcaatgtggccgagcacgaaaagctgatcctgctggcccagctgaagcccgagaaggatagcgacgaagccgtgacatatagcctgggaaagtttgggcagagggccctggatttctacagcattcatgtgaccaaggagtccacccaccccgtgaagcccctggcccagatcgccggaaacagatacgcctccggacctgtgggaaaggccctgagcgacgcatgtatgggcacaatcgcctccttcctgtctaagtaccaggacatcatcatcgaacaccagaaggtggtgaagggcaaccagaagagactggagagcctgcgggagctggccggcaaggaaaacctggaataccctagcgtgaccctgccacctcagcctcacaccaaggagggcgttgatgcctacaacgaagtgatcgcccgggtgcgaatgtgggtgaacctgaacctgtggcagaagctgaagctaagcagagatgatgccaagcctctgctgagactgaagggattcccttcctttcctctggtcgagagacaggccaacgaagtggactggtgggacatggtgtgtaacgtgaagaagctgatcaacgagaaaaaggaggatggcaaggtgttttggcagaatctggctggctacaagagacaggaagccctgagaccatacctgagcagcgaggaagatcggaagaagggaaagaaattcgctcggtaccagctgggcgacctgctgctgcacctggaaaagaagcacggcgaggactggggaaaggtgtacgacgaggcctgggagcggattgacaagaaagtggaaggcctgagcaagcacatcaagctggaagaggaacggagaagcgaggacgcccagagcaaggccgccctgaccgactggctgcgggctaaggccagcttcgtgatcgagggcctgaaggaggccgacaaggacgagttctgcagatgcgagctgaagctgcagaagtggtacggggacctgcggggaaagcccttcgccatcgaagccgagaacagcatcctggacatcagcggcttcagcaagcagtacaactgtgccttcatctggcagaaggacggcgtgaagaagctgaacctgtacctgatcatcaactacttcaagggcggcaagctgcggttcaagaagatcaaacctgaagccttcgaagccaacagattctacaccgtgatcaacaaaaagagcggcgagatcgtgcccatggaggtgaacttcaacttcgacgaccccaacctgatcatcctgcctctggcctttggcaagagacagggcagagaattcatctggaacgacctgctgtccctggaaaccggcagcctgaagctggccaacggaagagtgatcgagaagacactgtacaacagaagaacccggcaggatgagcctgccctgttcgtggccctgaccttcgagcggcgggaggtcctggactcctccaatatcaaaccaatgaacctgatcggcgtggcaagaggcgaaaacatccccgccgtgatcgccctgaccgaccccgagggctgcccactgagccggtttaaggatagcctgggaaacccaacccacatcctgagaatcggcgagagctataaggagaagcagcggaccatccaggccaagaaggaggtggagcagcggagagccggcggctacagccggaagtacgccagcaaagccaagaatctggcagacgatatggtgagaaacaccgctagagatctgctgtactacgccgtgacccaggatgccatgctgatcttcgccaacctgagccggggcttcggccggcagggcaagcggaccttcatggccgagagacagtacacacggatggaggactggctgaccgccaagctggcctacgagggcctgagcaagacctacctgtccaagacactggcccagtacacctccaagacatgcagcaactgtgggtttaccatcaccagcgccgactacgacagggtgctggagaagctgaagaagacagcaacaggctggatgaccacaattaacggcaaggagctgaaggtggagggccagattacctactacaacagatacaagagacagaacgtagtcaaggacctgtccgtcgagctggatagactgagcgaagaatctgtgaacaacgacatctcctcctggacaaagggcagaagcggagaagctctgagcctcctgaagaaaagattctcccatagacccgtgcaggagaagttcgtgtgcctgaactgcggcttcgagacacacgcagccgagcaagccgccctgaacatcgccagatcctggctgttcctgcggagccaggagtacaagaaataccagacaaacaagacaaccggcaacaccgataagagagccttcgtcgagacctggcagtccttttaccggaagaagcttaaggaggtgtggaaacctgccgtgcggtctggcggatctggcggaggctccgcccaggtgctggtgaccttccaggacgtggccgtggacttcacccaggaggagtggaggctgctggaccccggccagaaggagctgtacaaggaggtgatgctggagaacgtgcagaacgtgctgagcctgggcctgcccgtgcccagggaggactggatcagccacttcgaccagggcagggccccctggatgctggagggcgagggccccagcaacagctgcctgggcagggagaggaggggcggcccaagcagcggcgcccctcctcccagcggcggcagcccagccggctccccaacctctaccgaggagggcacctctgagtccgccacccccgagagcggccctggcacctccaccgagcccagcgagggcagcgcacccggcagccctgccggcagccccacctccacagaggagggaaccagcaccgagcccagcgaaggcagcgccccaggcaccagcaccgagcctagtgagcaggagattaaacggatcaacaagatcagaagaagacttgtgaaagacagcaacaccaagaaggccggcaagacaggccccatgaaaaccctgctggttagagtgatgacacccgatctgagagagcggctggaaaacctgagaaagaagcctgaaaatatcccccagcccatcagcaatacatctagagccaacctgaataagctgctgaccgattacaccgaaatgaagaaggcgatcctgcatgtgtactgggaagagttccagaaggaccctgtgggcctgatgagccgggtggcccagcctgccagcaagaagatcgatcagaacaagctgaaacctgagatggacgagaagggcaacctgaccaccgccggctttgcctgctctcagtgtggccagcccctgttcgtgtacaagctggagcaggtgtctgagaagggcaaggcttacaccaactacttcggacggtgcaatgtggccgagcacgaaaagctgatcctgctggcccagctgaagcccgagaaggatagcgacgaagccgtgacatatagcctgggaaagtttgggcagagggccctggatttctacagcattcatgtgaccaaggagtccacccaccccgtgaagcccctggcccagatcgccggaaacagatacgcctccggacctgtgggaaaggccctgagcgacgcatgtatgggcacaatcgcctccttcctgtctaagtaccaggacatcatcatcgaacaccagaaggtggtgaagggcaaccagaagagactggagagcctgcgggagctggccggcaaggaaaacctggaataccctagcgtgaccctgccacctcagcctcacaccaaggagggcgttgatgcctacaacgaagtgatcgcccgggtgcgaatgtgggtgaacctgaacctgtggcagaagctgaagctaagcagagatgatgccaagcctctgctgagactgaagggattcccttcctttcctctggtcgagagacaggccaacgaagtggactggtgggacatggtgtgtaacgtgaagaagctgatcaacgagaaaaaggaggatggcaaggtgttttggcagaatctggctggctacaagagacaggaagccctgagaccatacctgagcagcgaggaagatcggaagaagggaaagaaattcgctcggtaccagctgggcgacctgctgctgcacctggaaaagaagcacggcgaggactggggaaaggtgtacgacgaggcctgggagcggattgacaagaaagtggaaggcctgagcaagcacatcaagctggaagaggaacggagaagcgaggacgcccagagcaaggccgccctgaccgactggctgcgggctaaggccagcttcgtgatcgagggcctgaaggaggccgacaaggacgagttctgcagatgcgagctgaagctgcagaagtggtacggggacctgcggggaaagcccttcgccatcgaagccgagaacagcatcctggacatcagcggcttcagcaagcagtacaactgtgccttcatctggcagaaggacggcgtgaagaagctgaacctgtacctgatcatcaactacttcaagggcggcaagctgcggttcaagaagatcaaacctgaagccttcgaagccaacagattctacaccgtgatcaacaaaaagagcggcgagatcgtgcccatggaggtgaacttcaacttcgacgaccccaacctgatcatcctgcctctggcctttggcaagagacagggcagagaattcatctggaacgacctgctgtccctggaaaccggcagcctgaagctggccaacggaagagtgatcgagaagacactgtacaacagaagaacccggcaggatgagcctgccctgttcgtggccctgaccttcgagcggcgggaggtcctggactcctccaatatcaaaccaatgaacctgatcggcgtggcaagaggcgaaaacatccccgccgtgatcgccctgaccgaccccgagggctgcccactgagccggtttaaggatagcctgggaaacccaacccacatcctgagaatcggcgagagctataaggagaagcagcggaccatccaggccaagaaggaggtggagcagcggagagccggcggctacagccggaagtacgccagcaaagccaagaatctggcagacgatatggtgagaaacaccgctagagatctgctgtactacgccgtgacccaggatgccatgctgatcttcgccaacctgagccggggcttcggccggcagggcaagcggaccttcatggccgagagacagtacacacggatggaggactggctgaccgccaagctggcctacgagggcctgagcaagacctacctgtccaagacactggcccagtacacctccaagacatgcagcaactgtgggtttaccatcaccagcgccgactacgacagggtgctggagaagctgaagaagacagcaacaggctggatgaccacaattaacggcaaggagctgaaggtggagggccagattacctactacaacagatacaagagacagaacgtagtcaaggacctgtccgtcgagctggatagactgagcgaagaatctgtgaacaacgacatctcctcctggacaaagggcagaagcggagaagctctgagcctcctgaagaaaagattctcccatagacccgtgcaggagaagttcgtgtgcctgaactgcggcttcgagacacacgcagccgagcaagccgccctgaacatcgccagatcctggctgttcctgcggagccaggagtacaagaaataccagacaaacaagacaaccggcaacaccgataagagagccttcgtcgagacctggcagtccttttaccggaagaagcttaaggaggtgtggaaacctgccgtgcggtctggcggatctggcggaggctcctgcccaggtgctggtgaccttccaggacgtggccgtggacttcacccaggaggagtggaggctgctggaccccggccagaaggagctgtacaaggaggtgatgctggagaacgtgcagaacgtgctgagcctgggcctgcccgtgcccagggaggactggatcagccacttcgaccagggcagggccccctggatgctggagggcgagggccccagcaacagctgcctgggcagggagaggaggggatctggctccggcagcggccccaagaaaaagagaaaagtctaagctgccttctgcggggcttgccttctggccatgcccttcttctctcccttgcacctgtacctcttggtctttgaataaagcctgagtaggaaggctagcaaaaaaaaaaaaaaaaaaaaaaaaaaaaaaaaaaaaaaaaaaaaaaaaaaaaaaaaaaaaaaaaaaaaaaaaaaaaaaaa

SEQ ID NO: 15533 - RNA, 9485 nt, synthetic construct
  source 1..9485: mol_type = other RNA
aggaaataagagagaaaagaagagtaagaagaaatataagagccaccatggcccctaagaagaagcgtaaagtgagccggatggaacgcctcgtctacgaggtgcggcagaagtgcagaaacatcgaggacatctgcatctcctgcggatctctgaacgtgaccctggagcacccactgttcatcggcggcatgtgccagaactgtaaaaactgttttctggagtgtgcctatcaatacgacgatgacggctaccagagctactgcaccatctgttgcggcggaagagaggtgctgatgtgtggaaataacaactgctgccggtgcttctgcgtggaatgcgtggacctgctggtgggccccggcgccgcccaggccgctattaaggaagatccttggaactgctacatgtgcggccacaagggcacatacggcctgctgagacggagagaggactggcctagcagactgcagatgttcttcgccaataaccacgaccaggagttcgacccccctaaggtgtaccctcccgtccccgccgagaagagaaagcccatccgggtcctgagcctgttcgatggcatcgccaccggtctgctggtgctgaaggacctgggcatccaggtggataggtacattgcctccgaggtgtgcgaggactccatcaccgtgggaatggtgcgtcatcagggcaagatcatgtacgtgggcgacgtgcggagcgtgacacagaagcatatccaggagtggggccctttcgacctggtgatcggcggcagcccttgcaatgacctgagcatcgtgaacccagcccggaagggcctgtacgagggaaccggcagactgttcttcgagttttacagactgctgcacgacgcccggcctaaggaaggcgacgaccggcccttcttttggctgttcgagaatgtggtggccatgggagtcagcgacaagcgggatattagccggttcctggagagcaaccccgtgatgatcgatgccaaggaagtgagcgccgcccaccgggccagatacttctggggcaatctgcctggcatgaacagacccctggccagcaccgtgaacgacaagctggagctgcaggagtgcctggagcacggccggatcgccaagttcagcaaggtgagaaccatcaccacccgaagcaacagcatcaaacaaggcaaggaccagcactttcctgtgttcatgaacgagaaggaggacatcctgtggtgtaccgagatggagagagtgttcgggttcccagtccactacacagatgtcagcaacatgtctagactggccagacagagactgctgggaagaagctggtccgtccctgtgatcagacacctgttcgcccctctgaaggagtacttcgcctgcgtgagcagcggcaacagcaacgccaacagccggggccccagcttctctagcggcctggtgccactgtccctgagagggagccacatgggccccatggagatctacaaaaccgtgagcgcctggaagcggcagcctgtgcgcgtgctgagcctgtttcggaatatcgataaagtcctgaaaagcctgggattcctggagagcggctctggctccggcggtggcaccctgaagtacgtggaggatgtgacaaacgtggtcagacgggatgtggagaagtggggccccttcgatctggtgtacggcagcacccaacccctgggcagctcttgtgaccggtgccctggctggtacatgtttcagttccaccggatcctgcagtacgccctgccgagacaggagtcccagcggccattcttttggattttcatggacaacttgctgctgaccgaggatgaccaggaaactaccactcggttcctgcagaccgaagccgtgaccctgcaggacgtgagaggccgggactaccagaacgccatgcgggtgtggtccaacatccctggactgaaaagcaagcacgcacctctgacccctaaagaagaggagtacctgcaggcccaggtgcggagcagaagcaagctggacgcccctaaggtggatctgctggtgaagaattgcctcctgcccctgagagagtacttcaagtatttcagccagaatagtctgcccctgggaggcagcggcggcggcgccctggtgacatttgaggacgtcgccgtgcggttcacccaggaggaatgggctctgctggatccttctcagaaaatcctgtaccgggacgtgatgagagagacataccggaatctgacctccgtgggcatcaactgggaatgttgggaccttgaagcctgcttcagaagcctgggaagaaacctgagagtgcaggtggtgaagagaaagtgcgagctgaccaacagcggcccctgcgccgagggcggcccaagcagcggcgcccctcctcccagcggcggcagcccagccggctccccaacctctaccgaggagggcacctctgagtccgccacccccgagagcggccctggcacctccaccgagcccagcgagggcagcgcacccggcagccctgccggcagccccacctccacagaggagggaaccagcaccgagcccagcgaaggcagcgccccaggcaccagcaccgagcctagtgagcaggagattaaacggatcaacaagatcagaagaagacttgtgaaagacagcaacaccaagaaggccggcaagacaggccccatgaaaaccctgctggttagagtgatgacacccgatctgagagagcggctggaaaacctgagaaagaagcctgaaaatatcccccagcccatcagcaatacatctagagccaacctgaataagctgctgaccgattacaccgaaatgaagaaggcgatcctgcatgtgtactgggaagagttccagaaggaccctgtgggcctgatgagccgggtggcccagcctgccagcaagaagatcgatcagaacaagctgaaacctgagatggacgagaagggcaacctgaccaccgccggctttgcctgctctcagtgtggccagcccctgttcgtgtacaagctggagcaggtgtctgagaagggcaaggcttacaccaactacttcggacggtgcaatgtggccgagcacgaaaagctgatcctgctggcccagctgaagcccgagaaggatagcgacgaagccgtgacatatagcctgggaaagtttgggcagagggccctggatttctacagcattcatgtgaccaaggagtccacccaccccgtgaagcccctggcccagatcgccggaaacagatacgcctccggacctgtgggaaaggccctgagcgacgcatgtatgggcacaatcgcctccttcctgtctaagtaccaggacatcatcatcgaacaccagaaggtggtgaagggcaaccagaagagactggagagcctgcgggagctggccggcaaggaaaacctggaataccctagcgtgaccctgccacctcagcctcacaccaaggagggcgttgatgcctacaacgaagtgatcgcccgggtgcgaatgtgggtgaacctgaacctgtggcagaagctgaagctaagcagagatgatgccaagcctctgctgagactgaagggattcccttcctttcctctggtcgagagacaggccaacgaagtggactggtgggacatggtgtgtaacgtgaagaagctgatcaacgagaaaaaggaggatggcaaggtgttttggcagaatctggctggctacaagagacaggaagccctgagaccatacctgagcagcgaggaagatcggaagaagggaaagaaattcgctcggtaccagctgggcgacctgctgctgcacctggaaaagaagcacggcgaggactggggaaaggtgtacgacgaggcctgggagcggattgacaagaaagtggaaggcctgagcaagcacatcaagctggaagaggaacggagaagcgaggacgcccagagcaaggccgccctgaccgactggctgcgggctaaggccagcttcgtgatcgagggcctgaaggaggccgacaaggacgagttctgcagatgcgagctgaagctgcagaagtggtacggggacctgcggggaaagcccttcgccatcgaagccgagaacagcatcctggacatcagcggcttcagcaagcagtacaactgtgccttcatctggcagaaggacggcgtgaagaagctgaacctgtacctgatcatcaactacttcaagggcggcaagctgcggttcaagaagatcaaacctgaagccttcgaagccaacagattctacaccgtgatcaacaaaaagagcggcgagatcgtgcccatggaggtgaacttcaacttcgacgaccccaacctgatcatcctgcctctggcctttggcaagagacagggcagagaattcatctggaacgacctgctgtccctggaaaccggcagcctgaagctggccaacggaagagtgatcgagaagacactgtacaacagaagaacccggcaggatgagcctgccctgttcgtggccctgaccttcgagcggcgggaggtcctggactcctccaatatcaaaccaatgaacctgatcggcgtggcaagaggcgaaaacatccccgccgtgatcgccctgaccgaccccgagggctgcccactgagccggtttaaggatagcctgggaaacccaacccacatcctgagaatcggcgagagctataaggagaagcagcggaccatccaggccaagaaggaggtggagcagcggagagccggcggctacagccggaagtacgccagcaaagccaagaatctggcagacgatatggtgagaaacaccgctagagatctgctgtactacgccgtgacccaggatgccatgctgatcttcgccaacctgagccggggcttcggccggcagggcaagcggaccttcatggccgagagacagtacacacggatggaggactggctgaccgccaagctggcctacgagggcctgagcaagacctacctgtccaagacactggcccagtacacctccaagacatgcagcaactgtgggtttaccatcaccagcgccgactacgacagggtgctggagaagctgaagaagacagcaacaggctggatgaccacaattaacggcaaggagctgaaggtggagggccagattacctactacaacagatacaagagacagaacgtagtcaaggacctgtccgtcgagctggatagactgagcgaagaatctgtgaacaacgacatctcctcctggacaaagggcagaagcggagaagctctgagcctcctgaagaaaagattctcccatagacccgtgcaggagaagttcgtgtgcctgaactgcggcttcgagacacacgcagccgagcaagccgccctgaacatcgccagatcctggctgttcctgcggagccaggagtacaagaaataccagacaaacaagacaaccggcaacaccgataagagagccttcgtcgagacctggcagtccttttaccggaagaagcttaaggaggtgtggaaacctgccgtgcggtctggcggatctggcggaggctccaggagggagcccgtgaccttcgaggacgtggccgtgtacttcagcgagaacgagtggagcagcctggcccccgcccagagggccctgtacagggacgtgatgctggagaactacggcgccgtggccagcctggccttcagcttccccaagcccgccctgatcagccagctggagaggggcgaggccccctggagcctggccccccagggcgccctggacggcgagggcagcaggggcatcagcggcggcccaagcagcggcgcccctcctcccagcggcggcagcccagccggctccccaacctctaccgaggagggcacctctgagtccgccacccccgagagcggccctggcacctccaccgagcccagcgagggcagcgcacccggcagccctgccggcagccccacctccacagaggagggaaccagcaccgagcccagcgaaggcagcgccccaggcaccagcaccgagcctagtgagcaggagattaaacggatcaacaagatcagaagaagacttgtgaaagacagcaacaccaagaaggccggcaagacaggccccatgaaaaccctgctggttagagtgatgacacccgatctgagagagcggctggaaaacctgagaaagaagcctgaaaatatcccccagcccatcagcaatacatctagagccaacctgaataagctgctgaccgattacaccgaaatgaagaaggcgatcctgcatgtgtactgggaagagttccagaaggaccctgtgggcctgatgagccgggtggcccagcctgccagcaagaagatcgatcagaacaagctgaaacctgagatggacgagaagggcaacctgaccaccgccggctttgcctgctctcagtgtggccagcccctgttcgtgtacaagctggagcaggtgtctgagaagggcaaggcttacaccaactacttcggacggtgcaatgtggccgagcacgaaaagctgatcctgctggcccagctgaagcccgagaaggatagcgacgaagccgtgacatatagcctgggaaagtttgggcagagggccctggatttctacagcattcatgtgaccaaggagtccacccaccccgtgaagcccctggcccagatcgccggaaacagatacgcctccggacctgtgggaaaggccctgagcgacgcatgtatgggcacaatcgcctccttcctgtctaagtaccaggacatcatcatcgaacaccagaaggtggtgaagggcaaccagaagagactggagagcctgcgggagctggccggcaaggaaaacctggaataccctagcgtgaccctgccacctcagcctcacaccaaggagggcgttgatgcctacaacgaagtgatcgcccgggtgcgaatgtgggtgaacctgaacctgtggcagaagctgaagctaagcagagatgatgccaagcctctgctgagactgaagggattcccttcctttcctctggtcgagagacaggccaacgaagtggactggtgggacatggtgtgtaacgtgaagaagctgatcaacgagaaaaaggaggatggcaaggtgttttggcagaatctggctggctacaagagacaggaagccctgagaccatacctgagcagcgaggaagatcggaagaagggaaagaaattcgctcggtaccagctgggcgacctgctgctgcacctggaaaagaagcacggcgaggactggggaaaggtgtacgacgaggcctgggagcggattgacaagaaagtggaaggcctgagcaagcacatcaagctggaagaggaacggagaagcgaggacgcccagagcaaggccgccctgaccgactggctgcgggctaaggccagcttcgtgatcgagggcctgaaggaggccgacaaggacgagttctgcagatgcgagctgaagctgcagaagtggtacggggacctgcggggaaagcccttcgccatcgaagccgagaacagcatcctggacatcagcggcttcagcaagcagtacaactgtgccttcatctggcagaaggacggcgtgaagaagctgaacctgtacctgatcatcaactacttcaagggcggcaagctgcggttcaagaagatcaaacctgaagccttcgaagccaacagattctacaccgtgatcaacaaaaagagcggcgagatcgtgcccatggaggtgaacttcaacttcgacgaccccaacctgatcatcctgcctctggcctttggcaagagacagggcagagaattcatctggaacgacctgctgtccctggaaaccggcagcctgaagctggccaacggaagagtgatcgagaagacactgtacaacagaagaacccggcaggatgagcctgccctgttcgtggccctgaccttcgagcggcgggaggtcctggactcctccaatatcaaaccaatgaacctgatcggcgtggcaagaggcgaaaacatccccgccgtgatcgccctgaccgaccccgagggctgcccactgagccggtttaaggatagcctgggaaacccaacccacatcctgagaatcggcgagagctataaggagaagcagcggaccatccaggccaagaaggaggtggagcagcggagagccggcggctacagccggaagtacgccagcaaagccaagaatctggcagacgatatggtgagaaacaccgctagagatctgctgtactacgccgtgacccaggatgccatgctgatcttcgccaacctgagccggggcttcggccggcagggcaagcggaccttcatggccgagagacagtacacacggatggaggactggctgaccgccaagctggcctacgagggcctgagcaagacctacctgtccaagacactggcccagtacacctccaagacatgcagcaactgtgggtttaccatcaccagcgccgactacgacagggtgctggagaagctgaagaagacagcaacaggctggatgaccacaattaacggcaaggagctgaaggtggagggccagattacctactacaacagatacaagagacagaacgtagtcaaggacctgtccgtcgagctggatagactgagcgaagaatctgtgaacaacgacatctcctcctggacaaagggcagaagcggagaagctctgagcctcctgaagaaaagattctcccatagacccgtgcaggagaagttcgtgtgcctgaactgcggcttcgagacacacgcagccgagcaagccgccctgaacatcgccagatcctggctgttcctgcggagccaggagtacaagaaataccagacaaacaagacaaccggcaacaccgataagagagccttcgtcgagacctggcagtccttttaccggaagaagcttaaggaggtgtggaaacctgccgtgcggtctggcggatctggcggaggctcctaggagggagcccgtgaccttcgaggacgtggccgtgtacttcagcgagaacgagtggagcagcctggcccccgcccagagggccctgtacagggacgtgatgctggagaactacggcgccgtggccagcctggccttcagcttccccaagcccgccctgatcagccagctggagaggggcgaggccccctggagcctggccccccagggcgccctggacggcgagggcagcaggggcatcagcggatctggctccggcagcggccccaagaaaaagagaaaagtctaagctgccttctgcggggcttgccttctggccatgcccttcttctctcccttgcacctgtacctcttggtctttgaataaagcctgagtaggaaggctagcaaaaaaaaaaaaaaaaaaaaaaaaaaaaaaaaaaaaaaaaaaaaaaaaaaaaaaaaaaaaaaaaaaaaaaaaaaaaaaaa

SEQ ID NO: 15534 - RNA, 9485 nt, synthetic construct
  source 1..9485: mol_type = other RNA
aggaaataagagagaaaagaagagtaagaagaaatataagagccaccatggcccctaagaagaagcgtaaagtgagccggatggaacgcctcgtctacgaggtgcggcagaagtgcagaaacatcgaggacatctgcatctcctgcggatctctgaacgtgaccctggagcacccactgttcatcggcggcatgtgccagaactgtaaaaactgttttctggagtgtgcctatcaatacgacgatgacggctaccagagctactgcaccatctgttgcggcggaagagaggtgctgatgtgtggaaataacaactgctgccggtgcttctgcgtggaatgcgtggacctgctggtgggccccggcgccgcccaggccgctattaaggaagatccttggaactgctacatgtgcggccacaagggcacatacggcctgctgagacggagagaggactggcctagcagactgcagatgttcttcgccaataaccacgaccaggagttcgacccccctaaggtgtaccctcccgtccccgccgagaagagaaagcccatccgggtcctgagcctgttcgatggcatcgccaccggtctgctggtgctgaaggacctgggcatccaggtggataggtacattgcctccgaggtgtgcgaggactccatcaccgtgggaatggtgcgtcatcagggcaagatcatgtacgtgggcgacgtgcggagcgtgacacagaagcatatccaggagtggggccctttcgacctggtgatcggcggcagcccttgcaatgacctgagcatcgtgaacccagcccggaagggcctgtacgagggaaccggcagactgttcttcgagttttacagactgctgcacgacgcccggcctaaggaaggcgacgaccggcccttcttttggctgttcgagaatgtggtggccatgggagtcagcgacaagcgggatattagccggttcctggagagcaaccccgtgatgatcgatgccaaggaagtgagcgccgcccaccgggccagatacttctggggcaatctgcctggcatgaacagacccctggccagcaccgtgaacgacaagctggagctgcaggagtgcctggagcacggccggatcgccaagttcagcaaggtgagaaccatcaccacccgaagcaacagcatcaaacaaggcaaggaccagcactttcctgtgttcatgaacgagaaggaggacatcctgtggtgtaccgagatggagagagtgttcgggttcccagtccactacacagatgtcagcaacatgtctagactggccagacagagactgctgggaagaagctggtccgtccctgtgatcagacacctgttcgcccctctgaaggagtacttcgcctgcgtgagcagcggcaacagcaacgccaacagccggggccccagcttctctagcggcctggtgccactgtccctgagagggagccacatgggccccatggagatctacaaaaccgtgagcgcctggaagcggcagcctgtgcgcgtgctgagcctgtttcggaatatcgataaagtcctgaaaagcctgggattcctggagagcggctctggctccggcggtggcaccctgaagtacgtggaggatgtgacaaacgtggtcagacgggatgtggagaagtggggccccttcgatctggtgtacggcagcacccaacccctgggcagctcttgtgaccggtgccctggctggtacatgtttcagttccaccggatcctgcagtacgccctgccgagacaggagtcccagcggccattcttttggattttcatggacaacttgctgctgaccgaggatgaccaggaaactaccactcggttcctgcagaccgaagccgtgaccctgcaggacgtgagaggccgggactaccagaacgccatgcgggtgtggtccaacatccctggactgaaaagcaagcacgcacctctgacccctaaagaagaggagtacctgcaggcccaggtgcggagcagaagcaagctggacgcccctaaggtggatctgctggtgaagaattgcctcctgcccctgagagagtacttcaagtatttcagccagaatagtctgcccctgggaggcagcggcggcggcgccctggtgacatttgaggacgtcgccgtgcggttcacccaggaggaatgggctctgctggatccttctcagaaaatcctgtaccgggacgtgatgagagagacataccggaatctgacctccgtgggcatcaactgggaatgttgggaccttgaagcctgcttcagaagcctgggaagaaacctgagagtgcaggtggtgaagagaaagtgcgagctgaccaacagcggcccctgcgccgagggcggcccaagcagcggcgcccctcctcccagcggcggcagcccagccggctccccaacctctaccgaggagggcacctctgagtccgccacccccgagagcggccctggcacctccaccgagcccagcgagggcagcgcacccggcagccctgccggcagccccacctccacagaggagggaaccagcaccgagcccagcgaaggcagcgccccaggcaccagcaccgagcctagtgagcaggagattaaacggatcaacaagatcagaagaagacttgtgaaagacagcaacaccaagaaggccggcaagacaggccccatgaaaaccctgctggttagagtgatgacacccgatctgagagagcggctggaaaacctgagaaagaagcctgaaaatatcccccagcccatcagcaatacatctagagccaacctgaataagctgctgaccgattacaccgaaatgaagaaggcgatcctgcatgtgtactgggaagagttccagaaggaccctgtgggcctgatgagccgggtggcccagcctgccagcaagaagatcgatcagaacaagctgaaacctgagatggacgagaagggcaacctgaccaccgccggctttgcctgctctcagtgtggccagcccctgttcgtgtacaagctggagcaggtgtctgagaagggcaaggcttacaccaactacttcggacggtgcaatgtggccgagcacgaaaagctgatcctgctggcccagctgaagcccgagaaggatagcgacgaagccgtgacatatagcctgggaaagtttgggcagagggccctggatttctacagcattcatgtgaccaaggagtccacccaccccgtgaagcccctggcccagatcgccggaaacagatacgcctccggacctgtgggaaaggccctgagcgacgcatgtatgggcacaatcgcctccttcctgtctaagtaccaggacatcatcatcgaacaccagaaggtggtgaagggcaaccagaagagactggagagcctgcgggagctggccggcaaggaaaacctggaataccctagcgtgaccctgccacctcagcctcacaccaaggagggcgttgatgcctacaacgaagtgatcgcccgggtgcgaatgtgggtgaacctgaacctgtggcagaagctgaagctaagcagagatgatgccaagcctctgctgagactgaagggattcccttcctttcctctggtcgagagacaggccaacgaagtggactggtgggacatggtgtgtaacgtgaagaagctgatcaacgagaaaaaggaggatggcaaggtgttttggcagaatctggctggctacaagagacaggaagccctgagaccatacctgagcagcgaggaagatcggaagaagggaaagaaattcgctcggtaccagctgggcgacctgctgctgcacctggaaaagaagcacggcgaggactggggaaaggtgtacgacgaggcctgggagcggattgacaagaaagtggaaggcctgagcaagcacatcaagctggaagaggaacggagaagcgaggacgcccagagcaaggccgccctgaccgactggctgcgggctaaggccagcttcgtgatcgagggcctgaaggaggccgacaaggacgagttctgcagatgcgagctgaagctgcagaagtggtacggggacctgcggggaaagcccttcgccatcgaagccgagaacagcatcctggacatcagcggcttcagcaagcagtacaactgtgccttcatctggcagaaggacggcgtgaagaagctgaacctgtacctgatcatcaactacttcaagggcggcaagctgcggttcaagaagatcaaacctgaagccttcgaagccaacagattctacaccgtgatcaacaaaaagagcggcgagatcgtgcccatggaggtgaacttcaacttcgacgaccccaacctgatcatcctgcctctggcctttggcaagagacagggcagagaattcatctggaacgacctgctgtccctggaaaccggcagcctgaagctggccaacggaagagtgatcgagaagacactgtacaacagaagaacccggcaggatgagcctgccctgttcgtggccctgaccttcgagcggcgggaggtcctggactcctccaatatcaaaccaatgaacctgatcggcgtggcaagaggcgaaaacatccccgccgtgatcgccctgaccgaccccgagggctgcccactgagccggtttaaggatagcctgggaaacccaacccacatcctgagaatcggcgagagctataaggagaagcagcggaccatccaggccaagaaggaggtggagcagcggagagccggcggctacagccggaagtacgccagcaaagccaagaatctggcagacgatatggtgagaaacaccgctagagatctgctgtactacgccgtgacccaggatgccatgctgatcttcgccaacctgagccggggcttcggccggcagggcaagcggaccttcatggccgagagacagtacacacggatggaggactggctgaccgccaagctggcctacgagggcctgagcaagacctacctgtccaagacactggcccagtacacctccaagacatgcagcaactgtgggtttaccatcaccagcgccgactacgacagggtgctggagaagctgaagaagacagcaacaggctggatgaccacaattaacggcaaggagctgaaggtggagggccagattacctactacaacagatacaagagacagaacgtagtcaaggacctgtccgtcgagctggatagactgagcgaagaatctgtgaacaacgacatctcctcctggacaaagggcagaagcggagaagctctgagcctcctgaagaaaagattctcccatagacccgtgcaggagaagttcgtgtgcctgaactgcggcttcgagacacacgcagccgagcaagccgccctgaacatcgccagatcctggctgttcctgcggagccaggagtacaagaaataccagacaaacaagacaaccggcaacaccgataagagagccttcgtcgagacctggcagtccttttaccggaagaagcttaaggaggtgtggaaacctgccgtgcggtctggcggatctggcggaggctccatgggcgccgtgacctacgacgacgtgcacatcaacttcacccaggaggagtgggccctgctgaaccccagccagaagaggctgtacaaggacgtgatgcacgacacctacagcaacctgaccgccaccggctacagcctggaggaccactacatcgaggagcactgccagagcagcaggaggtgcaggaggcacctgcagaggcacaagaaggtgcacatcggcgagaagccctacgagagcggcggcccaagcagcggcgcccctcctcccagcggcggcagcccagccggctccccaacctctaccgaggagggcacctctgagtccgccacccccgagagcggccctggcacctccaccgagcccagcgagggcagcgcacccggcagccctgccggcagccccacctccacagaggagggaaccagcaccgagcccagcgaaggcagcgccccaggcaccagcaccgagcctagtgagcaggagattaaacggatcaacaagatcagaagaagacttgtgaaagacagcaacaccaagaaggccggcaagacaggccccatgaaaaccctgctggttagagtgatgacacccgatctgagagagcggctggaaaacctgagaaagaagcctgaaaatatcccccagcccatcagcaatacatctagagccaacctgaataagctgctgaccgattacaccgaaatgaagaaggcgatcctgcatgtgtactgggaagagttccagaaggaccctgtgggcctgatgagccgggtggcccagcctgccagcaagaagatcgatcagaacaagctgaaacctgagatggacgagaagggcaacctgaccaccgccggctttgcctgctctcagtgtggccagcccctgttcgtgtacaagctggagcaggtgtctgagaagggcaaggcttacaccaactacttcggacggtgcaatgtggccgagcacgaaaagctgatcctgctggcccagctgaagcccgagaaggatagcgacgaagccgtgacatatagcctgggaaagtttgggcagagggccctggatttctacagcattcatgtgaccaaggagtccacccaccccgtgaagcccctggcccagatcgccggaaacagatacgcctccggacctgtgggaaaggccctgagcgacgcatgtatgggcacaatcgcctccttcctgtctaagtaccaggacatcatcatcgaacaccagaaggtggtgaagggcaaccagaagagactggagagcctgcgggagctggccggcaaggaaaacctggaataccctagcgtgaccctgccacctcagcctcacaccaaggagggcgttgatgcctacaacgaagtgatcgcccgggtgcgaatgtgggtgaacctgaacctgtggcagaagctgaagctaagcagagatgatgccaagcctctgctgagactgaagggattcccttcctttcctctggtcgagagacaggccaacgaagtggactggtgggacatggtgtgtaacgtgaagaagctgatcaacgagaaaaaggaggatggcaaggtgttttggcagaatctggctggctacaagagacaggaagccctgagaccatacctgagcagcgaggaagatcggaagaagggaaagaaattcgctcggtaccagctgggcgacctgctgctgcacctggaaaagaagcacggcgaggactggggaaaggtgtacgacgaggcctgggagcggattgacaagaaagtggaaggcctgagcaagcacatcaagctggaagaggaacggagaagcgaggacgcccagagcaaggccgccctgaccgactggctgcgggctaaggccagcttcgtgatcgagggcctgaaggaggccgacaaggacgagttctgcagatgcgagctgaagctgcagaagtggtacggggacctgcggggaaagcccttcgccatcgaagccgagaacagcatcctggacatcagcggcttcagcaagcagtacaactgtgccttcatctggcagaaggacggcgtgaagaagctgaacctgtacctgatcatcaactacttcaagggcggcaagctgcggttcaagaagatcaaacctgaagccttcgaagccaacagattctacaccgtgatcaacaaaaagagcggcgagatcgtgcccatggaggtgaacttcaacttcgacgaccccaacctgatcatcctgcctctggcctttggcaagagacagggcagagaattcatctggaacgacctgctgtccctggaaaccggcagcctgaagctggccaacggaagagtgatcgagaagacactgtacaacagaagaacccggcaggatgagcctgccctgttcgtggccctgaccttcgagcggcgggaggtcctggactcctccaatatcaaaccaatgaacctgatcggcgtggcaagaggcgaaaacatccccgccgtgatcgccctgaccgaccccgagggctgcccactgagccggtttaaggatagcctgggaaacccaacccacatcctgagaatcggcgagagctataaggagaagcagcggaccatccaggccaagaaggaggtggagcagcggagagccggcggctacagccggaagtacgccagcaaagccaagaatctggcagacgatatggtgagaaacaccgctagagatctgctgtactacgccgtgacccaggatgccatgctgatcttcgccaacctgagccggggcttcggccggcagggcaagcggaccttcatggccgagagacagtacacacggatggaggactggctgaccgccaagctggcctacgagggcctgagcaagacctacctgtccaagacactggcccagtacacctccaagacatgcagcaactgtgggtttaccatcaccagcgccgactacgacagggtgctggagaagctgaagaagacagcaacaggctggatgaccacaattaacggcaaggagctgaaggtggagggccagattacctactacaacagatacaagagacagaacgtagtcaaggacctgtccgtcgagctggatagactgagcgaagaatctgtgaacaacgacatctcctcctggacaaagggcagaagcggagaagctctgagcctcctgaagaaaagattctcccatagacccgtgcaggagaagttcgtgtgcctgaactgcggcttcgagacacacgcagccgagcaagccgccctgaacatcgccagatcctggctgttcctgcggagccaggagtacaagaaataccagacaaacaagacaaccggcaacaccgataagagagccttcgtcgagacctggcagtccttttaccggaagaagcttaaggaggtgtggaaacctgccgtgcggtctggcggatctggcggaggctcctatgggcgccgtgacctacgacgacgtgcacatcaacttcacccaggaggagtgggccctgctgaaccccagccagaagaggctgtacaaggacgtgatgcacgacacctacagcaacctgaccgccaccggctacagcctggaggaccactacatcgaggagcactgccagagcagcaggaggtgcaggaggcacctgcagaggcacaagaaggtgcacatcggcgagaagccctacgagagcggatctggctccggcagcggccccaagaaaaagagaaaagtctaagctgccttctgcggggcttgccttctggccatgcccttcttctctcccttgcacctgtacctcttggtctttgaataaagcctgagtaggaaggctagcaaaaaaaaaaaaaaaaaaaaaaaaaaaaaaaaaaaaaaaaaaaaaaaaaaaaaaaaaaaaaaaaaaaaaaaaaaaaaaaa

SEQ ID NO: 15535 - RNA, 9485 nt, synthetic construct
  source 1..9485: mol_type = other RNA
aggaaataagagagaaaagaagagtaagaagaaatataagagccaccatggcccctaagaagaagcgtaaagtgagccggatggaacgcctcgtctacgaggtgcggcagaagtgcagaaacatcgaggacatctgcatctcctgcggatctctgaacgtgaccctggagcacccactgttcatcggcggcatgtgccagaactgtaaaaactgttttctggagtgtgcctatcaatacgacgatgacggctaccagagctactgcaccatctgttgcggcggaagagaggtgctgatgtgtggaaataacaactgctgccggtgcttctgcgtggaatgcgtggacctgctggtgggccccggcgccgcccaggccgctattaaggaagatccttggaactgctacatgtgcggccacaagggcacatacggcctgctgagacggagagaggactggcctagcagactgcagatgttcttcgccaataaccacgaccaggagttcgacccccctaaggtgtaccctcccgtccccgccgagaagagaaagcccatccgggtcctgagcctgttcgatggcatcgccaccggtctgctggtgctgaaggacctgggcatccaggtggataggtacattgcctccgaggtgtgcgaggactccatcaccgtgggaatggtgcgtcatcagggcaagatcatgtacgtgggcgacgtgcggagcgtgacacagaagcatatccaggagtggggccctttcgacctggtgatcggcggcagcccttgcaatgacctgagcatcgtgaacccagcccggaagggcctgtacgagggaaccggcagactgttcttcgagttttacagactgctgcacgacgcccggcctaaggaaggcgacgaccggcccttcttttggctgttcgagaatgtggtggccatgggagtcagcgacaagcgggatattagccggttcctggagagcaaccccgtgatgatcgatgccaaggaagtgagcgccgcccaccgggccagatacttctggggcaatctgcctggcatgaacagacccctggccagcaccgtgaacgacaagctggagctgcaggagtgcctggagcacggccggatcgccaagttcagcaaggtgagaaccatcaccacccgaagcaacagcatcaaacaaggcaaggaccagcactttcctgtgttcatgaacgagaaggaggacatcctgtggtgtaccgagatggagagagtgttcgggttcccagtccactacacagatgtcagcaacatgtctagactggccagacagagactgctgggaagaagctggtccgtccctgtgatcagacacctgttcgcccctctgaaggagtacttcgcctgcgtgagcagcggcaacagcaacgccaacagccggggccccagcttctctagcggcctggtgccactgtccctgagagggagccacatgggccccatggagatctacaaaaccgtgagcgcctggaagcggcagcctgtgcgcgtgctgagcctgtttcggaatatcgataaagtcctgaaaagcctgggattcctggagagcggctctggctccggcggtggcaccctgaagtacgtggaggatgtgacaaacgtggtcagacgggatgtggagaagtggggccccttcgatctggtgtacggcagcacccaacccctgggcagctcttgtgaccggtgccctggctggtacatgtttcagttccaccggatcctgcagtacgccctgccgagacaggagtcccagcggccattcttttggattttcatggacaacttgctgctgaccgaggatgaccaggaaactaccactcggttcctgcagaccgaagccgtgaccctgcaggacgtgagaggccgggactaccagaacgccatgcgggtgtggtccaacatccctggactgaaaagcaagcacgcacctctgacccctaaagaagaggagtacctgcaggcccaggtgcggagcagaagcaagctggacgcccctaaggtggatctgctggtgaagaattgcctcctgcccctgagagagtacttcaagtatttcagccagaatagtctgcccctgggaggcagcggcggcggcgccctggtgacatttgaggacgtcgccgtgcggttcacccaggaggaatgggctctgctggatccttctcagaaaatcctgtaccgggacgtgatgagagagacataccggaatctgacctccgtgggcatcaactgggaatgttgggaccttgaagcctgcttcagaagcctgggaagaaacctgagagtgcaggtggtgaagagaaagtgcgagctgaccaacagcggcccctgcgccgagggcggcccaagcagcggcgcccctcctcccagcggcggcagcccagccggctccccaacctctaccgaggagggcacctctgagtccgccacccccgagagcggccctggcacctccaccgagcccagcgagggcagcgcacccggcagccctgccggcagccccacctccacagaggagggaaccagcaccgagcccagcgaaggcagcgccccaggcaccagcaccgagcctagtgagcaggagattaaacggatcaacaagatcagaagaagacttgtgaaagacagcaacaccaagaaggccggcaagacaggccccatgaaaaccctgctggttagagtgatgacacccgatctgagagagcggctggaaaacctgagaaagaagcctgaaaatatcccccagcccatcagcaatacatctagagccaacctgaataagctgctgaccgattacaccgaaatgaagaaggcgatcctgcatgtgtactgggaagagttccagaaggaccctgtgggcctgatgagccgggtggcccagcctgccagcaagaagatcgatcagaacaagctgaaacctgagatggacgagaagggcaacctgaccaccgccggctttgcctgctctcagtgtggccagcccctgttcgtgtacaagctggagcaggtgtctgagaagggcaaggcttacaccaactacttcggacggtgcaatgtggccgagcacgaaaagctgatcctgctggcccagctgaagcccgagaaggatagcgacgaagccgtgacatatagcctgggaaagtttgggcagagggccctggatttctacagcattcatgtgaccaaggagtccacccaccccgtgaagcccctggcccagatcgccggaaacagatacgcctccggacctgtgggaaaggccctgagcgacgcatgtatgggcacaatcgcctccttcctgtctaagtaccaggacatcatcatcgaacaccagaaggtggtgaagggcaaccagaagagactggagagcctgcgggagctggccggcaaggaaaacctggaataccctagcgtgaccctgccacctcagcctcacaccaaggagggcgttgatgcctacaacgaagtgatcgcccgggtgcgaatgtgggtgaacctgaacctgtggcagaagctgaagctaagcagagatgatgccaagcctctgctgagactgaagggattcccttcctttcctctggtcgagagacaggccaacgaagtggactggtgggacatggtgtgtaacgtgaagaagctgatcaacgagaaaaaggaggatggcaaggtgttttggcagaatctggctggctacaagagacaggaagccctgagaccatacctgagcagcgaggaagatcggaagaagggaaagaaattcgctcggtaccagctgggcgacctgctgctgcacctggaaaagaagcacggcgaggactggggaaaggtgtacgacgaggcctgggagcggattgacaagaaagtggaaggcctgagcaagcacatcaagctggaagaggaacggagaagcgaggacgcccagagcaaggccgccctgaccgactggctgcgggctaaggccagcttcgtgatcgagggcctgaaggaggccgacaaggacgagttctgcagatgcgagctgaagctgcagaagtggtacggggacctgcggggaaagcccttcgccatcgaagccgagaacagcatcctggacatcagcggcttcagcaagcagtacaactgtgccttcatctggcagaaggacggcgtgaagaagctgaacctgtacctgatcatcaactacttcaagggcggcaagctgcggttcaagaagatcaaacctgaagccttcgaagccaacagattctacaccgtgatcaacaaaaagagcggcgagatcgtgcccatggaggtgaacttcaacttcgacgaccccaacctgatcatcctgcctctggcctttggcaagagacagggcagagaattcatctggaacgacctgctgtccctggaaaccggcagcctgaagctggccaacggaagagtgatcgagaagacactgtacaacagaagaacccggcaggatgagcctgccctgttcgtggccctgaccttcgagcggcgggaggtcctggactcctccaatatcaaaccaatgaacctgatcggcgtggcaagaggcgaaaacatccccgccgtgatcgccctgaccgaccccgagggctgcccactgagccggtttaaggatagcctgggaaacccaacccacatcctgagaatcggcgagagctataaggagaagcagcggaccatccaggccaagaaggaggtggagcagcggagagccggcggctacagccggaagtacgccagcaaagccaagaatctggcagacgatatggtgagaaacaccgctagagatctgctgtactacgccgtgacccaggatgccatgctgatcttcgccaacctgagccggggcttcggccggcagggcaagcggaccttcatggccgagagacagtacacacggatggaggactggctgaccgccaagctggcctacgagggcctgagcaagacctacctgtccaagacactggcccagtacacctccaagacatgcagcaactgtgggtttaccatcaccagcgccgactacgacagggtgctggagaagctgaagaagacagcaacaggctggatgaccacaattaacggcaaggagctgaaggtggagggccagattacctactacaacagatacaagagacagaacgtagtcaaggacctgtccgtcgagctggatagactgagcgaagaatctgtgaacaacgacatctcctcctggacaaagggcagaagcggagaagctctgagcctcctgaagaaaagattctcccatagacccgtgcaggagaagttcgtgtgcctgaactgcggcttcgagacacacgcagccgagcaagccgccctgaacatcgccagatcctggctgttcctgcggagccaggagtacaagaaataccagacaaacaagacaaccggcaacaccgataagagagccttcgtcgagacctggcagtccttttaccggaagaagcttaaggaggtgtggaaacctgccgtgcggtctggcggatctggcggaggctccagccaggagcccgtgaccttcgaggacgtggccgtgtacttcacccagaaccagtgggccagcctggaccccatgcagagggccctgtacctggaggtgatgctggagaactacgccaacatcaccagcctggccctgcccttccccaagcccgacctgatcctgcagctggagcagggcggcgccccctggggcctggacccctggacccccctggagggcgaggccctgggcggcgtgcacggcggcccaagcagcggcgcccctcctcccagcggcggcagcccagccggctccccaacctctaccgaggagggcacctctgagtccgccacccccgagagcggccctggcacctccaccgagcccagcgagggcagcgcacccggcagccctgccggcagccccacctccacagaggagggaaccagcaccgagcccagcgaaggcagcgccccaggcaccagcaccgagcctagtgagcaggagattaaacggatcaacaagatcagaagaagacttgtgaaagacagcaacaccaagaaggccggcaagacaggccccatgaaaaccctgctggttagagtgatgacacccgatctgagagagcggctggaaaacctgagaaagaagcctgaaaatatcccccagcccatcagcaatacatctagagccaacctgaataagctgctgaccgattacaccgaaatgaagaaggcgatcctgcatgtgtactgggaagagttccagaaggaccctgtgggcctgatgagccgggtggcccagcctgccagcaagaagatcgatcagaacaagctgaaacctgagatggacgagaagggcaacctgaccaccgccggctttgcctgctctcagtgtggccagcccctgttcgtgtacaagctggagcaggtgtctgagaagggcaaggcttacaccaactacttcggacggtgcaatgtggccgagcacgaaaagctgatcctgctggcccagctgaagcccgagaaggatagcgacgaagccgtgacatatagcctgggaaagtttgggcagagggccctggatttctacagcattcatgtgaccaaggagtccacccaccccgtgaagcccctggcccagatcgccggaaacagatacgcctccggacctgtgggaaaggccctgagcgacgcatgtatgggcacaatcgcctccttcctgtctaagtaccaggacatcatcatcgaacaccagaaggtggtgaagggcaaccagaagagactggagagcctgcgggagctggccggcaaggaaaacctggaataccctagcgtgaccctgccacctcagcctcacaccaaggagggcgttgatgcctacaacgaagtgatcgcccgggtgcgaatgtgggtgaacctgaacctgtggcagaagctgaagctaagcagagatgatgccaagcctctgctgagactgaagggattcccttcctttcctctggtcgagagacaggccaacgaagtggactggtgggacatggtgtgtaacgtgaagaagctgatcaacgagaaaaaggaggatggcaaggtgttttggcagaatctggctggctacaagagacaggaagccctgagaccatacctgagcagcgaggaagatcggaagaagggaaagaaattcgctcggtaccagctgggcgacctgctgctgcacctggaaaagaagcacggcgaggactggggaaaggtgtacgacgaggcctgggagcggattgacaagaaagtggaaggcctgagcaagcacatcaagctggaagaggaacggagaagcgaggacgcccagagcaaggccgccctgaccgactggctgcgggctaaggccagcttcgtgatcgagggcctgaaggaggccgacaaggacgagttctgcagatgcgagctgaagctgcagaagtggtacggggacctgcggggaaagcccttcgccatcgaagccgagaacagcatcctggacatcagcggcttcagcaagcagtacaactgtgccttcatctggcagaaggacggcgtgaagaagctgaacctgtacctgatcatcaactacttcaagggcggcaagctgcggttcaagaagatcaaacctgaagccttcgaagccaacagattctacaccgtgatcaacaaaaagagcggcgagatcgtgcccatggaggtgaacttcaacttcgacgaccccaacctgatcatcctgcctctggcctttggcaagagacagggcagagaattcatctggaacgacctgctgtccctggaaaccggcagcctgaagctggccaacggaagagtgatcgagaagacactgtacaacagaagaacccggcaggatgagcctgccctgttcgtggccctgaccttcgagcggcgggaggtcctggactcctccaatatcaaaccaatgaacctgatcggcgtggcaagaggcgaaaacatccccgccgtgatcgccctgaccgaccccgagggctgcccactgagccggtttaaggatagcctgggaaacccaacccacatcctgagaatcggcgagagctataaggagaagcagcggaccatccaggccaagaaggaggtggagcagcggagagccggcggctacagccggaagtacgccagcaaagccaagaatctggcagacgatatggtgagaaacaccgctagagatctgctgtactacgccgtgacccaggatgccatgctgatcttcgccaacctgagccggggcttcggccggcagggcaagcggaccttcatggccgagagacagtacacacggatggaggactggctgaccgccaagctggcctacgagggcctgagcaagacctacctgtccaagacactggcccagtacacctccaagacatgcagcaactgtgggtttaccatcaccagcgccgactacgacagggtgctggagaagctgaagaagacagcaacaggctggatgaccacaattaacggcaaggagctgaaggtggagggccagattacctactacaacagatacaagagacagaacgtagtcaaggacctgtccgtcgagctggatagactgagcgaagaatctgtgaacaacgacatctcctcctggacaaagggcagaagcggagaagctctgagcctcctgaagaaaagattctcccatagacccgtgcaggagaagttcgtgtgcctgaactgcggcttcgagacacacgcagccgagcaagccgccctgaacatcgccagatcctggctgttcctgcggagccaggagtacaagaaataccagacaaacaagacaaccggcaacaccgataagagagccttcgtcgagacctggcagtccttttaccggaagaagcttaaggaggtgtggaaacctgccgtgcggtctggcggatctggcggaggctcctagccaggagcccgtgaccttcgaggacgtggccgtgtacttcacccagaaccagtgggccagcctggaccccatgcagagggccctgtacctggaggtgatgctggagaactacgccaacatcaccagcctggccctgcccttccccaagcccgacctgatcctgcagctggagcagggcggcgccccctggggcctggacccctggacccccctggagggcgaggccctgggcggcgtgcacggatctggctccggcagcggccccaagaaaaagagaaaagtctaagctgccttctgcggggcttgccttctggccatgcccttcttctctcccttgcacctgtacctcttggtctttgaataaagcctgagtaggaaggctagcaaaaaaaaaaaaaaaaaaaaaaaaaaaaaaaaaaaaaaaaaaaaaaaaaaaaaaaaaaaaaaaaaaaaaaaaaaaaaaaa

SEQ ID NO: 15536 - RNA, 9485 nt, synthetic construct
  source 1..9485: mol_type = other RNA
aggaaataagagagaaaagaagagtaagaagaaatataagagccaccatggcccctaagaagaagcgtaaagtgagccggatggaacgcctcgtctacgaggtgcggcagaagtgcagaaacatcgaggacatctgcatctcctgcggatctctgaacgtgaccctggagcacccactgttcatcggcggcatgtgccagaactgtaaaaactgttttctggagtgtgcctatcaatacgacgatgacggctaccagagctactgcaccatctgttgcggcggaagagaggtgctgatgtgtggaaataacaactgctgccggtgcttctgcgtggaatgcgtggacctgctggtgggccccggcgccgcccaggccgctattaaggaagatccttggaactgctacatgtgcggccacaagggcacatacggcctgctgagacggagagaggactggcctagcagactgcagatgttcttcgccaataaccacgaccaggagttcgacccccctaaggtgtaccctcccgtccccgccgagaagagaaagcccatccgggtcctgagcctgttcgatggcatcgccaccggtctgctggtgctgaaggacctgggcatccaggtggataggtacattgcctccgaggtgtgcgaggactccatcaccgtgggaatggtgcgtcatcagggcaagatcatgtacgtgggcgacgtgcggagcgtgacacagaagcatatccaggagtggggccctttcgacctggtgatcggcggcagcccttgcaatgacctgagcatcgtgaacccagcccggaagggcctgtacgagggaaccggcagactgttcttcgagttttacagactgctgcacgacgcccggcctaaggaaggcgacgaccggcccttcttttggctgttcgagaatgtggtggccatgggagtcagcgacaagcgggatattagccggttcctggagagcaaccccgtgatgatcgatgccaaggaagtgagcgccgcccaccgggccagatacttctggggcaatctgcctggcatgaacagacccctggccagcaccgtgaacgacaagctggagctgcaggagtgcctggagcacggccggatcgccaagttcagcaaggtgagaaccatcaccacccgaagcaacagcatcaaacaaggcaaggaccagcactttcctgtgttcatgaacgagaaggaggacatcctgtggtgtaccgagatggagagagtgttcgggttcccagtccactacacagatgtcagcaacatgtctagactggccagacagagactgctgggaagaagctggtccgtccctgtgatcagacacctgttcgcccctctgaaggagtacttcgcctgcgtgagcagcggcaacagcaacgccaacagccggggccccagcttctctagcggcctggtgccactgtccctgagagggagccacatgggccccatggagatctacaaaaccgtgagcgcctggaagcggcagcctgtgcgcgtgctgagcctgtttcggaatatcgataaagtcctgaaaagcctgggattcctggagagcggctctggctccggcggtggcaccctgaagtacgtggaggatgtgacaaacgtggtcagacgggatgtggagaagtggggccccttcgatctggtgtacggcagcacccaacccctgggcagctcttgtgaccggtgccctggctggtacatgtttcagttccaccggatcctgcagtacgccctgccgagacaggagtcccagcggccattcttttggattttcatggacaacttgctgctgaccgaggatgaccaggaaactaccactcggttcctgcagaccgaagccgtgaccctgcaggacgtgagaggccgggactaccagaacgccatgcgggtgtggtccaacatccctggactgaaaagcaagcacgcacctctgacccctaaagaagaggagtacctgcaggcccaggtgcggagcagaagcaagctggacgcccctaaggtggatctgctggtgaagaattgcctcctgcccctgagagagtacttcaagtatttcagccagaatagtctgcccctgggaggcagcggcggcggcgccctggtgacatttgaggacgtcgccgtgcggttcacccaggaggaatgggctctgctggatccttctcagaaaatcctgtaccgggacgtgatgagagagacataccggaatctgacctccgtgggcatcaactgggaatgttgggaccttgaagcctgcttcagaagcctgggaagaaacctgagagtgcaggtggtgaagagaaagtgcgagctgaccaacagcggcccctgcgccgagggcggcccaagcagcggcgcccctcctcccagcggcggcagcccagccggctccccaacctctaccgaggagggcacctctgagtccgccacccccgagagcggccctggcacctccaccgagcccagcgagggcagcgcacccggcagccctgccggcagccccacctccacagaggagggaaccagcaccgagcccagcgaaggcagcgccccaggcaccagcaccgagcctagtgagcaggagattaaacggatcaacaagatcagaagaagacttgtgaaagacagcaacaccaagaaggccggcaagacaggccccatgaaaaccctgctggttagagtgatgacacccgatctgagagagcggctggaaaacctgagaaagaagcctgaaaatatcccccagcccatcagcaatacatctagagccaacctgaataagctgctgaccgattacaccgaaatgaagaaggcgatcctgcatgtgtactgggaagagttccagaaggaccctgtgggcctgatgagccgggtggcccagcctgccagcaagaagatcgatcagaacaagctgaaacctgagatggacgagaagggcaacctgaccaccgccggctttgcctgctctcagtgtggccagcccctgttcgtgtacaagctggagcaggtgtctgagaagggcaaggcttacaccaactacttcggacggtgcaatgtggccgagcacgaaaagctgatcctgctggcccagctgaagcccgagaaggatagcgacgaagccgtgacatatagcctgggaaagtttgggcagagggccctggatttctacagcattcatgtgaccaaggagtccacccaccccgtgaagcccctggcccagatcgccggaaacagatacgcctccggacctgtgggaaaggccctgagcgacgcatgtatgggcacaatcgcctccttcctgtctaagtaccaggacatcatcatcgaacaccagaaggtggtgaagggcaaccagaagagactggagagcctgcgggagctggccggcaaggaaaacctggaataccctagcgtgaccctgccacctcagcctcacaccaaggagggcgttgatgcctacaacgaagtgatcgcccgggtgcgaatgtgggtgaacctgaacctgtggcagaagctgaagctaagcagagatgatgccaagcctctgctgagactgaagggattcccttcctttcctctggtcgagagacaggccaacgaagtggactggtgggacatggtgtgtaacgtgaagaagctgatcaacgagaaaaaggaggatggcaaggtgttttggcagaatctggctggctacaagagacaggaagccctgagaccatacctgagcagcgaggaagatcggaagaagggaaagaaattcgctcggtaccagctgggcgacctgctgctgcacctggaaaagaagcacggcgaggactggggaaaggtgtacgacgaggcctgggagcggattgacaagaaagtggaaggcctgagcaagcacatcaagctggaagaggaacggagaagcgaggacgcccagagcaaggccgccctgaccgactggctgcgggctaaggccagcttcgtgatcgagggcctgaaggaggccgacaaggacgagttctgcagatgcgagctgaagctgcagaagtggtacggggacctgcggggaaagcccttcgccatcgaagccgagaacagcatcctggacatcagcggcttcagcaagcagtacaactgtgccttcatctggcagaaggacggcgtgaagaagctgaacctgtacctgatcatcaactacttcaagggcggcaagctgcggttcaagaagatcaaacctgaagccttcgaagccaacagattctacaccgtgatcaacaaaaagagcggcgagatcgtgcccatggaggtgaacttcaacttcgacgaccccaacctgatcatcctgcctctggcctttggcaagagacagggcagagaattcatctggaacgacctgctgtccctggaaaccggcagcctgaagctggccaacggaagagtgatcgagaagacactgtacaacagaagaacccggcaggatgagcctgccctgttcgtggccctgaccttcgagcggcgggaggtcctggactcctccaatatcaaaccaatgaacctgatcggcgtggcaagaggcgaaaacatccccgccgtgatcgccctgaccgaccccgagggctgcccactgagccggtttaaggatagcctgggaaacccaacccacatcctgagaatcggcgagagctataaggagaagcagcggaccatccaggccaagaaggaggtggagcagcggagagccggcggctacagccggaagtacgccagcaaagccaagaatctggcagacgatatggtgagaaacaccgctagagatctgctgtactacgccgtgacccaggatgccatgctgatcttcgccaacctgagccggggcttcggccggcagggcaagcggaccttcatggccgagagacagtacacacggatggaggactggctgaccgccaagctggcctacgagggcctgagcaagacctacctgtccaagacactggcccagtacacctccaagacatgcagcaactgtgggtttaccatcaccagcgccgactacgacagggtgctggagaagctgaagaagacagcaacaggctggatgaccacaattaacggcaaggagctgaaggtggagggccagattacctactacaacagatacaagagacagaacgtagtcaaggacctgtccgtcgagctggatagactgagcgaagaatctgtgaacaacgacatctcctcctggacaaagggcagaagcggagaagctctgagcctcctgaagaaaagattctcccatagacccgtgcaggagaagttcgtgtgcctgaactgcggcttcgagacacacgcagccgagcaagccgccctgaacatcgccagatcctggctgttcctgcggagccaggagtacaagaaataccagacaaacaagacaaccggcaacaccgataagagagccttcgtcgagacctggcagtccttttaccggaagaagcttaaggaggtgtggaaacctgccgtgcggtctggcggatctggcggaggctcctaccaggagatggtgaccttcgaggacgtggccgtgcacttcaccaagaccgagtggaccggcctgagccccgcccagagggccctgtacaggagcgtgatgctggagaacttcggcaacctgaccgccctgggctaccccgtgcccaagcccgccctgatcagcctgctggagaggggcgacatggcctggggcctggaggcccaggacgacccccccgccgagaggaccaagaacgtgtgcggcggcccaagcagcggcgcccctcctcccagcggcggcagcccagccggctccccaacctctaccgaggagggcacctctgagtccgccacccccgagagcggccctggcacctccaccgagcccagcgagggcagcgcacccggcagccctgccggcagccccacctccacagaggagggaaccagcaccgagcccagcgaaggcagcgccccaggcaccagcaccgagcctagtgagcaggagattaaacggatcaacaagatcagaagaagacttgtgaaagacagcaacaccaagaaggccggcaagacaggccccatgaaaaccctgctggttagagtgatgacacccgatctgagagagcggctggaaaacctgagaaagaagcctgaaaatatcccccagcccatcagcaatacatctagagccaacctgaataagctgctgaccgattacaccgaaatgaagaaggcgatcctgcatgtgtactgggaagagttccagaaggaccctgtgggcctgatgagccgggtggcccagcctgccagcaagaagatcgatcagaacaagctgaaacctgagatggacgagaagggcaacctgaccaccgccggctttgcctgctctcagtgtggccagcccctgttcgtgtacaagctggagcaggtgtctgagaagggcaaggcttacaccaactacttcggacggtgcaatgtggccgagcacgaaaagctgatcctgctggcccagctgaagcccgagaaggatagcgacgaagccgtgacatatagcctgggaaagtttgggcagagggccctggatttctacagcattcatgtgaccaaggagtccacccaccccgtgaagcccctggcccagatcgccggaaacagatacgcctccggacctgtgggaaaggccctgagcgacgcatgtatgggcacaatcgcctccttcctgtctaagtaccaggacatcatcatcgaacaccagaaggtggtgaagggcaaccagaagagactggagagcctgcgggagctggccggcaaggaaaacctggaataccctagcgtgaccctgccacctcagcctcacaccaaggagggcgttgatgcctacaacgaagtgatcgcccgggtgcgaatgtgggtgaacctgaacctgtggcagaagctgaagctaagcagagatgatgccaagcctctgctgagactgaagggattcccttcctttcctctggtcgagagacaggccaacgaagtggactggtgggacatggtgtgtaacgtgaagaagctgatcaacgagaaaaaggaggatggcaaggtgttttggcagaatctggctggctacaagagacaggaagccctgagaccatacctgagcagcgaggaagatcggaagaagggaaagaaattcgctcggtaccagctgggcgacctgctgctgcacctggaaaagaagcacggcgaggactggggaaaggtgtacgacgaggcctgggagcggattgacaagaaagtggaaggcctgagcaagcacatcaagctggaagaggaacggagaagcgaggacgcccagagcaaggccgccctgaccgactggctgcgggctaaggccagcttcgtgatcgagggcctgaaggaggccgacaaggacgagttctgcagatgcgagctgaagctgcagaagtggtacggggacctgcggggaaagcccttcgccatcgaagccgagaacagcatcctggacatcagcggcttcagcaagcagtacaactgtgccttcatctggcagaaggacggcgtgaagaagctgaacctgtacctgatcatcaactacttcaagggcggcaagctgcggttcaagaagatcaaacctgaagccttcgaagccaacagattctacaccgtgatcaacaaaaagagcggcgagatcgtgcccatggaggtgaacttcaacttcgacgaccccaacctgatcatcctgcctctggcctttggcaagagacagggcagagaattcatctggaacgacctgctgtccctggaaaccggcagcctgaagctggccaacggaagagtgatcgagaagacactgtacaacagaagaacccggcaggatgagcctgccctgttcgtggccctgaccttcgagcggcgggaggtcctggactcctccaatatcaaaccaatgaacctgatcggcgtggcaagaggcgaaaacatccccgccgtgatcgccctgaccgaccccgagggctgcccactgagccggtttaaggatagcctgggaaacccaacccacatcctgagaatcggcgagagctataaggagaagcagcggaccatccaggccaagaaggaggtggagcagcggagagccggcggctacagccggaagtacgccagcaaagccaagaatctggcagacgatatggtgagaaacaccgctagagatctgctgtactacgccgtgacccaggatgccatgctgatcttcgccaacctgagccggggcttcggccggcagggcaagcggaccttcatggccgagagacagtacacacggatggaggactggctgaccgccaagctggcctacgagggcctgagcaagacctacctgtccaagacactggcccagtacacctccaagacatgcagcaactgtgggtttaccatcaccagcgccgactacgacagggtgctggagaagctgaagaagacagcaacaggctggatgaccacaattaacggcaaggagctgaaggtggagggccagattacctactacaacagatacaagagacagaacgtagtcaaggacctgtccgtcgagctggatagactgagcgaagaatctgtgaacaacgacatctcctcctggacaaagggcagaagcggagaagctctgagcctcctgaagaaaagattctcccatagacccgtgcaggagaagttcgtgtgcctgaactgcggcttcgagacacacgcagccgagcaagccgccctgaacatcgccagatcctggctgttcctgcggagccaggagtacaagaaataccagacaaacaagacaaccggcaacaccgataagagagccttcgtcgagacctggcagtccttttaccggaagaagcttaaggaggtgtggaaacctgccgtgcggtctggcggatctggcggaggctccttaccaggagatggtgaccttcgaggacgtggccgtgcacttcaccaagaccgagtggaccggcctgagccccgcccagagggccctgtacaggagcgtgatgctggagaacttcggcaacctgaccgccctgggctaccccgtgcccaagcccgccctgatcagcctgctggagaggggcgacatggcctggggcctggaggcccaggacgacccccccgccgagaggaccaagaacgtgtgcggatctggctccggcagcggccccaagaaaaagagaaaagtctaagctgccttctgcggggcttgccttctggccatgcccttcttctctcccttgcacctgtacctcttggtctttgaataaagcctgagtaggaaggctagcaaaaaaaaaaaaaaaaaaaaaaaaaaaaaaaaaaaaaaaaaaaaaaaaaaaaaaaaaaaaaaaaaaaaaaaaaaaaaaaa

SEQ ID NO: 15537 - RNA, 9485 nt, synthetic construct
  source 1..9485: mol_type = other RNA
aggaaataagagagaaaagaagagtaagaagaaatataagagccaccatggcccctaagaagaagcgtaaagtgagccggatggaacgcctcgtctacgaggtgcggcagaagtgcagaaacatcgaggacatctgcatctcctgcggatctctgaacgtgaccctggagcacccactgttcatcggcggcatgtgccagaactgtaaaaactgttttctggagtgtgcctatcaatacgacgatgacggctaccagagctactgcaccatctgttgcggcggaagagaggtgctgatgtgtggaaataacaactgctgccggtgcttctgcgtggaatgcgtggacctgctggtgggccccggcgccgcccaggccgctattaaggaagatccttggaactgctacatgtgcggccacaagggcacatacggcctgctgagacggagagaggactggcctagcagactgcagatgttcttcgccaataaccacgaccaggagttcgacccccctaaggtgtaccctcccgtccccgccgagaagagaaagcccatccgggtcctgagcctgttcgatggcatcgccaccggtctgctggtgctgaaggacctgggcatccaggtggataggtacattgcctccgaggtgtgcgaggactccatcaccgtgggaatggtgcgtcatcagggcaagatcatgtacgtgggcgacgtgcggagcgtgacacagaagcatatccaggagtggggccctttcgacctggtgatcggcggcagcccttgcaatgacctgagcatcgtgaacccagcccggaagggcctgtacgagggaaccggcagactgttcttcgagttttacagactgctgcacgacgcccggcctaaggaaggcgacgaccggcccttcttttggctgttcgagaatgtggtggccatgggagtcagcgacaagcgggatattagccggttcctggagagcaaccccgtgatgatcgatgccaaggaagtgagcgccgcccaccgggccagatacttctggggcaatctgcctggcatgaacagacccctggccagcaccgtgaacgacaagctggagctgcaggagtgcctggagcacggccggatcgccaagttcagcaaggtgagaaccatcaccacccgaagcaacagcatcaaacaaggcaaggaccagcactttcctgtgttcatgaacgagaaggaggacatcctgtggtgtaccgagatggagagagtgttcgggttcccagtccactacacagatgtcagcaacatgtctagactggccagacagagactgctgggaagaagctggtccgtccctgtgatcagacacctgttcgcccctctgaaggagtacttcgcctgcgtgagcagcggcaacagcaacgccaacagccggggccccagcttctctagcggcctggtgccactgtccctgagagggagccacatgggccccatggagatctacaaaaccgtgagcgcctggaagcggcagcctgtgcgcgtgctgagcctgtttcggaatatcgataaagtcctgaaaagcctgggattcctggagagcggctctggctccggcggtggcaccctgaagtacgtggaggatgtgacaaacgtggtcagacgggatgtggagaagtggggccccttcgatctggtgtacggcagcacccaacccctgggcagctcttgtgaccggtgccctggctggtacatgtttcagttccaccggatcctgcagtacgccctgccgagacaggagtcccagcggccattcttttggattttcatggacaacttgctgctgaccgaggatgaccaggaaactaccactcggttcctgcagaccgaagccgtgaccctgcaggacgtgagaggccgggactaccagaacgccatgcgggtgtggtccaacatccctggactgaaaagcaagcacgcacctctgacccctaaagaagaggagtacctgcaggcccaggtgcggagcagaagcaagctggacgcccctaaggtggatctgctggtgaagaattgcctcctgcccctgagagagtacttcaagtatttcagccagaatagtctgcccctgggaggcagcggcggcggcgccctggtgacatttgaggacgtcgccgtgcggttcacccaggaggaatgggctctgctggatccttctcagaaaatcctgtaccgggacgtgatgagagagacataccggaatctgacctccgtgggcatcaactgggaatgttgggaccttgaagcctgcttcagaagcctgggaagaaacctgagagtgcaggtggtgaagagaaagtgcgagctgaccaacagcggcccctgcgccgagggcggcccaagcagcggcgcccctcctcccagcggcggcagcccagccggctccccaacctctaccgaggagggcacctctgagtccgccacccccgagagcggccctggcacctccaccgagcccagcgagggcagcgcacccggcagccctgccggcagccccacctccacagaggagggaaccagcaccgagcccagcgaaggcagcgccccaggcaccagcaccgagcctagtgagcaggagattaaacggatcaacaagatcagaagaagacttgtgaaagacagcaacaccaagaaggccggcaagacaggccccatgaaaaccctgctggttagagtgatgacacccgatctgagagagcggctggaaaacctgagaaagaagcctgaaaatatcccccagcccatcagcaatacatctagagccaacctgaataagctgctgaccgattacaccgaaatgaagaaggcgatcctgcatgtgtactgggaagagttccagaaggaccctgtgggcctgatgagccgggtggcccagcctgccagcaagaagatcgatcagaacaagctgaaacctgagatggacgagaagggcaacctgaccaccgccggctttgcctgctctcagtgtggccagcccctgttcgtgtacaagctggagcaggtgtctgagaagggcaaggcttacaccaactacttcggacggtgcaatgtggccgagcacgaaaagctgatcctgctggcccagctgaagcccgagaaggatagcgacgaagccgtgacatatagcctgggaaagtttgggcagagggccctggatttctacagcattcatgtgaccaaggagtccacccaccccgtgaagcccctggcccagatcgccggaaacagatacgcctccggacctgtgggaaaggccctgagcgacgcatgtatgggcacaatcgcctccttcctgtctaagtaccaggacatcatcatcgaacaccagaaggtggtgaagggcaaccagaagagactggagagcctgcgggagctggccggcaaggaaaacctggaataccctagcgtgaccctgccacctcagcctcacaccaaggagggcgttgatgcctacaacgaagtgatcgcccgggtgcgaatgtgggtgaacctgaacctgtggcagaagctgaagctaagcagagatgatgccaagcctctgctgagactgaagggattcccttcctttcctctggtcgagagacaggccaacgaagtggactggtgggacatggtgtgtaacgtgaagaagctgatcaacgagaaaaaggaggatggcaaggtgttttggcagaatctggctggctacaagagacaggaagccctgagaccatacctgagcagcgaggaagatcggaagaagggaaagaaattcgctcggtaccagctgggcgacctgctgctgcacctggaaaagaagcacggcgaggactggggaaaggtgtacgacgaggcctgggagcggattgacaagaaagtggaaggcctgagcaagcacatcaagctggaagaggaacggagaagcgaggacgcccagagcaaggccgccctgaccgactggctgcgggctaaggccagcttcgtgatcgagggcctgaaggaggccgacaaggacgagttctgcagatgcgagctgaagctgcagaagtggtacggggacctgcggggaaagcccttcgccatcgaagccgagaacagcatcctggacatcagcggcttcagcaagcagtacaactgtgccttcatctggcagaaggacggcgtgaagaagctgaacctgtacctgatcatcaactacttcaagggcggcaagctgcggttcaagaagatcaaacctgaagccttcgaagccaacagattctacaccgtgatcaacaaaaagagcggcgagatcgtgcccatggaggtgaacttcaacttcgacgaccccaacctgatcatcctgcctctggcctttggcaagagacagggcagagaattcatctggaacgacctgctgtccctggaaaccggcagcctgaagctggccaacggaagagtgatcgagaagacactgtacaacagaagaacccggcaggatgagcctgccctgttcgtggccctgaccttcgagcggcgggaggtcctggactcctccaatatcaaaccaatgaacctgatcggcgtggcaagaggcgaaaacatccccgccgtgatcgccctgaccgaccccgagggctgcccactgagccggtttaaggatagcctgggaaacccaacccacatcctgagaatcggcgagagctataaggagaagcagcggaccatccaggccaagaaggaggtggagcagcggagagccggcggctacagccggaagtacgccagcaaagccaagaatctggcagacgatatggtgagaaacaccgctagagatctgctgtactacgccgtgacccaggatgccatgctgatcttcgccaacctgagccggggcttcggccggcagggcaagcggaccttcatggccgagagacagtacacacggatggaggactggctgaccgccaagctggcctacgagggcctgagcaagacctacctgtccaagacactggcccagtacacctccaagacatgcagcaactgtgggtttaccatcaccagcgccgactacgacagggtgctggagaagctgaagaagacagcaacaggctggatgaccacaattaacggcaaggagctgaaggtggagggccagattacctactacaacagatacaagagacagaacgtagtcaaggacctgtccgtcgagctggatagactgagcgaagaatctgtgaacaacgacatctcctcctggacaaagggcagaagcggagaagctctgagcctcctgaagaaaagattctcccatagacccgtgcaggagaagttcgtgtgcctgaactgcggcttcgagacacacgcagccgagcaagccgccctgaacatcgccagatcctggctgttcctgcggagccaggagtacaagaaataccagacaaacaagacaaccggcaacaccgataagagagccttcgtcgagacctggcagtccttttaccggaagaagcttaaggaggtgtggaaacctgccgtgcggtctggcggatctggcggaggctccagccagagcctggtgaccttcggcgacgtggccgtggacttcagccaggaggagtgggagaggctgaacagcgcccagaggggcctgtacagggacgtgatgctggagaactacaggagcctggtgagcctgggcctgtgcttcagcaagcccgacatgatcagcagcctggagcagaggaaggagccctggatgcccaagaggaagctgatgaggggccagtgccccggctggaaggccgtgggcggcccaagcagcggcgcccctcctcccagcggcggcagcccagccggctccccaacctctaccgaggagggcacctctgagtccgccacccccgagagcggccctggcacctccaccgagcccagcgagggcagcgcacccggcagccctgccggcagccccacctccacagaggagggaaccagcaccgagcccagcgaaggcagcgccccaggcaccagcaccgagcctagtgagcaggagattaaacggatcaacaagatcagaagaagacttgtgaaagacagcaacaccaagaaggccggcaagacaggccccatgaaaaccctgctggttagagtgatgacacccgatctgagagagcggctggaaaacctgagaaagaagcctgaaaatatcccccagcccatcagcaatacatctagagccaacctgaataagctgctgaccgattacaccgaaatgaagaaggcgatcctgcatgtgtactgggaagagttccagaaggaccctgtgggcctgatgagccgggtggcccagcctgccagcaagaagatcgatcagaacaagctgaaacctgagatggacgagaagggcaacctgaccaccgccggctttgcctgctctcagtgtggccagcccctgttcgtgtacaagctggagcaggtgtctgagaagggcaaggcttacaccaactacttcggacggtgcaatgtggccgagcacgaaaagctgatcctgctggcccagctgaagcccgagaaggatagcgacgaagccgtgacatatagcctgggaaagtttgggcagagggccctggatttctacagcattcatgtgaccaaggagtccacccaccccgtgaagcccctggcccagatcgccggaaacagatacgcctccggacctgtgggaaaggccctgagcgacgcatgtatgggcacaatcgcctccttcctgtctaagtaccaggacatcatcatcgaacaccagaaggtggtgaagggcaaccagaagagactggagagcctgcgggagctggccggcaaggaaaacctggaataccctagcgtgaccctgccacctcagcctcacaccaaggagggcgttgatgcctacaacgaagtgatcgcccgggtgcgaatgtgggtgaacctgaacctgtggcagaagctgaagctaagcagagatgatgccaagcctctgctgagactgaagggattcccttcctttcctctggtcgagagacaggccaacgaagtggactggtgggacatggtgtgtaacgtgaagaagctgatcaacgagaaaaaggaggatggcaaggtgttttggcagaatctggctggctacaagagacaggaagccctgagaccatacctgagcagcgaggaagatcggaagaagggaaagaaattcgctcggtaccagctgggcgacctgctgctgcacctggaaaagaagcacggcgaggactggggaaaggtgtacgacgaggcctgggagcggattgacaagaaagtggaaggcctgagcaagcacatcaagctggaagaggaacggagaagcgaggacgcccagagcaaggccgccctgaccgactggctgcgggctaaggccagcttcgtgatcgagggcctgaaggaggccgacaaggacgagttctgcagatgcgagctgaagctgcagaagtggtacggggacctgcggggaaagcccttcgccatcgaagccgagaacagcatcctggacatcagcggcttcagcaagcagtacaactgtgccttcatctggcagaaggacggcgtgaagaagctgaacctgtacctgatcatcaactacttcaagggcggcaagctgcggttcaagaagatcaaacctgaagccttcgaagccaacagattctacaccgtgatcaacaaaaagagcggcgagatcgtgcccatggaggtgaacttcaacttcgacgaccccaacctgatcatcctgcctctggcctttggcaagagacagggcagagaattcatctggaacgacctgctgtccctggaaaccggcagcctgaagctggccaacggaagagtgatcgagaagacactgtacaacagaagaacccggcaggatgagcctgccctgttcgtggccctgaccttcgagcggcgggaggtcctggactcctccaatatcaaaccaatgaacctgatcggcgtggcaagaggcgaaaacatccccgccgtgatcgccctgaccgaccccgagggctgcccactgagccggtttaaggatagcctgggaaacccaacccacatcctgagaatcggcgagagctataaggagaagcagcggaccatccaggccaagaaggaggtggagcagcggagagccggcggctacagccggaagtacgccagcaaagccaagaatctggcagacgatatggtgagaaacaccgctagagatctgctgtactacgccgtgacccaggatgccatgctgatcttcgccaacctgagccggggcttcggccggcagggcaagcggaccttcatggccgagagacagtacacacggatggaggactggctgaccgccaagctggcctacgagggcctgagcaagacctacctgtccaagacactggcccagtacacctccaagacatgcagcaactgtgggtttaccatcaccagcgccgactacgacagggtgctggagaagctgaagaagacagcaacaggctggatgaccacaattaacggcaaggagctgaaggtggagggccagattacctactacaacagatacaagagacagaacgtagtcaaggacctgtccgtcgagctggatagactgagcgaagaatctgtgaacaacgacatctcctcctggacaaagggcagaagcggagaagctctgagcctcctgaagaaaagattctcccatagacccgtgcaggagaagttcgtgtgcctgaactgcggcttcgagacacacgcagccgagcaagccgccctgaacatcgccagatcctggctgttcctgcggagccaggagtacaagaaataccagacaaacaagacaaccggcaacaccgataagagagccttcgtcgagacctggcagtccttttaccggaagaagcttaaggaggtgtggaaacctgccgtgcggtctggcggatctggcggaggctcctagccagagcctggtgaccttcggcgacgtggccgtggacttcagccaggaggagtgggagaggctgaacagcgcccagaggggcctgtacagggacgtgatgctggagaactacaggagcctggtgagcctgggcctgtgcttcagcaagcccgacatgatcagcagcctggagcagaggaaggagccctggatgcccaagaggaagctgatgaggggccagtgccccggctggaaggccgtgggatctggctccggcagcggccccaagaaaaagagaaaagtctaagctgccttctgcggggcttgccttctggccatgcccttcttctctcccttgcacctgtacctcttggtctttgaataaagcctgagtaggaaggctagcaaaaaaaaaaaaaaaaaaaaaaaaaaaaaaaaaaaaaaaaaaaaaaaaaaaaaaaaaaaaaaaaaaaaaaaaaaaaaaaa

SEQ ID NO: 15538 - RNA, 9485 nt, synthetic construct
  source 1..9485: mol_type = other RNA
aggaaataagagagaaaagaagagtaagaagaaatataagagccaccatggcccctaagaagaagcgtaaagtgagccggatggaacgcctcgtctacgaggtgcggcagaagtgcagaaacatcgaggacatctgcatctcctgcggatctctgaacgtgaccctggagcacccactgttcatcggcggcatgtgccagaactgtaaaaactgttttctggagtgtgcctatcaatacgacgatgacggctaccagagctactgcaccatctgttgcggcggaagagaggtgctgatgtgtggaaataacaactgctgccggtgcttctgcgtggaatgcgtggacctgctggtgggccccggcgccgcccaggccgctattaaggaagatccttggaactgctacatgtgcggccacaagggcacatacggcctgctgagacggagagaggactggcctagcagactgcagatgttcttcgccaataaccacgaccaggagttcgacccccctaaggtgtaccctcccgtccccgccgagaagagaaagcccatccgggtcctgagcctgttcgatggcatcgccaccggtctgctggtgctgaaggacctgggcatccaggtggataggtacattgcctccgaggtgtgcgaggactccatcaccgtgggaatggtgcgtcatcagggcaagatcatgtacgtgggcgacgtgcggagcgtgacacagaagcatatccaggagtggggccctttcgacctggtgatcggcggcagcccttgcaatgacctgagcatcgtgaacccagcccggaagggcctgtacgagggaaccggcagactgttcttcgagttttacagactgctgcacgacgcccggcctaaggaaggcgacgaccggcccttcttttggctgttcgagaatgtggtggccatgggagtcagcgacaagcgggatattagccggttcctggagagcaaccccgtgatgatcgatgccaaggaagtgagcgccgcccaccgggccagatacttctggggcaatctgcctggcatgaacagacccctggccagcaccgtgaacgacaagctggagctgcaggagtgcctggagcacggccggatcgccaagttcagcaaggtgagaaccatcaccacccgaagcaacagcatcaaacaaggcaaggaccagcactttcctgtgttcatgaacgagaaggaggacatcctgtggtgtaccgagatggagagagtgttcgggttcccagtccactacacagatgtcagcaacatgtctagactggccagacagagactgctgggaagaagctggtccgtccctgtgatcagacacctgttcgcccctctgaaggagtacttcgcctgcgtgagcagcggcaacagcaacgccaacagccggggccccagcttctctagcggcctggtgccactgtccctgagagggagccacatgggccccatggagatctacaaaaccgtgagcgcctggaagcggcagcctgtgcgcgtgctgagcctgtttcggaatatcgataaagtcctgaaaagcctgggattcctggagagcggctctggctccggcggtggcaccctgaagtacgtggaggatgtgacaaacgtggtcagacgggatgtggagaagtggggccccttcgatctggtgtacggcagcacccaacccctgggcagctcttgtgaccggtgccctggctggtacatgtttcagttccaccggatcctgcagtacgccctgccgagacaggagtcccagcggccattcttttggattttcatggacaacttgctgctgaccgaggatgaccaggaaactaccactcggttcctgcagaccgaagccgtgaccctgcaggacgtgagaggccgggactaccagaacgccatgcgggtgtggtccaacatccctggactgaaaagcaagcacgcacctctgacccctaaagaagaggagtacctgcaggcccaggtgcggagcagaagcaagctggacgcccctaaggtggatctgctggtgaagaattgcctcctgcccctgagagagtacttcaagtatttcagccagaatagtctgcccctgggaggcagcggcggcggcgccctggtgacatttgaggacgtcgccgtgcggttcacccaggaggaatgggctctgctggatccttctcagaaaatcctgtaccgggacgtgatgagagagacataccggaatctgacctccgtgggcatcaactgggaatgttgggaccttgaagcctgcttcagaagcctgggaagaaacctgagagtgcaggtggtgaagagaaagtgcgagctgaccaacagcggcccctgcgccgagggcggcccaagcagcggcgcccctcctcccagcggcggcagcccagccggctccccaacctctaccgaggagggcacctctgagtccgccacccccgagagcggccctggcacctccaccgagcccagcgagggcagcgcacccggcagccctgccggcagccccacctccacagaggagggaaccagcaccgagcccagcgaaggcagcgccccaggcaccagcaccgagcctagtgagcaggagattaaacggatcaacaagatcagaagaagacttgtgaaagacagcaacaccaagaaggccggcaagacaggccccatgaaaaccctgctggttagagtgatgacacccgatctgagagagcggctggaaaacctgagaaagaagcctgaaaatatcccccagcccatcagcaatacatctagagccaacctgaataagctgctgaccgattacaccgaaatgaagaaggcgatcctgcatgtgtactgggaagagttccagaaggaccctgtgggcctgatgagccgggtggcccagcctgccagcaagaagatcgatcagaacaagctgaaacctgagatggacgagaagggcaacctgaccaccgccggctttgcctgctctcagtgtggccagcccctgttcgtgtacaagctggagcaggtgtctgagaagggcaaggcttacaccaactacttcggacggtgcaatgtggccgagcacgaaaagctgatcctgctggcccagctgaagcccgagaaggatagcgacgaagccgtgacatatagcctgggaaagtttgggcagagggccctggatttctacagcattcatgtgaccaaggagtccacccaccccgtgaagcccctggcccagatcgccggaaacagatacgcctccggacctgtgggaaaggccctgagcgacgcatgtatgggcacaatcgcctccttcctgtctaagtaccaggacatcatcatcgaacaccagaaggtggtgaagggcaaccagaagagactggagagcctgcgggagctggccggcaaggaaaacctggaataccctagcgtgaccctgccacctcagcctcacaccaaggagggcgttgatgcctacaacgaagtgatcgcccgggtgcgaatgtgggtgaacctgaacctgtggcagaagctgaagctaagcagagatgatgccaagcctctgctgagactgaagggattcccttcctttcctctggtcgagagacaggccaacgaagtggactggtgggacatggtgtgtaacgtgaagaagctgatcaacgagaaaaaggaggatggcaaggtgttttggcagaatctggctggctacaagagacaggaagccctgagaccatacctgagcagcgaggaagatcggaagaagggaaagaaattcgctcggtaccagctgggcgacctgctgctgcacctggaaaagaagcacggcgaggactggggaaaggtgtacgacgaggcctgggagcggattgacaagaaagtggaaggcctgagcaagcacatcaagctggaagaggaacggagaagcgaggacgcccagagcaaggccgccctgaccgactggctgcgggctaaggccagcttcgtgatcgagggcctgaaggaggccgacaaggacgagttctgcagatgcgagctgaagctgcagaagtggtacggggacctgcggggaaagcccttcgccatcgaagccgagaacagcatcctggacatcagcggcttcagcaagcagtacaactgtgccttcatctggcagaaggacggcgtgaagaagctgaacctgtacctgatcatcaactacttcaagggcggcaagctgcggttcaagaagatcaaacctgaagccttcgaagccaacagattctacaccgtgatcaacaaaaagagcggcgagatcgtgcccatggaggtgaacttcaacttcgacgaccccaacctgatcatcctgcctctggcctttggcaagagacagggcagagaattcatctggaacgacctgctgtccctggaaaccggcagcctgaagctggccaacggaagagtgatcgagaagacactgtacaacagaagaacccggcaggatgagcctgccctgttcgtggccctgaccttcgagcggcgggaggtcctggactcctccaatatcaaaccaatgaacctgatcggcgtggcaagaggcgaaaacatccccgccgtgatcgccctgaccgaccccgagggctgcccactgagccggtttaaggatagcctgggaaacccaacccacatcctgagaatcggcgagagctataaggagaagcagcggaccatccaggccaagaaggaggtggagcagcggagagccggcggctacagccggaagtacgccagcaaagccaagaatctggcagacgatatggtgagaaacaccgctagagatctgctgtactacgccgtgacccaggatgccatgctgatcttcgccaacctgagccggggcttcggccggcagggcaagcggaccttcatggccgagagacagtacacacggatggaggactggctgaccgccaagctggcctacgagggcctgagcaagacctacctgtccaagacactggcccagtacacctccaagacatgcagcaactgtgggtttaccatcaccagcgccgactacgacagggtgctggagaagctgaagaagacagcaacaggctggatgaccacaattaacggcaaggagctgaaggtggagggccagattacctactacaacagatacaagagacagaacgtagtcaaggacctgtccgtcgagctggatagactgagcgaagaatctgtgaacaacgacatctcctcctggacaaagggcagaagcggagaagctctgagcctcctgaagaaaagattctcccatagacccgtgcaggagaagttcgtgtgcctgaactgcggcttcgagacacacgcagccgagcaagccgccctgaacatcgccagatcctggctgttcctgcggagccaggagtacaagaaataccagacaaacaagacaaccggcaacaccgataagagagccttcgtcgagacctggcagtccttttaccggaagaagcttaaggaggtgtggaaacctgccgtgcggtctggcggatctggcggaggctccggctgctgcagcctggagacccacagcatcagggacaagaacgccgtgacctacggcgacgtgcacgtgaacttcacccaggaggagtgggccctgctggaccccagccagaagaagctgtacaaggacgtgatgctggagacctacaggaacctgaacgccatcggcttcaactgggacgacaagaacaccgaggagcactgccccagcaccaggaggtggaggaggttctacaggatgcagggcggcccaagcagcggcgcccctcctcccagcggcggcagcccagccggctccccaacctctaccgaggagggcacctctgagtccgccacccccgagagcggccctggcacctccaccgagcccagcgagggcagcgcacccggcagccctgccggcagccccacctccacagaggagggaaccagcaccgagcccagcgaaggcagcgccccaggcaccagcaccgagcctagtgagcaggagattaaacggatcaacaagatcagaagaagacttgtgaaagacagcaacaccaagaaggccggcaagacaggccccatgaaaaccctgctggttagagtgatgacacccgatctgagagagcggctggaaaacctgagaaagaagcctgaaaatatcccccagcccatcagcaatacatctagagccaacctgaataagctgctgaccgattacaccgaaatgaagaaggcgatcctgcatgtgtactgggaagagttccagaaggaccctgtgggcctgatgagccgggtggcccagcctgccagcaagaagatcgatcagaacaagctgaaacctgagatggacgagaagggcaacctgaccaccgccggctttgcctgctctcagtgtggccagcccctgttcgtgtacaagctggagcaggtgtctgagaagggcaaggcttacaccaactacttcggacggtgcaatgtggccgagcacgaaaagctgatcctgctggcccagctgaagcccgagaaggatagcgacgaagccgtgacatatagcctgggaaagtttgggcagagggccctggatttctacagcattcatgtgaccaaggagtccacccaccccgtgaagcccctggcccagatcgccggaaacagatacgcctccggacctgtgggaaaggccctgagcgacgcatgtatgggcacaatcgcctccttcctgtctaagtaccaggacatcatcatcgaacaccagaaggtggtgaagggcaaccagaagagactggagagcctgcgggagctggccggcaaggaaaacctggaataccctagcgtgaccctgccacctcagcctcacaccaaggagggcgttgatgcctacaacgaagtgatcgcccgggtgcgaatgtgggtgaacctgaacctgtggcagaagctgaagctaagcagagatgatgccaagcctctgctgagactgaagggattcccttcctttcctctggtcgagagacaggccaacgaagtggactggtgggacatggtgtgtaacgtgaagaagctgatcaacgagaaaaaggaggatggcaaggtgttttggcagaatctggctggctacaagagacaggaagccctgagaccatacctgagcagcgaggaagatcggaagaagggaaagaaattcgctcggtaccagctgggcgacctgctgctgcacctggaaaagaagcacggcgaggactggggaaaggtgtacgacgaggcctgggagcggattgacaagaaagtggaaggcctgagcaagcacatcaagctggaagaggaacggagaagcgaggacgcccagagcaaggccgccctgaccgactggctgcgggctaaggccagcttcgtgatcgagggcctgaaggaggccgacaaggacgagttctgcagatgcgagctgaagctgcagaagtggtacggggacctgcggggaaagcccttcgccatcgaagccgagaacagcatcctggacatcagcggcttcagcaagcagtacaactgtgccttcatctggcagaaggacggcgtgaagaagctgaacctgtacctgatcatcaactacttcaagggcggcaagctgcggttcaagaagatcaaacctgaagccttcgaagccaacagattctacaccgtgatcaacaaaaagagcggcgagatcgtgcccatggaggtgaacttcaacttcgacgaccccaacctgatcatcctgcctctggcctttggcaagagacagggcagagaattcatctggaacgacctgctgtccctggaaaccggcagcctgaagctggccaacggaagagtgatcgagaagacactgtacaacagaagaacccggcaggatgagcctgccctgttcgtggccctgaccttcgagcggcgggaggtcctggactcctccaatatcaaaccaatgaacctgatcggcgtggcaagaggcgaaaacatccccgccgtgatcgccctgaccgaccccgagggctgcccactgagccggtttaaggatagcctgggaaacccaacccacatcctgagaatcggcgagagctataaggagaagcagcggaccatccaggccaagaaggaggtggagcagcggagagccggcggctacagccggaagtacgccagcaaagccaagaatctggcagacgatatggtgagaaacaccgctagagatctgctgtactacgccgtgacccaggatgccatgctgatcttcgccaacctgagccggggcttcggccggcagggcaagcggaccttcatggccgagagacagtacacacggatggaggactggctgaccgccaagctggcctacgagggcctgagcaagacctacctgtccaagacactggcccagtacacctccaagacatgcagcaactgtgggtttaccatcaccagcgccgactacgacagggtgctggagaagctgaagaagacagcaacaggctggatgaccacaattaacggcaaggagctgaaggtggagggccagattacctactacaacagatacaagagacagaacgtagtcaaggacctgtccgtcgagctggatagactgagcgaagaatctgtgaacaacgacatctcctcctggacaaagggcagaagcggagaagctctgagcctcctgaagaaaagattctcccatagacccgtgcaggagaagttcgtgtgcctgaactgcggcttcgagacacacgcagccgagcaagccgccctgaacatcgccagatcctggctgttcctgcggagccaggagtacaagaaataccagacaaacaagacaaccggcaacaccgataagagagccttcgtcgagacctggcagtccttttaccggaagaagcttaaggaggtgtggaaacctgccgtgcggtctggcggatctggcggaggctcctggctgctgcagcctggagacccacagcatcagggacaagaacgccgtgacctacggcgacgtgcacgtgaacttcacccaggaggagtgggccctgctggaccccagccagaagaagctgtacaaggacgtgatgctggagacctacaggaacctgaacgccatcggcttcaactgggacgacaagaacaccgaggagcactgccccagcaccaggaggtggaggaggttctacaggatgcagggatctggctccggcagcggccccaagaaaaagagaaaagtctaagctgccttctgcggggcttgccttctggccatgcccttcttctctcccttgcacctgtacctcttggtctttgaataaagcctgagtaggaaggctagcaaaaaaaaaaaaaaaaaaaaaaaaaaaaaaaaaaaaaaaaaaaaaaaaaaaaaaaaaaaaaaaaaaaaaaaaaaaaaaaa

SEQ ID NO: 15539 - RNA, 9485 nt, synthetic construct
  source 1..9485: mol_type = other RNA
aggaaataagagagaaaagaagagtaagaagaaatataagagccaccatggcccctaagaagaagcgtaaagtgagccggatggaacgcctcgtctacgaggtgcggcagaagtgcagaaacatcgaggacatctgcatctcctgcggatctctgaacgtgaccctggagcacccactgttcatcggcggcatgtgccagaactgtaaaaactgttttctggagtgtgcctatcaatacgacgatgacggctaccagagctactgcaccatctgttgcggcggaagagaggtgctgatgtgtggaaataacaactgctgccggtgcttctgcgtggaatgcgtggacctgctggtgggccccggcgccgcccaggccgctattaaggaagatccttggaactgctacatgtgcggccacaagggcacatacggcctgctgagacggagagaggactggcctagcagactgcagatgttcttcgccaataaccacgaccaggagttcgacccccctaaggtgtaccctcccgtccccgccgagaagagaaagcccatccgggtcctgagcctgttcgatggcatcgccaccggtctgctggtgctgaaggacctgggcatccaggtggataggtacattgcctccgaggtgtgcgaggactccatcaccgtgggaatggtgcgtcatcagggcaagatcatgtacgtgggcgacgtgcggagcgtgacacagaagcatatccaggagtggggccctttcgacctggtgatcggcggcagcccttgcaatgacctgagcatcgtgaacccagcccggaagggcctgtacgagggaaccggcagactgttcttcgagttttacagactgctgcacgacgcccggcctaaggaaggcgacgaccggcccttcttttggctgttcgagaatgtggtggccatgggagtcagcgacaagcgggatattagccggttcctggagagcaaccccgtgatgatcgatgccaaggaagtgagcgccgcccaccgggccagatacttctggggcaatctgcctggcatgaacagacccctggccagcaccgtgaacgacaagctggagctgcaggagtgcctggagcacggccggatcgccaagttcagcaaggtgagaaccatcaccacccgaagcaacagcatcaaacaaggcaaggaccagcactttcctgtgttcatgaacgagaaggaggacatcctgtggtgtaccgagatggagagagtgttcgggttcccagtccactacacagatgtcagcaacatgtctagactggccagacagagactgctgggaagaagctggtccgtccctgtgatcagacacctgttcgcccctctgaaggagtacttcgcctgcgtgagcagcggcaacagcaacgccaacagccggggccccagcttctctagcggcctggtgccactgtccctgagagggagccacatgggccccatggagatctacaaaaccgtgagcgcctggaagcggcagcctgtgcgcgtgctgagcctgtttcggaatatcgataaagtcctgaaaagcctgggattcctggagagcggctctggctccggcggtggcaccctgaagtacgtggaggatgtgacaaacgtggtcagacgggatgtggagaagtggggccccttcgatctggtgtacggcagcacccaacccctgggcagctcttgtgaccggtgccctggctggtacatgtttcagttccaccggatcctgcagtacgccctgccgagacaggagtcccagcggccattcttttggattttcatggacaacttgctgctgaccgaggatgaccaggaaactaccactcggttcctgcagaccgaagccgtgaccctgcaggacgtgagaggccgggactaccagaacgccatgcgggtgtggtccaacatccctggactgaaaagcaagcacgcacctctgacccctaaagaagaggagtacctgcaggcccaggtgcggagcagaagcaagctggacgcccctaaggtggatctgctggtgaagaattgcctcctgcccctgagagagtacttcaagtatttcagccagaatagtctgcccctgggaggcagcggcggcggcgccctggtgacatttgaggacgtcgccgtgcggttcacccaggaggaatgggctctgctggatccttctcagaaaatcctgtaccgggacgtgatgagagagacataccggaatctgacctccgtgggcatcaactgggaatgttgggaccttgaagcctgcttcagaagcctgggaagaaacctgagagtgcaggtggtgaagagaaagtgcgagctgaccaacagcggcccctgcgccgagggcggcccaagcagcggcgcccctcctcccagcggcggcagcccagccggctccccaacctctaccgaggagggcacctctgagtccgccacccccgagagcggccctggcacctccaccgagcccagcgagggcagcgcacccggcagccctgccggcagccccacctccacagaggagggaaccagcaccgagcccagcgaaggcagcgccccaggcaccagcaccgagcctagtgagcaggagattaaacggatcaacaagatcagaagaagacttgtgaaagacagcaacaccaagaaggccggcaagacaggccccatgaaaaccctgctggttagagtgatgacacccgatctgagagagcggctggaaaacctgagaaagaagcctgaaaatatcccccagcccatcagcaatacatctagagccaacctgaataagctgctgaccgattacaccgaaatgaagaaggcgatcctgcatgtgtactgggaagagttccagaaggaccctgtgggcctgatgagccgggtggcccagcctgccagcaagaagatcgatcagaacaagctgaaacctgagatggacgagaagggcaacctgaccaccgccggctttgcctgctctcagtgtggccagcccctgttcgtgtacaagctggagcaggtgtctgagaagggcaaggcttacaccaactacttcggacggtgcaatgtggccgagcacgaaaagctgatcctgctggcccagctgaagcccgagaaggatagcgacgaagccgtgacatatagcctgggaaagtttgggcagagggccctggatttctacagcattcatgtgaccaaggagtccacccaccccgtgaagcccctggcccagatcgccggaaacagatacgcctccggacctgtgggaaaggccctgagcgacgcatgtatgggcacaatcgcctccttcctgtctaagtaccaggacatcatcatcgaacaccagaaggtggtgaagggcaaccagaagagactggagagcctgcgggagctggccggcaaggaaaacctggaataccctagcgtgaccctgccacctcagcctcacaccaaggagggcgttgatgcctacaacgaagtgatcgcccgggtgcgaatgtgggtgaacctgaacctgtggcagaagctgaagctaagcagagatgatgccaagcctctgctgagactgaagggattcccttcctttcctctggtcgagagacaggccaacgaagtggactggtgggacatggtgtgtaacgtgaagaagctgatcaacgagaaaaaggaggatggcaaggtgttttggcagaatctggctggctacaagagacaggaagccctgagaccatacctgagcagcgaggaagatcggaagaagggaaagaaattcgctcggtaccagctgggcgacctgctgctgcacctggaaaagaagcacggcgaggactggggaaaggtgtacgacgaggcctgggagcggattgacaagaaagtggaaggcctgagcaagcacatcaagctggaagaggaacggagaagcgaggacgcccagagcaaggccgccctgaccgactggctgcgggctaaggccagcttcgtgatcgagggcctgaaggaggccgacaaggacgagttctgcagatgcgagctgaagctgcagaagtggtacggggacctgcggggaaagcccttcgccatcgaagccgagaacagcatcctggacatcagcggcttcagcaagcagtacaactgtgccttcatctggcagaaggacggcgtgaagaagctgaacctgtacctgatcatcaactacttcaagggcggcaagctgcggttcaagaagatcaaacctgaagccttcgaagccaacagattctacaccgtgatcaacaaaaagagcggcgagatcgtgcccatggaggtgaacttcaacttcgacgaccccaacctgatcatcctgcctctggcctttggcaagagacagggcagagaattcatctggaacgacctgctgtccctggaaaccggcagcctgaagctggccaacggaagagtgatcgagaagacactgtacaacagaagaacccggcaggatgagcctgccctgttcgtggccctgaccttcgagcggcgggaggtcctggactcctccaatatcaaaccaatgaacctgatcggcgtggcaagaggcgaaaacatccccgccgtgatcgccctgaccgaccccgagggctgcccactgagccggtttaaggatagcctgggaaacccaacccacatcctgagaatcggcgagagctataaggagaagcagcggaccatccaggccaagaaggaggtggagcagcggagagccggcggctacagccggaagtacgccagcaaagccaagaatctggcagacgatatggtgagaaacaccgctagagatctgctgtactacgccgtgacccaggatgccatgctgatcttcgccaacctgagccggggcttcggccggcagggcaagcggaccttcatggccgagagacagtacacacggatggaggactggctgaccgccaagctggcctacgagggcctgagcaagacctacctgtccaagacactggcccagtacacctccaagacatgcagcaactgtgggtttaccatcaccagcgccgactacgacagggtgctggagaagctgaagaagacagcaacaggctggatgaccacaattaacggcaaggagctgaaggtggagggccagattacctactacaacagatacaagagacagaacgtagtcaaggacctgtccgtcgagctggatagactgagcgaagaatctgtgaacaacgacatctcctcctggacaaagggcagaagcggagaagctctgagcctcctgaagaaaagattctcccatagacccgtgcaggagaagttcgtgtgcctgaactgcggcttcgagacacacgcagccgagcaagccgccctgaacatcgccagatcctggctgttcctgcggagccaggagtacaagaaataccagacaaacaagacaaccggcaacaccgataagagagccttcgtcgagacctggcagtccttttaccggaagaagcttaaggaggtgtggaaacctgccgtgcggtctggcggatctggcggaggctccacctgcatggtgcacaggcagaccatgagctgcagcggcgccggcggcatcaccgccttcgtggccttcagggacgtggccgtggacttcacccaggaggagtggaggctgctgagccccgcccagaggaccctgcacagggaggtgatgctggagacctacaaccacctggtgagcctggagatccccagcagcaagcccaagctgatcgcccagctggagcagggcgaggagccctggaggggcggcccaagcagcggcgcccctcctcccagcggcggcagcccagccggctccccaacctctaccgaggagggcacctctgagtccgccacccccgagagcggccctggcacctccaccgagcccagcgagggcagcgcacccggcagccctgccggcagccccacctccacagaggagggaaccagcaccgagcccagcgaaggcagcgccccaggcaccagcaccgagcctagtgagcaggagattaaacggatcaacaagatcagaagaagacttgtgaaagacagcaacaccaagaaggccggcaagacaggccccatgaaaaccctgctggttagagtgatgacacccgatctgagagagcggctggaaaacctgagaaagaagcctgaaaatatcccccagcccatcagcaatacatctagagccaacctgaataagctgctgaccgattacaccgaaatgaagaaggcgatcctgcatgtgtactgggaagagttccagaaggaccctgtgggcctgatgagccgggtggcccagcctgccagcaagaagatcgatcagaacaagctgaaacctgagatggacgagaagggcaacctgaccaccgccggctttgcctgctctcagtgtggccagcccctgttcgtgtacaagctggagcaggtgtctgagaagggcaaggcttacaccaactacttcggacggtgcaatgtggccgagcacgaaaagctgatcctgctggcccagctgaagcccgagaaggatagcgacgaagccgtgacatatagcctgggaaagtttgggcagagggccctggatttctacagcattcatgtgaccaaggagtccacccaccccgtgaagcccctggcccagatcgccggaaacagatacgcctccggacctgtgggaaaggccctgagcgacgcatgtatgggcacaatcgcctccttcctgtctaagtaccaggacatcatcatcgaacaccagaaggtggtgaagggcaaccagaagagactggagagcctgcgggagctggccggcaaggaaaacctggaataccctagcgtgaccctgccacctcagcctcacaccaaggagggcgttgatgcctacaacgaagtgatcgcccgggtgcgaatgtgggtgaacctgaacctgtggcagaagctgaagctaagcagagatgatgccaagcctctgctgagactgaagggattcccttcctttcctctggtcgagagacaggccaacgaagtggactggtgggacatggtgtgtaacgtgaagaagctgatcaacgagaaaaaggaggatggcaaggtgttttggcagaatctggctggctacaagagacaggaagccctgagaccatacctgagcagcgaggaagatcggaagaagggaaagaaattcgctcggtaccagctgggcgacctgctgctgcacctggaaaagaagcacggcgaggactggggaaaggtgtacgacgaggcctgggagcggattgacaagaaagtggaaggcctgagcaagcacatcaagctggaagaggaacggagaagcgaggacgcccagagcaaggccgccctgaccgactggctgcgggctaaggccagcttcgtgatcgagggcctgaaggaggccgacaaggacgagttctgcagatgcgagctgaagctgcagaagtggtacggggacctgcggggaaagcccttcgccatcgaagccgagaacagcatcctggacatcagcggcttcagcaagcagtacaactgtgccttcatctggcagaaggacggcgtgaagaagctgaacctgtacctgatcatcaactacttcaagggcggcaagctgcggttcaagaagatcaaacctgaagccttcgaagccaacagattctacaccgtgatcaacaaaaagagcggcgagatcgtgcccatggaggtgaacttcaacttcgacgaccccaacctgatcatcctgcctctggcctttggcaagagacagggcagagaattcatctggaacgacctgctgtccctggaaaccggcagcctgaagctggccaacggaagagtgatcgagaagacactgtacaacagaagaacccggcaggatgagcctgccctgttcgtggccctgaccttcgagcggcgggaggtcctggactcctccaatatcaaaccaatgaacctgatcggcgtggcaagaggcgaaaacatccccgccgtgatcgccctgaccgaccccgagggctgcccactgagccggtttaaggatagcctgggaaacccaacccacatcctgagaatcggcgagagctataaggagaagcagcggaccatccaggccaagaaggaggtggagcagcggagagccggcggctacagccggaagtacgccagcaaagccaagaatctggcagacgatatggtgagaaacaccgctagagatctgctgtactacgccgtgacccaggatgccatgctgatcttcgccaacctgagccggggcttcggccggcagggcaagcggaccttcatggccgagagacagtacacacggatggaggactggctgaccgccaagctggcctacgagggcctgagcaagacctacctgtccaagacactggcccagtacacctccaagacatgcagcaactgtgggtttaccatcaccagcgccgactacgacagggtgctggagaagctgaagaagacagcaacaggctggatgaccacaattaacggcaaggagctgaaggtggagggccagattacctactacaacagatacaagagacagaacgtagtcaaggacctgtccgtcgagctggatagactgagcgaagaatctgtgaacaacgacatctcctcctggacaaagggcagaagcggagaagctctgagcctcctgaagaaaagattctcccatagacccgtgcaggagaagttcgtgtgcctgaactgcggcttcgagacacacgcagccgagcaagccgccctgaacatcgccagatcctggctgttcctgcggagccaggagtacaagaaataccagacaaacaagacaaccggcaacaccgataagagagccttcgtcgagacctggcagtccttttaccggaagaagcttaaggaggtgtggaaacctgccgtgcggtctggcggatctggcggaggctcctacctgcatggtgcacaggcagaccatgagctgcagcggcgccggcggcatcaccgccttcgtggccttcagggacgtggccgtggacttcacccaggaggagtggaggctgctgagccccgcccagaggaccctgcacagggaggtgatgctggagacctacaaccacctggtgagcctggagatccccagcagcaagcccaagctgatcgcccagctggagcagggcgaggagccctggaggggatctggctccggcagcggccccaagaaaaagagaaaagtctaagctgccttctgcggggcttgccttctggccatgcccttcttctctcccttgcacctgtacctcttggtctttgaataaagcctgagtaggaaggctagcaaaaaaaaaaaaaaaaaaaaaaaaaaaaaaaaaaaaaaaaaaaaaaaaaaaaaaaaaaaaaaaaaaaaaaaaaaaaaaaa

SEQ ID NO: 15540 - RNA, 9485 nt, synthetic construct
  source 1..9485: mol_type = other RNA
aggaaataagagagaaaagaagagtaagaagaaatataagagccaccatggcccctaagaagaagcgtaaagtgagccggatggaacgcctcgtctacgaggtgcggcagaagtgcagaaacatcgaggacatctgcatctcctgcggatctctgaacgtgaccctggagcacccactgttcatcggcggcatgtgccagaactgtaaaaactgttttctggagtgtgcctatcaatacgacgatgacggctaccagagctactgcaccatctgttgcggcggaagagaggtgctgatgtgtggaaataacaactgctgccggtgcttctgcgtggaatgcgtggacctgctggtgggccccggcgccgcccaggccgctattaaggaagatccttggaactgctacatgtgcggccacaagggcacatacggcctgctgagacggagagaggactggcctagcagactgcagatgttcttcgccaataaccacgaccaggagttcgacccccctaaggtgtaccctcccgtccccgccgagaagagaaagcccatccgggtcctgagcctgttcgatggcatcgccaccggtctgctggtgctgaaggacctgggcatccaggtggataggtacattgcctccgaggtgtgcgaggactccatcaccgtgggaatggtgcgtcatcagggcaagatcatgtacgtgggcgacgtgcggagcgtgacacagaagcatatccaggagtggggccctttcgacctggtgatcggcggcagcccttgcaatgacctgagcatcgtgaacccagcccggaagggcctgtacgagggaaccggcagactgttcttcgagttttacagactgctgcacgacgcccggcctaaggaaggcgacgaccggcccttcttttggctgttcgagaatgtggtggccatgggagtcagcgacaagcgggatattagccggttcctggagagcaaccccgtgatgatcgatgccaaggaagtgagcgccgcccaccgggccagatacttctggggcaatctgcctggcatgaacagacccctggccagcaccgtgaacgacaagctggagctgcaggagtgcctggagcacggccggatcgccaagttcagcaaggtgagaaccatcaccacccgaagcaacagcatcaaacaaggcaaggaccagcactttcctgtgttcatgaacgagaaggaggacatcctgtggtgtaccgagatggagagagtgttcgggttcccagtccactacacagatgtcagcaacatgtctagactggccagacagagactgctgggaagaagctggtccgtccctgtgatcagacacctgttcgcccctctgaaggagtacttcgcctgcgtgagcagcggcaacagcaacgccaacagccggggccccagcttctctagcggcctggtgccactgtccctgagagggagccacatgggccccatggagatctacaaaaccgtgagcgcctggaagcggcagcctgtgcgcgtgctgagcctgtttcggaatatcgataaagtcctgaaaagcctgggattcctggagagcggctctggctccggcggtggcaccctgaagtacgtggaggatgtgacaaacgtggtcagacgggatgtggagaagtggggccccttcgatctggtgtacggcagcacccaacccctgggcagctcttgtgaccggtgccctggctggtacatgtttcagttccaccggatcctgcagtacgccctgccgagacaggagtcccagcggccattcttttggattttcatggacaacttgctgctgaccgaggatgaccaggaaactaccactcggttcctgcagaccgaagccgtgaccctgcaggacgtgagaggccgggactaccagaacgccatgcgggtgtggtccaacatccctggactgaaaagcaagcacgcacctctgacccctaaagaagaggagtacctgcaggcccaggtgcggagcagaagcaagctggacgcccctaaggtggatctgctggtgaagaattgcctcctgcccctgagagagtacttcaagtatttcagccagaatagtctgcccctgggaggcagcggcggcggcgccctggtgacatttgaggacgtcgccgtgcggttcacccaggaggaatgggctctgctggatccttctcagaaaatcctgtaccgggacgtgatgagagagacataccggaatctgacctccgtgggcatcaactgggaatgttgggaccttgaagcctgcttcagaagcctgggaagaaacctgagagtgcaggtggtgaagagaaagtgcgagctgaccaacagcggcccctgcgccgagggcggcccaagcagcggcgcccctcctcccagcggcggcagcccagccggctccccaacctctaccgaggagggcacctctgagtccgccacccccgagagcggccctggcacctccaccgagcccagcgagggcagcgcacccggcagccctgccggcagccccacctccacagaggagggaaccagcaccgagcccagcgaaggcagcgccccaggcaccagcaccgagcctagtgagcaggagattaaacggatcaacaagatcagaagaagacttgtgaaagacagcaacaccaagaaggccggcaagacaggccccatgaaaaccctgctggttagagtgatgacacccgatctgagagagcggctggaaaacctgagaaagaagcctgaaaatatcccccagcccatcagcaatacatctagagccaacctgaataagctgctgaccgattacaccgaaatgaagaaggcgatcctgcatgtgtactgggaagagttccagaaggaccctgtgggcctgatgagccgggtggcccagcctgccagcaagaagatcgatcagaacaagctgaaacctgagatggacgagaagggcaacctgaccaccgccggctttgcctgctctcagtgtggccagcccctgttcgtgtacaagctggagcaggtgtctgagaagggcaaggcttacaccaactacttcggacggtgcaatgtggccgagcacgaaaagctgatcctgctggcccagctgaagcccgagaaggatagcgacgaagccgtgacatatagcctgggaaagtttgggcagagggccctggatttctacagcattcatgtgaccaaggagtccacccaccccgtgaagcccctggcccagatcgccggaaacagatacgcctccggacctgtgggaaaggccctgagcgacgcatgtatgggcacaatcgcctccttcctgtctaagtaccaggacatcatcatcgaacaccagaaggtggtgaagggcaaccagaagagactggagagcctgcgggagctggccggcaaggaaaacctggaataccctagcgtgaccctgccacctcagcctcacaccaaggagggcgttgatgcctacaacgaagtgatcgcccgggtgcgaatgtgggtgaacctgaacctgtggcagaagctgaagctaagcagagatgatgccaagcctctgctgagactgaagggattcccttcctttcctctggtcgagagacaggccaacgaagtggactggtgggacatggtgtgtaacgtgaagaagctgatcaacgagaaaaaggaggatggcaaggtgttttggcagaatctggctggctacaagagacaggaagccctgagaccatacctgagcagcgaggaagatcggaagaagggaaagaaattcgctcggtaccagctgggcgacctgctgctgcacctggaaaagaagcacggcgaggactggggaaaggtgtacgacgaggcctgggagcggattgacaagaaagtggaaggcctgagcaagcacatcaagctggaagaggaacggagaagcgaggacgcccagagcaaggccgccctgaccgactggctgcgggctaaggccagcttcgtgatcgagggcctgaaggaggccgacaaggacgagttctgcagatgcgagctgaagctgcagaagtggtacggggacctgcggggaaagcccttcgccatcgaagccgagaacagcatcctggacatcagcggcttcagcaagcagtacaactgtgccttcatctggcagaaggacggcgtgaagaagctgaacctgtacctgatcatcaactacttcaagggcggcaagctgcggttcaagaagatcaaacctgaagccttcgaagccaacagattctacaccgtgatcaacaaaaagagcggcgagatcgtgcccatggaggtgaacttcaacttcgacgaccccaacctgatcatcctgcctctggcctttggcaagagacagggcagagaattcatctggaacgacctgctgtccctggaaaccggcagcctgaagctggccaacggaagagtgatcgagaagacactgtacaacagaagaacccggcaggatgagcctgccctgttcgtggccctgaccttcgagcggcgggaggtcctggactcctccaatatcaaaccaatgaacctgatcggcgtggcaagaggcgaaaacatccccgccgtgatcgccctgaccgaccccgagggctgcccactgagccggtttaaggatagcctgggaaacccaacccacatcctgagaatcggcgagagctataaggagaagcagcggaccatccaggccaagaaggaggtggagcagcggagagccggcggctacagccggaagtacgccagcaaagccaagaatctggcagacgatatggtgagaaacaccgctagagatctgctgtactacgccgtgacccaggatgccatgctgatcttcgccaacctgagccggggcttcggccggcagggcaagcggaccttcatggccgagagacagtacacacggatggaggactggctgaccgccaagctggcctacgagggcctgagcaagacctacctgtccaagacactggcccagtacacctccaagacatgcagcaactgtgggtttaccatcaccagcgccgactacgacagggtgctggagaagctgaagaagacagcaacaggctggatgaccacaattaacggcaaggagctgaaggtggagggccagattacctactacaacagatacaagagacagaacgtagtcaaggacctgtccgtcgagctggatagactgagcgaagaatctgtgaacaacgacatctcctcctggacaaagggcagaagcggagaagctctgagcctcctgaagaaaagattctcccatagacccgtgcaggagaagttcgtgtgcctgaactgcggcttcgagacacacgcagccgagcaagccgccctgaacatcgccagatcctggctgttcctgcggagccaggagtacaagaaataccagacaaacaagacaaccggcaacaccgataagagagccttcgtcgagacctggcagtccttttaccggaagaagcttaaggaggtgtggaaacctgccgtgcggtctggcggatctggcggaggctccatggtgagcttcgaggacgtggccgtgctgctgagccaggaggagtgggactgcctgatccccgcccagaggggcctgtacagggacgtgatgctggagacctacggcaacctggtgagcctgggcctgcaggccagcaagcccgacgtgatcagcaggctggagcagggcgacaagccctggaccccccacatcctgaggacccagatcagctggagctggaggcacaagagggagtgctacggcggcccaagcagcggcgcccctcctcccagcggcggcagcccagccggctccccaacctctaccgaggagggcacctctgagtccgccacccccgagagcggccctggcacctccaccgagcccagcgagggcagcgcacccggcagccctgccggcagccccacctccacagaggagggaaccagcaccgagcccagcgaaggcagcgccccaggcaccagcaccgagcctagtgagcaggagattaaacggatcaacaagatcagaagaagacttgtgaaagacagcaacaccaagaaggccggcaagacaggccccatgaaaaccctgctggttagagtgatgacacccgatctgagagagcggctggaaaacctgagaaagaagcctgaaaatatcccccagcccatcagcaatacatctagagccaacctgaataagctgctgaccgattacaccgaaatgaagaaggcgatcctgcatgtgtactgggaagagttccagaaggaccctgtgggcctgatgagccgggtggcccagcctgccagcaagaagatcgatcagaacaagctgaaacctgagatggacgagaagggcaacctgaccaccgccggctttgcctgctctcagtgtggccagcccctgttcgtgtacaagctggagcaggtgtctgagaagggcaaggcttacaccaactacttcggacggtgcaatgtggccgagcacgaaaagctgatcctgctggcccagctgaagcccgagaaggatagcgacgaagccgtgacatatagcctgggaaagtttgggcagagggccctggatttctacagcattcatgtgaccaaggagtccacccaccccgtgaagcccctggcccagatcgccggaaacagatacgcctccggacctgtgggaaaggccctgagcgacgcatgtatgggcacaatcgcctccttcctgtctaagtaccaggacatcatcatcgaacaccagaaggtggtgaagggcaaccagaagagactggagagcctgcgggagctggccggcaaggaaaacctggaataccctagcgtgaccctgccacctcagcctcacaccaaggagggcgttgatgcctacaacgaagtgatcgcccgggtgcgaatgtgggtgaacctgaacctgtggcagaagctgaagctaagcagagatgatgccaagcctctgctgagactgaagggattcccttcctttcctctggtcgagagacaggccaacgaagtggactggtgggacatggtgtgtaacgtgaagaagctgatcaacgagaaaaaggaggatggcaaggtgttttggcagaatctggctggctacaagagacaggaagccctgagaccatacctgagcagcgaggaagatcggaagaagggaaagaaattcgctcggtaccagctgggcgacctgctgctgcacctggaaaagaagcacggcgaggactggggaaaggtgtacgacgaggcctgggagcggattgacaagaaagtggaaggcctgagcaagcacatcaagctggaagaggaacggagaagcgaggacgcccagagcaaggccgccctgaccgactggctgcgggctaaggccagcttcgtgatcgagggcctgaaggaggccgacaaggacgagttctgcagatgcgagctgaagctgcagaagtggtacggggacctgcggggaaagcccttcgccatcgaagccgagaacagcatcctggacatcagcggcttcagcaagcagtacaactgtgccttcatctggcagaaggacggcgtgaagaagctgaacctgtacctgatcatcaactacttcaagggcggcaagctgcggttcaagaagatcaaacctgaagccttcgaagccaacagattctacaccgtgatcaacaaaaagagcggcgagatcgtgcccatggaggtgaacttcaacttcgacgaccccaacctgatcatcctgcctctggcctttggcaagagacagggcagagaattcatctggaacgacctgctgtccctggaaaccggcagcctgaagctggccaacggaagagtgatcgagaagacactgtacaacagaagaacccggcaggatgagcctgccctgttcgtggccctgaccttcgagcggcgggaggtcctggactcctccaatatcaaaccaatgaacctgatcggcgtggcaagaggcgaaaacatccccgccgtgatcgccctgaccgaccccgagggctgcccactgagccggtttaaggatagcctgggaaacccaacccacatcctgagaatcggcgagagctataaggagaagcagcggaccatccaggccaagaaggaggtggagcagcggagagccggcggctacagccggaagtacgccagcaaagccaagaatctggcagacgatatggtgagaaacaccgctagagatctgctgtactacgccgtgacccaggatgccatgctgatcttcgccaacctgagccggggcttcggccggcagggcaagcggaccttcatggccgagagacagtacacacggatggaggactggctgaccgccaagctggcctacgagggcctgagcaagacctacctgtccaagacactggcccagtacacctccaagacatgcagcaactgtgggtttaccatcaccagcgccgactacgacagggtgctggagaagctgaagaagacagcaacaggctggatgaccacaattaacggcaaggagctgaaggtggagggccagattacctactacaacagatacaagagacagaacgtagtcaaggacctgtccgtcgagctggatagactgagcgaagaatctgtgaacaacgacatctcctcctggacaaagggcagaagcggagaagctctgagcctcctgaagaaaagattctcccatagacccgtgcaggagaagttcgtgtgcctgaactgcggcttcgagacacacgcagccgagcaagccgccctgaacatcgccagatcctggctgttcctgcggagccaggagtacaagaaataccagacaaacaagacaaccggcaacaccgataagagagccttcgtcgagacctggcagtccttttaccggaagaagcttaaggaggtgtggaaacctgccgtgcggtctggcggatctggcggaggctcctatggtgagcttcgaggacgtggccgtgctgctgagccaggaggagtgggactgcctgatccccgcccagaggggcctgtacagggacgtgatgctggagacctacggcaacctggtgagcctgggcctgcaggccagcaagcccgacgtgatcagcaggctggagcagggcgacaagccctggaccccccacatcctgaggacccagatcagctggagctggaggcacaagagggagtgctacggatctggctccggcagcggccccaagaaaaagagaaaagtctaagctgccttctgcggggcttgccttctggccatgcccttcttctctcccttgcacctgtacctcttggtctttgaataaagcctgagtaggaaggctagcaaaaaaaaaaaaaaaaaaaaaaaaaaaaaaaaaaaaaaaaaaaaaaaaaaaaaaaaaaaaaaaaaaaaaaaaaaaaaaaa

SEQ ID NO: 15541 - RNA, 9485 nt, synthetic construct
  source 1..9485: mol_type = other RNA
aggaaataagagagaaaagaagagtaagaagaaatataagagccaccatggcccctaagaagaagcgtaaagtgagccggatggaacgcctcgtctacgaggtgcggcagaagtgcagaaacatcgaggacatctgcatctcctgcggatctctgaacgtgaccctggagcacccactgttcatcggcggcatgtgccagaactgtaaaaactgttttctggagtgtgcctatcaatacgacgatgacggctaccagagctactgcaccatctgttgcggcggaagagaggtgctgatgtgtggaaataacaactgctgccggtgcttctgcgtggaatgcgtggacctgctggtgggccccggcgccgcccaggccgctattaaggaagatccttggaactgctacatgtgcggccacaagggcacatacggcctgctgagacggagagaggactggcctagcagactgcagatgttcttcgccaataaccacgaccaggagttcgacccccctaaggtgtaccctcccgtccccgccgagaagagaaagcccatccgggtcctgagcctgttcgatggcatcgccaccggtctgctggtgctgaaggacctgggcatccaggtggataggtacattgcctccgaggtgtgcgaggactccatcaccgtgggaatggtgcgtcatcagggcaagatcatgtacgtgggcgacgtgcggagcgtgacacagaagcatatccaggagtggggccctttcgacctggtgatcggcggcagcccttgcaatgacctgagcatcgtgaacccagcccggaagggcctgtacgagggaaccggcagactgttcttcgagttttacagactgctgcacgacgcccggcctaaggaaggcgacgaccggcccttcttttggctgttcgagaatgtggtggccatgggagtcagcgacaagcgggatattagccggttcctggagagcaaccccgtgatgatcgatgccaaggaagtgagcgccgcccaccgggccagatacttctggggcaatctgcctggcatgaacagacccctggccagcaccgtgaacgacaagctggagctgcaggagtgcctggagcacggccggatcgccaagttcagcaaggtgagaaccatcaccacccgaagcaacagcatcaaacaaggcaaggaccagcactttcctgtgttcatgaacgagaaggaggacatcctgtggtgtaccgagatggagagagtgttcgggttcccagtccactacacagatgtcagcaacatgtctagactggccagacagagactgctgggaagaagctggtccgtccctgtgatcagacacctgttcgcccctctgaaggagtacttcgcctgcgtgagcagcggcaacagcaacgccaacagccggggccccagcttctctagcggcctggtgccactgtccctgagagggagccacatgggccccatggagatctacaaaaccgtgagcgcctggaagcggcagcctgtgcgcgtgctgagcctgtttcggaatatcgataaagtcctgaaaagcctgggattcctggagagcggctctggctccggcggtggcaccctgaagtacgtggaggatgtgacaaacgtggtcagacgggatgtggagaagtggggccccttcgatctggtgtacggcagcacccaacccctgggcagctcttgtgaccggtgccctggctggtacatgtttcagttccaccggatcctgcagtacgccctgccgagacaggagtcccagcggccattcttttggattttcatggacaacttgctgctgaccgaggatgaccaggaaactaccactcggttcctgcagaccgaagccgtgaccctgcaggacgtgagaggccgggactaccagaacgccatgcgggtgtggtccaacatccctggactgaaaagcaagcacgcacctctgacccctaaagaagaggagtacctgcaggcccaggtgcggagcagaagcaagctggacgcccctaaggtggatctgctggtgaagaattgcctcctgcccctgagagagtacttcaagtatttcagccagaatagtctgcccctgggaggcagcggcggcggcgccctggtgacatttgaggacgtcgccgtgcggttcacccaggaggaatgggctctgctggatccttctcagaaaatcctgtaccgggacgtgatgagagagacataccggaatctgacctccgtgggcatcaactgggaatgttgggaccttgaagcctgcttcagaagcctgggaagaaacctgagagtgcaggtggtgaagagaaagtgcgagctgaccaacagcggcccctgcgccgagggcggcccaagcagcggcgcccctcctcccagcggcggcagcccagccggctccccaacctctaccgaggagggcacctctgagtccgccacccccgagagcggccctggcacctccaccgagcccagcgagggcagcgcacccggcagccctgccggcagccccacctccacagaggagggaaccagcaccgagcccagcgaaggcagcgccccaggcaccagcaccgagcctagtgagcaggagattaaacggatcaacaagatcagaagaagacttgtgaaagacagcaacaccaagaaggccggcaagacaggccccatgaaaaccctgctggttagagtgatgacacccgatctgagagagcggctggaaaacctgagaaagaagcctgaaaatatcccccagcccatcagcaatacatctagagccaacctgaataagctgctgaccgattacaccgaaatgaagaaggcgatcctgcatgtgtactgggaagagttccagaaggaccctgtgggcctgatgagccgggtggcccagcctgccagcaagaagatcgatcagaacaagctgaaacctgagatggacgagaagggcaacctgaccaccgccggctttgcctgctctcagtgtggccagcccctgttcgtgtacaagctggagcaggtgtctgagaagggcaaggcttacaccaactacttcggacggtgcaatgtggccgagcacgaaaagctgatcctgctggcccagctgaagcccgagaaggatagcgacgaagccgtgacatatagcctgggaaagtttgggcagagggccctggatttctacagcattcatgtgaccaaggagtccacccaccccgtgaagcccctggcccagatcgccggaaacagatacgcctccggacctgtgggaaaggccctgagcgacgcatgtatgggcacaatcgcctccttcctgtctaagtaccaggacatcatcatcgaacaccagaaggtggtgaagggcaaccagaagagactggagagcctgcgggagctggccggcaaggaaaacctggaataccctagcgtgaccctgccacctcagcctcacaccaaggagggcgttgatgcctacaacgaagtgatcgcccgggtgcgaatgtgggtgaacctgaacctgtggcagaagctgaagctaagcagagatgatgccaagcctctgctgagactgaagggattcccttcctttcctctggtcgagagacaggccaacgaagtggactggtgggacatggtgtgtaacgtgaagaagctgatcaacgagaaaaaggaggatggcaaggtgttttggcagaatctggctggctacaagagacaggaagccctgagaccatacctgagcagcgaggaagatcggaagaagggaaagaaattcgctcggtaccagctgggcgacctgctgctgcacctggaaaagaagcacggcgaggactggggaaaggtgtacgacgaggcctgggagcggattgacaagaaagtggaaggcctgagcaagcacatcaagctggaagaggaacggagaagcgaggacgcccagagcaaggccgccctgaccgactggctgcgggctaaggccagcttcgtgatcgagggcctgaaggaggccgacaaggacgagttctgcagatgcgagctgaagctgcagaagtggtacggggacctgcggggaaagcccttcgccatcgaagccgagaacagcatcctggacatcagcggcttcagcaagcagtacaactgtgccttcatctggcagaaggacggcgtgaagaagctgaacctgtacctgatcatcaactacttcaagggcggcaagctgcggttcaagaagatcaaacctgaagccttcgaagccaacagattctacaccgtgatcaacaaaaagagcggcgagatcgtgcccatggaggtgaacttcaacttcgacgaccccaacctgatcatcctgcctctggcctttggcaagagacagggcagagaattcatctggaacgacctgctgtccctggaaaccggcagcctgaagctggccaacggaagagtgatcgagaagacactgtacaacagaagaacccggcaggatgagcctgccctgttcgtggccctgaccttcgagcggcgggaggtcctggactcctccaatatcaaaccaatgaacctgatcggcgtggcaagaggcgaaaacatccccgccgtgatcgccctgaccgaccccgagggctgcccactgagccggtttaaggatagcctgggaaacccaacccacatcctgagaatcggcgagagctataaggagaagcagcggaccatccaggccaagaaggaggtggagcagcggagagccggcggctacagccggaagtacgccagcaaagccaagaatctggcagacgatatggtgagaaacaccgctagagatctgctgtactacgccgtgacccaggatgccatgctgatcttcgccaacctgagccggggcttcggccggcagggcaagcggaccttcatggccgagagacagtacacacggatggaggactggctgaccgccaagctggcctacgagggcctgagcaagacctacctgtccaagacactggcccagtacacctccaagacatgcagcaactgtgggtttaccatcaccagcgccgactacgacagggtgctggagaagctgaagaagacagcaacaggctggatgaccacaattaacggcaaggagctgaaggtggagggccagattacctactacaacagatacaagagacagaacgtagtcaaggacctgtccgtcgagctggatagactgagcgaagaatctgtgaacaacgacatctcctcctggacaaagggcagaagcggagaagctctgagcctcctgaagaaaagattctcccatagacccgtgcaggagaagttcgtgtgcctgaactgcggcttcgagacacacgcagccgagcaagccgccctgaacatcgccagatcctggctgttcctgcggagccaggagtacaagaaataccagacaaacaagacaaccggcaacaccgataagagagccttcgtcgagacctggcagtccttttaccggaagaagcttaaggaggtgtggaaacctgccgtgcggtctggcggatctggcggaggctccgcccagggcagcgtggtgttcagcgacgtgagcgtggacttcagccaggaggagtgggagtgcctggacagcggccagagggacctgtacagggacgtgatgctggagaactacagcaacctgctgagcatgggcttctacatccccaagccccccgtgatcagcctgctggagcagggcaaggagccctggatggtgggcagggagctgaccaagggcctgtgcagcgacctggagagcatgggcggcccaagcagcggcgcccctcctcccagcggcggcagcccagccggctccccaacctctaccgaggagggcacctctgagtccgccacccccgagagcggccctggcacctccaccgagcccagcgagggcagcgcacccggcagccctgccggcagccccacctccacagaggagggaaccagcaccgagcccagcgaaggcagcgccccaggcaccagcaccgagcctagtgagcaggagattaaacggatcaacaagatcagaagaagacttgtgaaagacagcaacaccaagaaggccggcaagacaggccccatgaaaaccctgctggttagagtgatgacacccgatctgagagagcggctggaaaacctgagaaagaagcctgaaaatatcccccagcccatcagcaatacatctagagccaacctgaataagctgctgaccgattacaccgaaatgaagaaggcgatcctgcatgtgtactgggaagagttccagaaggaccctgtgggcctgatgagccgggtggcccagcctgccagcaagaagatcgatcagaacaagctgaaacctgagatggacgagaagggcaacctgaccaccgccggctttgcctgctctcagtgtggccagcccctgttcgtgtacaagctggagcaggtgtctgagaagggcaaggcttacaccaactacttcggacggtgcaatgtggccgagcacgaaaagctgatcctgctggcccagctgaagcccgagaaggatagcgacgaagccgtgacatatagcctgggaaagtttgggcagagggccctggatttctacagcattcatgtgaccaaggagtccacccaccccgtgaagcccctggcccagatcgccggaaacagatacgcctccggacctgtgggaaaggccctgagcgacgcatgtatgggcacaatcgcctccttcctgtctaagtaccaggacatcatcatcgaacaccagaaggtggtgaagggcaaccagaagagactggagagcctgcgggagctggccggcaaggaaaacctggaataccctagcgtgaccctgccacctcagcctcacaccaaggagggcgttgatgcctacaacgaagtgatcgcccgggtgcgaatgtgggtgaacctgaacctgtggcagaagctgaagctaagcagagatgatgccaagcctctgctgagactgaagggattcccttcctttcctctggtcgagagacaggccaacgaagtggactggtgggacatggtgtgtaacgtgaagaagctgatcaacgagaaaaaggaggatggcaaggtgttttggcagaatctggctggctacaagagacaggaagccctgagaccatacctgagcagcgaggaagatcggaagaagggaaagaaattcgctcggtaccagctgggcgacctgctgctgcacctggaaaagaagcacggcgaggactggggaaaggtgtacgacgaggcctgggagcggattgacaagaaagtggaaggcctgagcaagcacatcaagctggaagaggaacggagaagcgaggacgcccagagcaaggccgccctgaccgactggctgcgggctaaggccagcttcgtgatcgagggcctgaaggaggccgacaaggacgagttctgcagatgcgagctgaagctgcagaagtggtacggggacctgcggggaaagcccttcgccatcgaagccgagaacagcatcctggacatcagcggcttcagcaagcagtacaactgtgccttcatctggcagaaggacggcgtgaagaagctgaacctgtacctgatcatcaactacttcaagggcggcaagctgcggttcaagaagatcaaacctgaagccttcgaagccaacagattctacaccgtgatcaacaaaaagagcggcgagatcgtgcccatggaggtgaacttcaacttcgacgaccccaacctgatcatcctgcctctggcctttggcaagagacagggcagagaattcatctggaacgacctgctgtccctggaaaccggcagcctgaagctggccaacggaagagtgatcgagaagacactgtacaacagaagaacccggcaggatgagcctgccctgttcgtggccctgaccttcgagcggcgggaggtcctggactcctccaatatcaaaccaatgaacctgatcggcgtggcaagaggcgaaaacatccccgccgtgatcgccctgaccgaccccgagggctgcccactgagccggtttaaggatagcctgggaaacccaacccacatcctgagaatcggcgagagctataaggagaagcagcggaccatccaggccaagaaggaggtggagcagcggagagccggcggctacagccggaagtacgccagcaaagccaagaatctggcagacgatatggtgagaaacaccgctagagatctgctgtactacgccgtgacccaggatgccatgctgatcttcgccaacctgagccggggcttcggccggcagggcaagcggaccttcatggccgagagacagtacacacggatggaggactggctgaccgccaagctggcctacgagggcctgagcaagacctacctgtccaagacactggcccagtacacctccaagacatgcagcaactgtgggtttaccatcaccagcgccgactacgacagggtgctggagaagctgaagaagacagcaacaggctggatgaccacaattaacggcaaggagctgaaggtggagggccagattacctactacaacagatacaagagacagaacgtagtcaaggacctgtccgtcgagctggatagactgagcgaagaatctgtgaacaacgacatctcctcctggacaaagggcagaagcggagaagctctgagcctcctgaagaaaagattctcccatagacccgtgcaggagaagttcgtgtgcctgaactgcggcttcgagacacacgcagccgagcaagccgccctgaacatcgccagatcctggctgttcctgcggagccaggagtacaagaaataccagacaaacaagacaaccggcaacaccgataagagagccttcgtcgagacctggcagtccttttaccggaagaagcttaaggaggtgtggaaacctgccgtgcggtctggcggatctggcggaggctcctgcccagggcagcgtggtgttcagcgacgtgagcgtggacttcagccaggaggagtgggagtgcctggacagcggccagagggacctgtacagggacgtgatgctggagaactacagcaacctgctgagcatgggcttctacatccccaagccccccgtgatcagcctgctggagcagggcaaggagccctggatggtgggcagggagctgaccaagggcctgtgcagcgacctggagagcatgggatctggctccggcagcggccccaagaaaaagagaaaagtctaagctgccttctgcggggcttgccttctggccatgcccttcttctctcccttgcacctgtacctcttggtctttgaataaagcctgagtaggaaggctagcaaaaaaaaaaaaaaaaaaaaaaaaaaaaaaaaaaaaaaaaaaaaaaaaaaaaaaaaaaaaaaaaaaaaaaaaaaaaaaaa

SEQ ID NO: 15542 - RNA, 9485 nt, synthetic construct
  source 1..9485: mol_type = other RNA
aggaaataagagagaaaagaagagtaagaagaaatataagagccaccatggcccctaagaagaagcgtaaagtgagccggatggaacgcctcgtctacgaggtgcggcagaagtgcagaaacatcgaggacatctgcatctcctgcggatctctgaacgtgaccctggagcacccactgttcatcggcggcatgtgccagaactgtaaaaactgttttctggagtgtgcctatcaatacgacgatgacggctaccagagctactgcaccatctgttgcggcggaagagaggtgctgatgtgtggaaataacaactgctgccggtgcttctgcgtggaatgcgtggacctgctggtgggccccggcgccgcccaggccgctattaaggaagatccttggaactgctacatgtgcggccacaagggcacatacggcctgctgagacggagagaggactggcctagcagactgcagatgttcttcgccaataaccacgaccaggagttcgacccccctaaggtgtaccctcccgtccccgccgagaagagaaagcccatccgggtcctgagcctgttcgatggcatcgccaccggtctgctggtgctgaaggacctgggcatccaggtggataggtacattgcctccgaggtgtgcgaggactccatcaccgtgggaatggtgcgtcatcagggcaagatcatgtacgtgggcgacgtgcggagcgtgacacagaagcatatccaggagtggggccctttcgacctggtgatcggcggcagcccttgcaatgacctgagcatcgtgaacccagcccggaagggcctgtacgagggaaccggcagactgttcttcgagttttacagactgctgcacgacgcccggcctaaggaaggcgacgaccggcccttcttttggctgttcgagaatgtggtggccatgggagtcagcgacaagcgggatattagccggttcctggagagcaaccccgtgatgatcgatgccaaggaagtgagcgccgcccaccgggccagatacttctggggcaatctgcctggcatgaacagacccctggccagcaccgtgaacgacaagctggagctgcaggagtgcctggagcacggccggatcgccaagttcagcaaggtgagaaccatcaccacccgaagcaacagcatcaaacaaggcaaggaccagcactttcctgtgttcatgaacgagaaggaggacatcctgtggtgtaccgagatggagagagtgttcgggttcccagtccactacacagatgtcagcaacatgtctagactggccagacagagactgctgggaagaagctggtccgtccctgtgatcagacacctgttcgcccctctgaaggagtacttcgcctgcgtgagcagcggcaacagcaacgccaacagccggggccccagcttctctagcggcctggtgccactgtccctgagagggagccacatgggccccatggagatctacaaaaccgtgagcgcctggaagcggcagcctgtgcgcgtgctgagcctgtttcggaatatcgataaagtcctgaaaagcctgggattcctggagagcggctctggctccggcggtggcaccctgaagtacgtggaggatgtgacaaacgtggtcagacgggatgtggagaagtggggccccttcgatctggtgtacggcagcacccaacccctgggcagctcttgtgaccggtgccctggctggtacatgtttcagttccaccggatcctgcagtacgccctgccgagacaggagtcccagcggccattcttttggattttcatggacaacttgctgctgaccgaggatgaccaggaaactaccactcggttcctgcagaccgaagccgtgaccctgcaggacgtgagaggccgggactaccagaacgccatgcgggtgtggtccaacatccctggactgaaaagcaagcacgcacctctgacccctaaagaagaggagtacctgcaggcccaggtgcggagcagaagcaagctggacgcccctaaggtggatctgctggtgaagaattgcctcctgcccctgagagagtacttcaagtatttcagccagaatagtctgcccctgggaggcagcggcggcggcgccctggtgacatttgaggacgtcgccgtgcggttcacccaggaggaatgggctctgctggatccttctcagaaaatcctgtaccgggacgtgatgagagagacataccggaatctgacctccgtgggcatcaactgggaatgttgggaccttgaagcctgcttcagaagcctgggaagaaacctgagagtgcaggtggtgaagagaaagtgcgagctgaccaacagcggcccctgcgccgagggcggcccaagcagcggcgcccctcctcccagcggcggcagcccagccggctccccaacctctaccgaggagggcacctctgagtccgccacccccgagagcggccctggcacctccaccgagcccagcgagggcagcgcacccggcagccctgccggcagccccacctccacagaggagggaaccagcaccgagcccagcgaaggcagcgccccaggcaccagcaccgagcctagtgagcaggagattaaacggatcaacaagatcagaagaagacttgtgaaagacagcaacaccaagaaggccggcaagacaggccccatgaaaaccctgctggttagagtgatgacacccgatctgagagagcggctggaaaacctgagaaagaagcctgaaaatatcccccagcccatcagcaatacatctagagccaacctgaataagctgctgaccgattacaccgaaatgaagaaggcgatcctgcatgtgtactgggaagagttccagaaggaccctgtgggcctgatgagccgggtggcccagcctgccagcaagaagatcgatcagaacaagctgaaacctgagatggacgagaagggcaacctgaccaccgccggctttgcctgctctcagtgtggccagcccctgttcgtgtacaagctggagcaggtgtctgagaagggcaaggcttacaccaactacttcggacggtgcaatgtggccgagcacgaaaagctgatcctgctggcccagctgaagcccgagaaggatagcgacgaagccgtgacatatagcctgggaaagtttgggcagagggccctggatttctacagcattcatgtgaccaaggagtccacccaccccgtgaagcccctggcccagatcgccggaaacagatacgcctccggacctgtgggaaaggccctgagcgacgcatgtatgggcacaatcgcctccttcctgtctaagtaccaggacatcatcatcgaacaccagaaggtggtgaagggcaaccagaagagactggagagcctgcgggagctggccggcaaggaaaacctggaataccctagcgtgaccctgccacctcagcctcacaccaaggagggcgttgatgcctacaacgaagtgatcgcccgggtgcgaatgtgggtgaacctgaacctgtggcagaagctgaagctaagcagagatgatgccaagcctctgctgagactgaagggattcccttcctttcctctggtcgagagacaggccaacgaagtggactggtgggacatggtgtgtaacgtgaagaagctgatcaacgagaaaaaggaggatggcaaggtgttttggcagaatctggctggctacaagagacaggaagccctgagaccatacctgagcagcgaggaagatcggaagaagggaaagaaattcgctcggtaccagctgggcgacctgctgctgcacctggaaaagaagcacggcgaggactggggaaaggtgtacgacgaggcctgggagcggattgacaagaaagtggaaggcctgagcaagcacatcaagctggaagaggaacggagaagcgaggacgcccagagcaaggccgccctgaccgactggctgcgggctaaggccagcttcgtgatcgagggcctgaaggaggccgacaaggacgagttctgcagatgcgagctgaagctgcagaagtggtacggggacctgcggggaaagcccttcgccatcgaagccgagaacagcatcctggacatcagcggcttcagcaagcagtacaactgtgccttcatctggcagaaggacggcgtgaagaagctgaacctgtacctgatcatcaactacttcaagggcggcaagctgcggttcaagaagatcaaacctgaagccttcgaagccaacagattctacaccgtgatcaacaaaaagagcggcgagatcgtgcccatggaggtgaacttcaacttcgacgaccccaacctgatcatcctgcctctggcctttggcaagagacagggcagagaattcatctggaacgacctgctgtccctggaaaccggcagcctgaagctggccaacggaagagtgatcgagaagacactgtacaacagaagaacccggcaggatgagcctgccctgttcgtggccctgaccttcgagcggcgggaggtcctggactcctccaatatcaaaccaatgaacctgatcggcgtggcaagaggcgaaaacatccccgccgtgatcgccctgaccgaccccgagggctgcccactgagccggtttaaggatagcctgggaaacccaacccacatcctgagaatcggcgagagctataaggagaagcagcggaccatccaggccaagaaggaggtggagcagcggagagccggcggctacagccggaagtacgccagcaaagccaagaatctggcagacgatatggtgagaaacaccgctagagatctgctgtactacgccgtgacccaggatgccatgctgatcttcgccaacctgagccggggcttcggccggcagggcaagcggaccttcatggccgagagacagtacacacggatggaggactggctgaccgccaagctggcctacgagggcctgagcaagacctacctgtccaagacactggcccagtacacctccaagacatgcagcaactgtgggtttaccatcaccagcgccgactacgacagggtgctggagaagctgaagaagacagcaacaggctggatgaccacaattaacggcaaggagctgaaggtggagggccagattacctactacaacagatacaagagacagaacgtagtcaaggacctgtccgtcgagctggatagactgagcgaagaatctgtgaacaacgacatctcctcctggacaaagggcagaagcggagaagctctgagcctcctgaagaaaagattctcccatagacccgtgcaggagaagttcgtgtgcctgaactgcggcttcgagacacacgcagccgagcaagccgccctgaacatcgccagatcctggctgttcctgcggagccaggagtacaagaaataccagacaaacaagacaaccggcaacaccgataagagagccttcgtcgagacctggcagtccttttaccggaagaagcttaaggaggtgtggaaacctgccgtgcggtctggcggatctggcggaggctccagcaaggccagcgtgaccttcgccgacctggccgtgtacttcagccaggaggagtgggagggcctgagccccatccagaaggacctgtacgaggacgtgatgctggagacctaccagaacctggtgagcgtgggcctgagctgcaggaggcccagcgtgatcaccctgctggagaagggcaaggccccctggaccgtggagcccgccaggcagaggaggggccccgacagcggcgccaagtgcggcggcccaagcagcggcgcccctcctcccagcggcggcagcccagccggctccccaacctctaccgaggagggcacctctgagtccgccacccccgagagcggccctggcacctccaccgagcccagcgagggcagcgcacccggcagccctgccggcagccccacctccacagaggagggaaccagcaccgagcccagcgaaggcagcgccccaggcaccagcaccgagcctagtgagcaggagattaaacggatcaacaagatcagaagaagacttgtgaaagacagcaacaccaagaaggccggcaagacaggccccatgaaaaccctgctggttagagtgatgacacccgatctgagagagcggctggaaaacctgagaaagaagcctgaaaatatcccccagcccatcagcaatacatctagagccaacctgaataagctgctgaccgattacaccgaaatgaagaaggcgatcctgcatgtgtactgggaagagttccagaaggaccctgtgggcctgatgagccgggtggcccagcctgccagcaagaagatcgatcagaacaagctgaaacctgagatggacgagaagggcaacctgaccaccgccggctttgcctgctctcagtgtggccagcccctgttcgtgtacaagctggagcaggtgtctgagaagggcaaggcttacaccaactacttcggacggtgcaatgtggccgagcacgaaaagctgatcctgctggcccagctgaagcccgagaaggatagcgacgaagccgtgacatatagcctgggaaagtttgggcagagggccctggatttctacagcattcatgtgaccaaggagtccacccaccccgtgaagcccctggcccagatcgccggaaacagatacgcctccggacctgtgggaaaggccctgagcgacgcatgtatgggcacaatcgcctccttcctgtctaagtaccaggacatcatcatcgaacaccagaaggtggtgaagggcaaccagaagagactggagagcctgcgggagctggccggcaaggaaaacctggaataccctagcgtgaccctgccacctcagcctcacaccaaggagggcgttgatgcctacaacgaagtgatcgcccgggtgcgaatgtgggtgaacctgaacctgtggcagaagctgaagctaagcagagatgatgccaagcctctgctgagactgaagggattcccttcctttcctctggtcgagagacaggccaacgaagtggactggtgggacatggtgtgtaacgtgaagaagctgatcaacgagaaaaaggaggatggcaaggtgttttggcagaatctggctggctacaagagacaggaagccctgagaccatacctgagcagcgaggaagatcggaagaagggaaagaaattcgctcggtaccagctgggcgacctgctgctgcacctggaaaagaagcacggcgaggactggggaaaggtgtacgacgaggcctgggagcggattgacaagaaagtggaaggcctgagcaagcacatcaagctggaagaggaacggagaagcgaggacgcccagagcaaggccgccctgaccgactggctgcgggctaaggccagcttcgtgatcgagggcctgaaggaggccgacaaggacgagttctgcagatgcgagctgaagctgcagaagtggtacggggacctgcggggaaagcccttcgccatcgaagccgagaacagcatcctggacatcagcggcttcagcaagcagtacaactgtgccttcatctggcagaaggacggcgtgaagaagctgaacctgtacctgatcatcaactacttcaagggcggcaagctgcggttcaagaagatcaaacctgaagccttcgaagccaacagattctacaccgtgatcaacaaaaagagcggcgagatcgtgcccatggaggtgaacttcaacttcgacgaccccaacctgatcatcctgcctctggcctttggcaagagacagggcagagaattcatctggaacgacctgctgtccctggaaaccggcagcctgaagctggccaacggaagagtgatcgagaagacactgtacaacagaagaacccggcaggatgagcctgccctgttcgtggccctgaccttcgagcggcgggaggtcctggactcctccaatatcaaaccaatgaacctgatcggcgtggcaagaggcgaaaacatccccgccgtgatcgccctgaccgaccccgagggctgcccactgagccggtttaaggatagcctgggaaacccaacccacatcctgagaatcggcgagagctataaggagaagcagcggaccatccaggccaagaaggaggtggagcagcggagagccggcggctacagccggaagtacgccagcaaagccaagaatctggcagacgatatggtgagaaacaccgctagagatctgctgtactacgccgtgacccaggatgccatgctgatcttcgccaacctgagccggggcttcggccggcagggcaagcggaccttcatggccgagagacagtacacacggatggaggactggctgaccgccaagctggcctacgagggcctgagcaagacctacctgtccaagacactggcccagtacacctccaagacatgcagcaactgtgggtttaccatcaccagcgccgactacgacagggtgctggagaagctgaagaagacagcaacaggctggatgaccacaattaacggcaaggagctgaaggtggagggccagattacctactacaacagatacaagagacagaacgtagtcaaggacctgtccgtcgagctggatagactgagcgaagaatctgtgaacaacgacatctcctcctggacaaagggcagaagcggagaagctctgagcctcctgaagaaaagattctcccatagacccgtgcaggagaagttcgtgtgcctgaactgcggcttcgagacacacgcagccgagcaagccgccctgaacatcgccagatcctggctgttcctgcggagccaggagtacaagaaataccagacaaacaagacaaccggcaacaccgataagagagccttcgtcgagacctggcagtccttttaccggaagaagcttaaggaggtgtggaaacctgccgtgcggtctggcggatctggcggaggctcctagcaaggccagcgtgaccttcgccgacctggccgtgtacttcagccaggaggagtgggagggcctgagccccatccagaaggacctgtacgaggacgtgatgctggagacctaccagaacctggtgagcgtgggcctgagctgcaggaggcccagcgtgatcaccctgctggagaagggcaaggccccctggaccgtggagcccgccaggcagaggaggggccccgacagcggcgccaagtgcggatctggctccggcagcggccccaagaaaaagagaaaagtctaagctgccttctgcggggcttgccttctggccatgcccttcttctctcccttgcacctgtacctcttggtctttgaataaagcctgagtaggaaggctagcaaaaaaaaaaaaaaaaaaaaaaaaaaaaaaaaaaaaaaaaaaaaaaaaaaaaaaaaaaaaaaaaaaaaaaaaaaaaaaaa

SEQ ID NO: 15543 - RNA, 9485 nt, synthetic construct
  source 1..9485: mol_type = other RNA
aggaaataagagagaaaagaagagtaagaagaaatataagagccaccatggcccctaagaagaagcgtaaagtgagccggatggaacgcctcgtctacgaggtgcggcagaagtgcagaaacatcgaggacatctgcatctcctgcggatctctgaacgtgaccctggagcacccactgttcatcggcggcatgtgccagaactgtaaaaactgttttctggagtgtgcctatcaatacgacgatgacggctaccagagctactgcaccatctgttgcggcggaagagaggtgctgatgtgtggaaataacaactgctgccggtgcttctgcgtggaatgcgtggacctgctggtgggccccggcgccgcccaggccgctattaaggaagatccttggaactgctacatgtgcggccacaagggcacatacggcctgctgagacggagagaggactggcctagcagactgcagatgttcttcgccaataaccacgaccaggagttcgacccccctaaggtgtaccctcccgtccccgccgagaagagaaagcccatccgggtcctgagcctgttcgatggcatcgccaccggtctgctggtgctgaaggacctgggcatccaggtggataggtacattgcctccgaggtgtgcgaggactccatcaccgtgggaatggtgcgtcatcagggcaagatcatgtacgtgggcgacgtgcggagcgtgacacagaagcatatccaggagtggggccctttcgacctggtgatcggcggcagcccttgcaatgacctgagcatcgtgaacccagcccggaagggcctgtacgagggaaccggcagactgttcttcgagttttacagactgctgcacgacgcccggcctaaggaaggcgacgaccggcccttcttttggctgttcgagaatgtggtggccatgggagtcagcgacaagcgggatattagccggttcctggagagcaaccccgtgatgatcgatgccaaggaagtgagcgccgcccaccgggccagatacttctggggcaatctgcctggcatgaacagacccctggccagcaccgtgaacgacaagctggagctgcaggagtgcctggagcacggccggatcgccaagttcagcaaggtgagaaccatcaccacccgaagcaacagcatcaaacaaggcaaggaccagcactttcctgtgttcatgaacgagaaggaggacatcctgtggtgtaccgagatggagagagtgttcgggttcccagtccactacacagatgtcagcaacatgtctagactggccagacagagactgctgggaagaagctggtccgtccctgtgatcagacacctgttcgcccctctgaaggagtacttcgcctgcgtgagcagcggcaacagcaacgccaacagccggggccccagcttctctagcggcctggtgccactgtccctgagagggagccacatgggccccatggagatctacaaaaccgtgagcgcctggaagcggcagcctgtgcgcgtgctgagcctgtttcggaatatcgataaagtcctgaaaagcctgggattcctggagagcggctctggctccggcggtggcaccctgaagtacgtggaggatgtgacaaacgtggtcagacgggatgtggagaagtggggccccttcgatctggtgtacggcagcacccaacccctgggcagctcttgtgaccggtgccctggctggtacatgtttcagttccaccggatcctgcagtacgccctgccgagacaggagtcccagcggccattcttttggattttcatggacaacttgctgctgaccgaggatgaccaggaaactaccactcggttcctgcagaccgaagccgtgaccctgcaggacgtgagaggccgggactaccagaacgccatgcgggtgtggtccaacatccctggactgaaaagcaagcacgcacctctgacccctaaagaagaggagtacctgcaggcccaggtgcggagcagaagcaagctggacgcccctaaggtggatctgctggtgaagaattgcctcctgcccctgagagagtacttcaagtatttcagccagaatagtctgcccctgggaggcagcggcggcggcgccctggtgacatttgaggacgtcgccgtgcggttcacccaggaggaatgggctctgctggatccttctcagaaaatcctgtaccgggacgtgatgagagagacataccggaatctgacctccgtgggcatcaactgggaatgttgggaccttgaagcctgcttcagaagcctgggaagaaacctgagagtgcaggtggtgaagagaaagtgcgagctgaccaacagcggcccctgcgccgagggcggcccaagcagcggcgcccctcctcccagcggcggcagcccagccggctccccaacctctaccgaggagggcacctctgagtccgccacccccgagagcggccctggcacctccaccgagcccagcgagggcagcgcacccggcagccctgccggcagccccacctccacagaggagggaaccagcaccgagcccagcgaaggcagcgccccaggcaccagcaccgagcctagtgagcaggagattaaacggatcaacaagatcagaagaagacttgtgaaagacagcaacaccaagaaggccggcaagacaggccccatgaaaaccctgctggttagagtgatgacacccgatctgagagagcggctggaaaacctgagaaagaagcctgaaaatatcccccagcccatcagcaatacatctagagccaacctgaataagctgctgaccgattacaccgaaatgaagaaggcgatcctgcatgtgtactgggaagagttccagaaggaccctgtgggcctgatgagccgggtggcccagcctgccagcaagaagatcgatcagaacaagctgaaacctgagatggacgagaagggcaacctgaccaccgccggctttgcctgctctcagtgtggccagcccctgttcgtgtacaagctggagcaggtgtctgagaagggcaaggcttacaccaactacttcggacggtgcaatgtggccgagcacgaaaagctgatcctgctggcccagctgaagcccgagaaggatagcgacgaagccgtgacatatagcctgggaaagtttgggcagagggccctggatttctacagcattcatgtgaccaaggagtccacccaccccgtgaagcccctggcccagatcgccggaaacagatacgcctccggacctgtgggaaaggccctgagcgacgcatgtatgggcacaatcgcctccttcctgtctaagtaccaggacatcatcatcgaacaccagaaggtggtgaagggcaaccagaagagactggagagcctgcgggagctggccggcaaggaaaacctggaataccctagcgtgaccctgccacctcagcctcacaccaaggagggcgttgatgcctacaacgaagtgatcgcccgggtgcgaatgtgggtgaacctgaacctgtggcagaagctgaagctaagcagagatgatgccaagcctctgctgagactgaagggattcccttcctttcctctggtcgagagacaggccaacgaagtggactggtgggacatggtgtgtaacgtgaagaagctgatcaacgagaaaaaggaggatggcaaggtgttttggcagaatctggctggctacaagagacaggaagccctgagaccatacctgagcagcgaggaagatcggaagaagggaaagaaattcgctcggtaccagctgggcgacctgctgctgcacctggaaaagaagcacggcgaggactggggaaaggtgtacgacgaggcctgggagcggattgacaagaaagtggaaggcctgagcaagcacatcaagctggaagaggaacggagaagcgaggacgcccagagcaaggccgccctgaccgactggctgcgggctaaggccagcttcgtgatcgagggcctgaaggaggccgacaaggacgagttctgcagatgcgagctgaagctgcagaagtggtacggggacctgcggggaaagcccttcgccatcgaagccgagaacagcatcctggacatcagcggcttcagcaagcagtacaactgtgccttcatctggcagaaggacggcgtgaagaagctgaacctgtacctgatcatcaactacttcaagggcggcaagctgcggttcaagaagatcaaacctgaagccttcgaagccaacagattctacaccgtgatcaacaaaaagagcggcgagatcgtgcccatggaggtgaacttcaacttcgacgaccccaacctgatcatcctgcctctggcctttggcaagagacagggcagagaattcatctggaacgacctgctgtccctggaaaccggcagcctgaagctggccaacggaagagtgatcgagaagacactgtacaacagaagaacccggcaggatgagcctgccctgttcgtggccctgaccttcgagcggcgggaggtcctggactcctccaatatcaaaccaatgaacctgatcggcgtggcaagaggcgaaaacatccccgccgtgatcgccctgaccgaccccgagggctgcccactgagccggtttaaggatagcctgggaaacccaacccacatcctgagaatcggcgagagctataaggagaagcagcggaccatccaggccaagaaggaggtggagcagcggagagccggcggctacagccggaagtacgccagcaaagccaagaatctggcagacgatatggtgagaaacaccgctagagatctgctgtactacgccgtgacccaggatgccatgctgatcttcgccaacctgagccggggcttcggccggcagggcaagcggaccttcatggccgagagacagtacacacggatggaggactggctgaccgccaagctggcctacgagggcctgagcaagacctacctgtccaagacactggcccagtacacctccaagacatgcagcaactgtgggtttaccatcaccagcgccgactacgacagggtgctggagaagctgaagaagacagcaacaggctggatgaccacaattaacggcaaggagctgaaggtggagggccagattacctactacaacagatacaagagacagaacgtagtcaaggacctgtccgtcgagctggatagactgagcgaagaatctgtgaacaacgacatctcctcctggacaaagggcagaagcggagaagctctgagcctcctgaagaaaagattctcccatagacccgtgcaggagaagttcgtgtgcctgaactgcggcttcgagacacacgcagccgagcaagccgccctgaacatcgccagatcctggctgttcctgcggagccaggagtacaagaaataccagacaaacaagacaaccggcaacaccgataagagagccttcgtcgagacctggcagtccttttaccggaagaagcttaaggaggtgtggaaacctgccgtgcggtctggcggatctggcggaggctccgagagcgtggccttcgaggacgtggccgtgtacttcacccagaaccagtgggccagcctggaccccgcccagagggccctgtacagggaggtgatgctggagaactacgccaacgtggccagcctggtggccttccccttccccaagcccgccctgatcagccacctggagaagggcgaggccccctggggccccgacccctgggacgccgagatccccagcagcctgagccagggcgacgagggcggcccaagcagcggcgcccctcctcccagcggcggcagcccagccggctccccaacctctaccgaggagggcacctctgagtccgccacccccgagagcggccctggcacctccaccgagcccagcgagggcagcgcacccggcagccctgccggcagccccacctccacagaggagggaaccagcaccgagcccagcgaaggcagcgccccaggcaccagcaccgagcctagtgagcaggagattaaacggatcaacaagatcagaagaagacttgtgaaagacagcaacaccaagaaggccggcaagacaggccccatgaaaaccctgctggttagagtgatgacacccgatctgagagagcggctggaaaacctgagaaagaagcctgaaaatatcccccagcccatcagcaatacatctagagccaacctgaataagctgctgaccgattacaccgaaatgaagaaggcgatcctgcatgtgtactgggaagagttccagaaggaccctgtgggcctgatgagccgggtggcccagcctgccagcaagaagatcgatcagaacaagctgaaacctgagatggacgagaagggcaacctgaccaccgccggctttgcctgctctcagtgtggccagcccctgttcgtgtacaagctggagcaggtgtctgagaagggcaaggcttacaccaactacttcggacggtgcaatgtggccgagcacgaaaagctgatcctgctggcccagctgaagcccgagaaggatagcgacgaagccgtgacatatagcctgggaaagtttgggcagagggccctggatttctacagcattcatgtgaccaaggagtccacccaccccgtgaagcccctggcccagatcgccggaaacagatacgcctccggacctgtgggaaaggccctgagcgacgcatgtatgggcacaatcgcctccttcctgtctaagtaccaggacatcatcatcgaacaccagaaggtggtgaagggcaaccagaagagactggagagcctgcgggagctggccggcaaggaaaacctggaataccctagcgtgaccctgccacctcagcctcacaccaaggagggcgttgatgcctacaacgaagtgatcgcccgggtgcgaatgtgggtgaacctgaacctgtggcagaagctgaagctaagcagagatgatgccaagcctctgctgagactgaagggattcccttcctttcctctggtcgagagacaggccaacgaagtggactggtgggacatggtgtgtaacgtgaagaagctgatcaacgagaaaaaggaggatggcaaggtgttttggcagaatctggctggctacaagagacaggaagccctgagaccatacctgagcagcgaggaagatcggaagaagggaaagaaattcgctcggtaccagctgggcgacctgctgctgcacctggaaaagaagcacggcgaggactggggaaaggtgtacgacgaggcctgggagcggattgacaagaaagtggaaggcctgagcaagcacatcaagctggaagaggaacggagaagcgaggacgcccagagcaaggccgccctgaccgactggctgcgggctaaggccagcttcgtgatcgagggcctgaaggaggccgacaaggacgagttctgcagatgcgagctgaagctgcagaagtggtacggggacctgcggggaaagcccttcgccatcgaagccgagaacagcatcctggacatcagcggcttcagcaagcagtacaactgtgccttcatctggcagaaggacggcgtgaagaagctgaacctgtacctgatcatcaactacttcaagggcggcaagctgcggttcaagaagatcaaacctgaagccttcgaagccaacagattctacaccgtgatcaacaaaaagagcggcgagatcgtgcccatggaggtgaacttcaacttcgacgaccccaacctgatcatcctgcctctggcctttggcaagagacagggcagagaattcatctggaacgacctgctgtccctggaaaccggcagcctgaagctggccaacggaagagtgatcgagaagacactgtacaacagaagaacccggcaggatgagcctgccctgttcgtggccctgaccttcgagcggcgggaggtcctggactcctccaatatcaaaccaatgaacctgatcggcgtggcaagaggcgaaaacatccccgccgtgatcgccctgaccgaccccgagggctgcccactgagccggtttaaggatagcctgggaaacccaacccacatcctgagaatcggcgagagctataaggagaagcagcggaccatccaggccaagaaggaggtggagcagcggagagccggcggctacagccggaagtacgccagcaaagccaagaatctggcagacgatatggtgagaaacaccgctagagatctgctgtactacgccgtgacccaggatgccatgctgatcttcgccaacctgagccggggcttcggccggcagggcaagcggaccttcatggccgagagacagtacacacggatggaggactggctgaccgccaagctggcctacgagggcctgagcaagacctacctgtccaagacactggcccagtacacctccaagacatgcagcaactgtgggtttaccatcaccagcgccgactacgacagggtgctggagaagctgaagaagacagcaacaggctggatgaccacaattaacggcaaggagctgaaggtggagggccagattacctactacaacagatacaagagacagaacgtagtcaaggacctgtccgtcgagctggatagactgagcgaagaatctgtgaacaacgacatctcctcctggacaaagggcagaagcggagaagctctgagcctcctgaagaaaagattctcccatagacccgtgcaggagaagttcgtgtgcctgaactgcggcttcgagacacacgcagccgagcaagccgccctgaacatcgccagatcctggctgttcctgcggagccaggagtacaagaaataccagacaaacaagacaaccggcaacaccgataagagagccttcgtcgagacctggcagtccttttaccggaagaagcttaaggaggtgtggaaacctgccgtgcggtctggcggatctggcggaggctcctgagagcgtggccttcgaggacgtggccgtgtacttcacccagaaccagtgggccagcctggaccccgcccagagggccctgtacagggaggtgatgctggagaactacgccaacgtggccagcctggtggccttccccttccccaagcccgccctgatcagccacctggagaagggcgaggccccctggggccccgacccctgggacgccgagatccccagcagcctgagccagggcgacgagggatctggctccggcagcggccccaagaaaaagagaaaagtctaagctgccttctgcggggcttgccttctggccatgcccttcttctctcccttgcacctgtacctcttggtctttgaataaagcctgagtaggaaggctagcaaaaaaaaaaaaaaaaaaaaaaaaaaaaaaaaaaaaaaaaaaaaaaaaaaaaaaaaaaaaaaaaaaaaaaaaaaaaaaaa

SEQ ID NO: 15544 - RNA, 9485 nt, synthetic construct
  source 1..9485: mol_type = other RNA
aggaaataagagagaaaagaagagtaagaagaaatataagagccaccatggcccctaagaagaagcgtaaagtgagccggatggaacgcctcgtctacgaggtgcggcagaagtgcagaaacatcgaggacatctgcatctcctgcggatctctgaacgtgaccctggagcacccactgttcatcggcggcatgtgccagaactgtaaaaactgttttctggagtgtgcctatcaatacgacgatgacggctaccagagctactgcaccatctgttgcggcggaagagaggtgctgatgtgtggaaataacaactgctgccggtgcttctgcgtggaatgcgtggacctgctggtgggccccggcgccgcccaggccgctattaaggaagatccttggaactgctacatgtgcggccacaagggcacatacggcctgctgagacggagagaggactggcctagcagactgcagatgttcttcgccaataaccacgaccaggagttcgacccccctaaggtgtaccctcccgtccccgccgagaagagaaagcccatccgggtcctgagcctgttcgatggcatcgccaccggtctgctggtgctgaaggacctgggcatccaggtggataggtacattgcctccgaggtgtgcgaggactccatcaccgtgggaatggtgcgtcatcagggcaagatcatgtacgtgggcgacgtgcggagcgtgacacagaagcatatccaggagtggggccctttcgacctggtgatcggcggcagcccttgcaatgacctgagcatcgtgaacccagcccggaagggcctgtacgagggaaccggcagactgttcttcgagttttacagactgctgcacgacgcccggcctaaggaaggcgacgaccggcccttcttttggctgttcgagaatgtggtggccatgggagtcagcgacaagcgggatattagccggttcctggagagcaaccccgtgatgatcgatgccaaggaagtgagcgccgcccaccgggccagatacttctggggcaatctgcctggcatgaacagacccctggccagcaccgtgaacgacaagctggagctgcaggagtgcctggagcacggccggatcgccaagttcagcaaggtgagaaccatcaccacccgaagcaacagcatcaaacaaggcaaggaccagcactttcctgtgttcatgaacgagaaggaggacatcctgtggtgtaccgagatggagagagtgttcgggttcccagtccactacacagatgtcagcaacatgtctagactggccagacagagactgctgggaagaagctggtccgtccctgtgatcagacacctgttcgcccctctgaaggagtacttcgcctgcgtgagcagcggcaacagcaacgccaacagccggggccccagcttctctagcggcctggtgccactgtccctgagagggagccacatgggccccatggagatctacaaaaccgtgagcgcctggaagcggcagcctgtgcgcgtgctgagcctgtttcggaatatcgataaagtcctgaaaagcctgggattcctggagagcggctctggctccggcggtggcaccctgaagtacgtggaggatgtgacaaacgtggtcagacgggatgtggagaagtggggccccttcgatctggtgtacggcagcacccaacccctgggcagctcttgtgaccggtgccctggctggtacatgtttcagttccaccggatcctgcagtacgccctgccgagacaggagtcccagcggccattcttttggattttcatggacaacttgctgctgaccgaggatgaccaggaaactaccactcggttcctgcagaccgaagccgtgaccctgcaggacgtgagaggccgggactaccagaacgccatgcgggtgtggtccaacatccctggactgaaaagcaagcacgcacctctgacccctaaagaagaggagtacctgcaggcccaggtgcggagcagaagcaagctggacgcccctaaggtggatctgctggtgaagaattgcctcctgcccctgagagagtacttcaagtatttcagccagaatagtctgcccctgggaggcagcggcggcggcgccctggtgacatttgaggacgtcgccgtgcggttcacccaggaggaatgggctctgctggatccttctcagaaaatcctgtaccgggacgtgatgagagagacataccggaatctgacctccgtgggcatcaactgggaatgttgggaccttgaagcctgcttcagaagcctgggaagaaacctgagagtgcaggtggtgaagagaaagtgcgagctgaccaacagcggcccctgcgccgagggcggcccaagcagcggcgcccctcctcccagcggcggcagcccagccggctccccaacctctaccgaggagggcacctctgagtccgccacccccgagagcggccctggcacctccaccgagcccagcgagggcagcgcacccggcagccctgccggcagccccacctccacagaggagggaaccagcaccgagcccagcgaaggcagcgccccaggcaccagcaccgagcctagtgagcaggagattaaacggatcaacaagatcagaagaagacttgtgaaagacagcaacaccaagaaggccggcaagacaggccccatgaaaaccctgctggttagagtgatgacacccgatctgagagagcggctggaaaacctgagaaagaagcctgaaaatatcccccagcccatcagcaatacatctagagccaacctgaataagctgctgaccgattacaccgaaatgaagaaggcgatcctgcatgtgtactgggaagagttccagaaggaccctgtgggcctgatgagccgggtggcccagcctgccagcaagaagatcgatcagaacaagctgaaacctgagatggacgagaagggcaacctgaccaccgccggctttgcctgctctcagtgtggccagcccctgttcgtgtacaagctggagcaggtgtctgagaagggcaaggcttacaccaactacttcggacggtgcaatgtggccgagcacgaaaagctgatcctgctggcccagctgaagcccgagaaggatagcgacgaagccgtgacatatagcctgggaaagtttgggcagagggccctggatttctacagcattcatgtgaccaaggagtccacccaccccgtgaagcccctggcccagatcgccggaaacagatacgcctccggacctgtgggaaaggccctgagcgacgcatgtatgggcacaatcgcctccttcctgtctaagtaccaggacatcatcatcgaacaccagaaggtggtgaagggcaaccagaagagactggagagcctgcgggagctggccggcaaggaaaacctggaataccctagcgtgaccctgccacctcagcctcacaccaaggagggcgttgatgcctacaacgaagtgatcgcccgggtgcgaatgtgggtgaacctgaacctgtggcagaagctgaagctaagcagagatgatgccaagcctctgctgagactgaagggattcccttcctttcctctggtcgagagacaggccaacgaagtggactggtgggacatggtgtgtaacgtgaagaagctgatcaacgagaaaaaggaggatggcaaggtgttttggcagaatctggctggctacaagagacaggaagccctgagaccatacctgagcagcgaggaagatcggaagaagggaaagaaattcgctcggtaccagctgggcgacctgctgctgcacctggaaaagaagcacggcgaggactggggaaaggtgtacgacgaggcctgggagcggattgacaagaaagtggaaggcctgagcaagcacatcaagctggaagaggaacggagaagcgaggacgcccagagcaaggccgccctgaccgactggctgcgggctaaggccagcttcgtgatcgagggcctgaaggaggccgacaaggacgagttctgcagatgcgagctgaagctgcagaagtggtacggggacctgcggggaaagcccttcgccatcgaagccgagaacagcatcctggacatcagcggcttcagcaagcagtacaactgtgccttcatctggcagaaggacggcgtgaagaagctgaacctgtacctgatcatcaactacttcaagggcggcaagctgcggttcaagaagatcaaacctgaagccttcgaagccaacagattctacaccgtgatcaacaaaaagagcggcgagatcgtgcccatggaggtgaacttcaacttcgacgaccccaacctgatcatcctgcctctggcctttggcaagagacagggcagagaattcatctggaacgacctgctgtccctggaaaccggcagcctgaagctggccaacggaagagtgatcgagaagacactgtacaacagaagaacccggcaggatgagcctgccctgttcgtggccctgaccttcgagcggcgggaggtcctggactcctccaatatcaaaccaatgaacctgatcggcgtggcaagaggcgaaaacatccccgccgtgatcgccctgaccgaccccgagggctgcccactgagccggtttaaggatagcctgggaaacccaacccacatcctgagaatcggcgagagctataaggagaagcagcggaccatccaggccaagaaggaggtggagcagcggagagccggcggctacagccggaagtacgccagcaaagccaagaatctggcagacgatatggtgagaaacaccgctagagatctgctgtactacgccgtgacccaggatgccatgctgatcttcgccaacctgagccggggcttcggccggcagggcaagcggaccttcatggccgagagacagtacacacggatggaggactggctgaccgccaagctggcctacgagggcctgagcaagacctacctgtccaagacactggcccagtacacctccaagacatgcagcaactgtgggtttaccatcaccagcgccgactacgacagggtgctggagaagctgaagaagacagcaacaggctggatgaccacaattaacggcaaggagctgaaggtggagggccagattacctactacaacagatacaagagacagaacgtagtcaaggacctgtccgtcgagctggatagactgagcgaagaatctgtgaacaacgacatctcctcctggacaaagggcagaagcggagaagctctgagcctcctgaagaaaagattctcccatagacccgtgcaggagaagttcgtgtgcctgaactgcggcttcgagacacacgcagccgagcaagccgccctgaacatcgccagatcctggctgttcctgcggagccaggagtacaagaaataccagacaaacaagacaaccggcaacaccgataagagagccttcgtcgagacctggcagtccttttaccggaagaagcttaaggaggtgtggaaacctgccgtgcggtctggcggatctggcggaggctcccccgtgaggggccccggcgaggccaggcccagcaggaagaggggcaggaggcccagggccctgaagttcgtggacgtggccgtgtacttcagcagcgaggagtggggctgcctgaggcccgcccagagggccctgtacagggacgtgatgagggagacctacggccacctgggcgccctgggctgcgccggccccaagcccgccctgatcagctggctggagaggaacaccgacgactgggagggcggcccaagcagcggcgcccctcctcccagcggcggcagcccagccggctccccaacctctaccgaggagggcacctctgagtccgccacccccgagagcggccctggcacctccaccgagcccagcgagggcagcgcacccggcagccctgccggcagccccacctccacagaggagggaaccagcaccgagcccagcgaaggcagcgccccaggcaccagcaccgagcctagtgagcaggagattaaacggatcaacaagatcagaagaagacttgtgaaagacagcaacaccaagaaggccggcaagacaggccccatgaaaaccctgctggttagagtgatgacacccgatctgagagagcggctggaaaacctgagaaagaagcctgaaaatatcccccagcccatcagcaatacatctagagccaacctgaataagctgctgaccgattacaccgaaatgaagaaggcgatcctgcatgtgtactgggaagagttccagaaggaccctgtgggcctgatgagccgggtggcccagcctgccagcaagaagatcgatcagaacaagctgaaacctgagatggacgagaagggcaacctgaccaccgccggctttgcctgctctcagtgtggccagcccctgttcgtgtacaagctggagcaggtgtctgagaagggcaaggcttacaccaactacttcggacggtgcaatgtggccgagcacgaaaagctgatcctgctggcccagctgaagcccgagaaggatagcgacgaagccgtgacatatagcctgggaaagtttgggcagagggccctggatttctacagcattcatgtgaccaaggagtccacccaccccgtgaagcccctggcccagatcgccggaaacagatacgcctccggacctgtgggaaaggccctgagcgacgcatgtatgggcacaatcgcctccttcctgtctaagtaccaggacatcatcatcgaacaccagaaggtggtgaagggcaaccagaagagactggagagcctgcgggagctggccggcaaggaaaacctggaataccctagcgtgaccctgccacctcagcctcacaccaaggagggcgttgatgcctacaacgaagtgatcgcccgggtgcgaatgtgggtgaacctgaacctgtggcagaagctgaagctaagcagagatgatgccaagcctctgctgagactgaagggattcccttcctttcctctggtcgagagacaggccaacgaagtggactggtgggacatggtgtgtaacgtgaagaagctgatcaacgagaaaaaggaggatggcaaggtgttttggcagaatctggctggctacaagagacaggaagccctgagaccatacctgagcagcgaggaagatcggaagaagggaaagaaattcgctcggtaccagctgggcgacctgctgctgcacctggaaaagaagcacggcgaggactggggaaaggtgtacgacgaggcctgggagcggattgacaagaaagtggaaggcctgagcaagcacatcaagctggaagaggaacggagaagcgaggacgcccagagcaaggccgccctgaccgactggctgcgggctaaggccagcttcgtgatcgagggcctgaaggaggccgacaaggacgagttctgcagatgcgagctgaagctgcagaagtggtacggggacctgcggggaaagcccttcgccatcgaagccgagaacagcatcctggacatcagcggcttcagcaagcagtacaactgtgccttcatctggcagaaggacggcgtgaagaagctgaacctgtacctgatcatcaactacttcaagggcggcaagctgcggttcaagaagatcaaacctgaagccttcgaagccaacagattctacaccgtgatcaacaaaaagagcggcgagatcgtgcccatggaggtgaacttcaacttcgacgaccccaacctgatcatcctgcctctggcctttggcaagagacagggcagagaattcatctggaacgacctgctgtccctggaaaccggcagcctgaagctggccaacggaagagtgatcgagaagacactgtacaacagaagaacccggcaggatgagcctgccctgttcgtggccctgaccttcgagcggcgggaggtcctggactcctccaatatcaaaccaatgaacctgatcggcgtggcaagaggcgaaaacatccccgccgtgatcgccctgaccgaccccgagggctgcccactgagccggtttaaggatagcctgggaaacccaacccacatcctgagaatcggcgagagctataaggagaagcagcggaccatccaggccaagaaggaggtggagcagcggagagccggcggctacagccggaagtacgccagcaaagccaagaatctggcagacgatatggtgagaaacaccgctagagatctgctgtactacgccgtgacccaggatgccatgctgatcttcgccaacctgagccggggcttcggccggcagggcaagcggaccttcatggccgagagacagtacacacggatggaggactggctgaccgccaagctggcctacgagggcctgagcaagacctacctgtccaagacactggcccagtacacctccaagacatgcagcaactgtgggtttaccatcaccagcgccgactacgacagggtgctggagaagctgaagaagacagcaacaggctggatgaccacaattaacggcaaggagctgaaggtggagggccagattacctactacaacagatacaagagacagaacgtagtcaaggacctgtccgtcgagctggatagactgagcgaagaatctgtgaacaacgacatctcctcctggacaaagggcagaagcggagaagctctgagcctcctgaagaaaagattctcccatagacccgtgcaggagaagttcgtgtgcctgaactgcggcttcgagacacacgcagccgagcaagccgccctgaacatcgccagatcctggctgttcctgcggagccaggagtacaagaaataccagacaaacaagacaaccggcaacaccgataagagagccttcgtcgagacctggcagtccttttaccggaagaagcttaaggaggtgtggaaacctgccgtgcggtctggcggatctggcggaggctcctcccgtgaggggccccggcgaggccaggcccagcaggaagaggggcaggaggcccagggccctgaagttcgtggacgtggccgtgtacttcagcagcgaggagtggggctgcctgaggcccgcccagagggccctgtacagggacgtgatgagggagacctacggccacctgggcgccctgggctgcgccggccccaagcccgccctgatcagctggctggagaggaacaccgacgactgggagggatctggctccggcagcggccccaagaaaaagagaaaagtctaagctgccttctgcggggcttgccttctggccatgcccttcttctctcccttgcacctgtacctcttggtctttgaataaagcctgagtaggaaggctagcaaaaaaaaaaaaaaaaaaaaaaaaaaaaaaaaaaaaaaaaaaaaaaaaaaaaaaaaaaaaaaaaaaaaaaaaaaaaaaaa

SEQ ID NO: 15545 - RNA, 9485 nt, synthetic construct
  source 1..9485: mol_type = other RNA
aggaaataagagagaaaagaagagtaagaagaaatataagagccaccatggcccctaagaagaagcgtaaagtgagccggatggaacgcctcgtctacgaggtgcggcagaagtgcagaaacatcgaggacatctgcatctcctgcggatctctgaacgtgaccctggagcacccactgttcatcggcggcatgtgccagaactgtaaaaactgttttctggagtgtgcctatcaatacgacgatgacggctaccagagctactgcaccatctgttgcggcggaagagaggtgctgatgtgtggaaataacaactgctgccggtgcttctgcgtggaatgcgtggacctgctggtgggccccggcgccgcccaggccgctattaaggaagatccttggaactgctacatgtgcggccacaagggcacatacggcctgctgagacggagagaggactggcctagcagactgcagatgttcttcgccaataaccacgaccaggagttcgacccccctaaggtgtaccctcccgtccccgccgagaagagaaagcccatccgggtcctgagcctgttcgatggcatcgccaccggtctgctggtgctgaaggacctgggcatccaggtggataggtacattgcctccgaggtgtgcgaggactccatcaccgtgggaatggtgcgtcatcagggcaagatcatgtacgtgggcgacgtgcggagcgtgacacagaagcatatccaggagtggggccctttcgacctggtgatcggcggcagcccttgcaatgacctgagcatcgtgaacccagcccggaagggcctgtacgagggaaccggcagactgttcttcgagttttacagactgctgcacgacgcccggcctaaggaaggcgacgaccggcccttcttttggctgttcgagaatgtggtggccatgggagtcagcgacaagcgggatattagccggttcctggagagcaaccccgtgatgatcgatgccaaggaagtgagcgccgcccaccgggccagatacttctggggcaatctgcctggcatgaacagacccctggccagcaccgtgaacgacaagctggagctgcaggagtgcctggagcacggccggatcgccaagttcagcaaggtgagaaccatcaccacccgaagcaacagcatcaaacaaggcaaggaccagcactttcctgtgttcatgaacgagaaggaggacatcctgtggtgtaccgagatggagagagtgttcgggttcccagtccactacacagatgtcagcaacatgtctagactggccagacagagactgctgggaagaagctggtccgtccctgtgatcagacacctgttcgcccctctgaaggagtacttcgcctgcgtgagcagcggcaacagcaacgccaacagccggggccccagcttctctagcggcctggtgccactgtccctgagagggagccacatgggccccatggagatctacaaaaccgtgagcgcctggaagcggcagcctgtgcgcgtgctgagcctgtttcggaatatcgataaagtcctgaaaagcctgggattcctggagagcggctctggctccggcggtggcaccctgaagtacgtggaggatgtgacaaacgtggtcagacgggatgtggagaagtggggccccttcgatctggtgtacggcagcacccaacccctgggcagctcttgtgaccggtgccctggctggtacatgtttcagttccaccggatcctgcagtacgccctgccgagacaggagtcccagcggccattcttttggattttcatggacaacttgctgctgaccgaggatgaccaggaaactaccactcggttcctgcagaccgaagccgtgaccctgcaggacgtgagaggccgggactaccagaacgccatgcgggtgtggtccaacatccctggactgaaaagcaagcacgcacctctgacccctaaagaagaggagtacctgcaggcccaggtgcggagcagaagcaagctggacgcccctaaggtggatctgctggtgaagaattgcctcctgcccctgagagagtacttcaagtatttcagccagaatagtctgcccctgggaggcagcggcggcggcgccctggtgacatttgaggacgtcgccgtgcggttcacccaggaggaatgggctctgctggatccttctcagaaaatcctgtaccgggacgtgatgagagagacataccggaatctgacctccgtgggcatcaactgggaatgttgggaccttgaagcctgcttcagaagcctgggaagaaacctgagagtgcaggtggtgaagagaaagtgcgagctgaccaacagcggcccctgcgccgagggcggcccaagcagcggcgcccctcctcccagcggcggcagcccagccggctccccaacctctaccgaggagggcacctctgagtccgccacccccgagagcggccctggcacctccaccgagcccagcgagggcagcgcacccggcagccctgccggcagccccacctccacagaggagggaaccagcaccgagcccagcgaaggcagcgccccaggcaccagcaccgagcctagtgagcaggagattaaacggatcaacaagatcagaagaagacttgtgaaagacagcaacaccaagaaggccggcaagacaggccccatgaaaaccctgctggttagagtgatgacacccgatctgagagagcggctggaaaacctgagaaagaagcctgaaaatatcccccagcccatcagcaatacatctagagccaacctgaataagctgctgaccgattacaccgaaatgaagaaggcgatcctgcatgtgtactgggaagagttccagaaggaccctgtgggcctgatgagccgggtggcccagcctgccagcaagaagatcgatcagaacaagctgaaacctgagatggacgagaagggcaacctgaccaccgccggctttgcctgctctcagtgtggccagcccctgttcgtgtacaagctggagcaggtgtctgagaagggcaaggcttacaccaactacttcggacggtgcaatgtggccgagcacgaaaagctgatcctgctggcccagctgaagcccgagaaggatagcgacgaagccgtgacatatagcctgggaaagtttgggcagagggccctggatttctacagcattcatgtgaccaaggagtccacccaccccgtgaagcccctggcccagatcgccggaaacagatacgcctccggacctgtgggaaaggccctgagcgacgcatgtatgggcacaatcgcctccttcctgtctaagtaccaggacatcatcatcgaacaccagaaggtggtgaagggcaaccagaagagactggagagcctgcgggagctggccggcaaggaaaacctggaataccctagcgtgaccctgccacctcagcctcacaccaaggagggcgttgatgcctacaacgaagtgatcgcccgggtgcgaatgtgggtgaacctgaacctgtggcagaagctgaagctaagcagagatgatgccaagcctctgctgagactgaagggattcccttcctttcctctggtcgagagacaggccaacgaagtggactggtgggacatggtgtgtaacgtgaagaagctgatcaacgagaaaaaggaggatggcaaggtgttttggcagaatctggctggctacaagagacaggaagccctgagaccatacctgagcagcgaggaagatcggaagaagggaaagaaattcgctcggtaccagctgggcgacctgctgctgcacctggaaaagaagcacggcgaggactggggaaaggtgtacgacgaggcctgggagcggattgacaagaaagtggaaggcctgagcaagcacatcaagctggaagaggaacggagaagcgaggacgcccagagcaaggccgccctgaccgactggctgcgggctaaggccagcttcgtgatcgagggcctgaaggaggccgacaaggacgagttctgcagatgcgagctgaagctgcagaagtggtacggggacctgcggggaaagcccttcgccatcgaagccgagaacagcatcctggacatcagcggcttcagcaagcagtacaactgtgccttcatctggcagaaggacggcgtgaagaagctgaacctgtacctgatcatcaactacttcaagggcggcaagctgcggttcaagaagatcaaacctgaagccttcgaagccaacagattctacaccgtgatcaacaaaaagagcggcgagatcgtgcccatggaggtgaacttcaacttcgacgaccccaacctgatcatcctgcctctggcctttggcaagagacagggcagagaattcatctggaacgacctgctgtccctggaaaccggcagcctgaagctggccaacggaagagtgatcgagaagacactgtacaacagaagaacccggcaggatgagcctgccctgttcgtggccctgaccttcgagcggcgggaggtcctggactcctccaatatcaaaccaatgaacctgatcggcgtggcaagaggcgaaaacatccccgccgtgatcgccctgaccgaccccgagggctgcccactgagccggtttaaggatagcctgggaaacccaacccacatcctgagaatcggcgagagctataaggagaagcagcggaccatccaggccaagaaggaggtggagcagcggagagccggcggctacagccggaagtacgccagcaaagccaagaatctggcagacgatatggtgagaaacaccgctagagatctgctgtactacgccgtgacccaggatgccatgctgatcttcgccaacctgagccggggcttcggccggcagggcaagcggaccttcatggccgagagacagtacacacggatggaggactggctgaccgccaagctggcctacgagggcctgagcaagacctacctgtccaagacactggcccagtacacctccaagacatgcagcaactgtgggtttaccatcaccagcgccgactacgacagggtgctggagaagctgaagaagacagcaacaggctggatgaccacaattaacggcaaggagctgaaggtggagggccagattacctactacaacagatacaagagacagaacgtagtcaaggacctgtccgtcgagctggatagactgagcgaagaatctgtgaacaacgacatctcctcctggacaaagggcagaagcggagaagctctgagcctcctgaagaaaagattctcccatagacccgtgcaggagaagttcgtgtgcctgaactgcggcttcgagacacacgcagccgagcaagccgccctgaacatcgccagatcctggctgttcctgcggagccaggagtacaagaaataccagacaaacaagacaaccggcaacaccgataagagagccttcgtcgagacctggcagtccttttaccggaagaagcttaaggaggtgtggaaacctgccgtgcggtctggcggatctggcggaggctccagcaaggcccccatcaccttcggcgacctggccatctacttcagccaggaggagtgggagtggctgagccccatccagaaggacctgtacgaggacgtgatgctggagaactacaggaacctggtgagcctgggcctgagcttcaggaggcccaacgtgatcaccctgctggagaagggcaaggccccctggatggtggagcccgccaggaggaggaggggccccgagctgaccgaggccagcggcggcccaagcagcggcgcccctcctcccagcggcggcagcccagccggctccccaacctctaccgaggagggcacctctgagtccgccacccccgagagcggccctggcacctccaccgagcccagcgagggcagcgcacccggcagccctgccggcagccccacctccacagaggagggaaccagcaccgagcccagcgaaggcagcgccccaggcaccagcaccgagcctagtgagcaggagattaaacggatcaacaagatcagaagaagacttgtgaaagacagcaacaccaagaaggccggcaagacaggccccatgaaaaccctgctggttagagtgatgacacccgatctgagagagcggctggaaaacctgagaaagaagcctgaaaatatcccccagcccatcagcaatacatctagagccaacctgaataagctgctgaccgattacaccgaaatgaagaaggcgatcctgcatgtgtactgggaagagttccagaaggaccctgtgggcctgatgagccgggtggcccagcctgccagcaagaagatcgatcagaacaagctgaaacctgagatggacgagaagggcaacctgaccaccgccggctttgcctgctctcagtgtggccagcccctgttcgtgtacaagctggagcaggtgtctgagaagggcaaggcttacaccaactacttcggacggtgcaatgtggccgagcacgaaaagctgatcctgctggcccagctgaagcccgagaaggatagcgacgaagccgtgacatatagcctgggaaagtttgggcagagggccctggatttctacagcattcatgtgaccaaggagtccacccaccccgtgaagcccctggcccagatcgccggaaacagatacgcctccggacctgtgggaaaggccctgagcgacgcatgtatgggcacaatcgcctccttcctgtctaagtaccaggacatcatcatcgaacaccagaaggtggtgaagggcaaccagaagagactggagagcctgcgggagctggccggcaaggaaaacctggaataccctagcgtgaccctgccacctcagcctcacaccaaggagggcgttgatgcctacaacgaagtgatcgcccgggtgcgaatgtgggtgaacctgaacctgtggcagaagctgaagctaagcagagatgatgccaagcctctgctgagactgaagggattcccttcctttcctctggtcgagagacaggccaacgaagtggactggtgggacatggtgtgtaacgtgaagaagctgatcaacgagaaaaaggaggatggcaaggtgttttggcagaatctggctggctacaagagacaggaagccctgagaccatacctgagcagcgaggaagatcggaagaagggaaagaaattcgctcggtaccagctgggcgacctgctgctgcacctggaaaagaagcacggcgaggactggggaaaggtgtacgacgaggcctgggagcggattgacaagaaagtggaaggcctgagcaagcacatcaagctggaagaggaacggagaagcgaggacgcccagagcaaggccgccctgaccgactggctgcgggctaaggccagcttcgtgatcgagggcctgaaggaggccgacaaggacgagttctgcagatgcgagctgaagctgcagaagtggtacggggacctgcggggaaagcccttcgccatcgaagccgagaacagcatcctggacatcagcggcttcagcaagcagtacaactgtgccttcatctggcagaaggacggcgtgaagaagctgaacctgtacctgatcatcaactacttcaagggcggcaagctgcggttcaagaagatcaaacctgaagccttcgaagccaacagattctacaccgtgatcaacaaaaagagcggcgagatcgtgcccatggaggtgaacttcaacttcgacgaccccaacctgatcatcctgcctctggcctttggcaagagacagggcagagaattcatctggaacgacctgctgtccctggaaaccggcagcctgaagctggccaacggaagagtgatcgagaagacactgtacaacagaagaacccggcaggatgagcctgccctgttcgtggccctgaccttcgagcggcgggaggtcctggactcctccaatatcaaaccaatgaacctgatcggcgtggcaagaggcgaaaacatccccgccgtgatcgccctgaccgaccccgagggctgcccactgagccggtttaaggatagcctgggaaacccaacccacatcctgagaatcggcgagagctataaggagaagcagcggaccatccaggccaagaaggaggtggagcagcggagagccggcggctacagccggaagtacgccagcaaagccaagaatctggcagacgatatggtgagaaacaccgctagagatctgctgtactacgccgtgacccaggatgccatgctgatcttcgccaacctgagccggggcttcggccggcagggcaagcggaccttcatggccgagagacagtacacacggatggaggactggctgaccgccaagctggcctacgagggcctgagcaagacctacctgtccaagacactggcccagtacacctccaagacatgcagcaactgtgggtttaccatcaccagcgccgactacgacagggtgctggagaagctgaagaagacagcaacaggctggatgaccacaattaacggcaaggagctgaaggtggagggccagattacctactacaacagatacaagagacagaacgtagtcaaggacctgtccgtcgagctggatagactgagcgaagaatctgtgaacaacgacatctcctcctggacaaagggcagaagcggagaagctctgagcctcctgaagaaaagattctcccatagacccgtgcaggagaagttcgtgtgcctgaactgcggcttcgagacacacgcagccgagcaagccgccctgaacatcgccagatcctggctgttcctgcggagccaggagtacaagaaataccagacaaacaagacaaccggcaacaccgataagagagccttcgtcgagacctggcagtccttttaccggaagaagcttaaggaggtgtggaaacctgccgtgcggtctggcggatctggcggaggctcctagcaaggcccccatcaccttcggcgacctggccatctacttcagccaggaggagtgggagtggctgagccccatccagaaggacctgtacgaggacgtgatgctggagaactacaggaacctggtgagcctgggcctgagcttcaggaggcccaacgtgatcaccctgctggagaagggcaaggccccctggatggtggagcccgccaggaggaggaggggccccgagctgaccgaggccagcggatctggctccggcagcggccccaagaaaaagagaaaagtctaagctgccttctgcggggcttgccttctggccatgcccttcttctctcccttgcacctgtacctcttggtctttgaataaagcctgagtaggaaggctagcaaaaaaaaaaaaaaaaaaaaaaaaaaaaaaaaaaaaaaaaaaaaaaaaaaaaaaaaaaaaaaaaaaaaaaaaaaaaaaaa

SEQ ID NO: 15546 - RNA, 9485 nt, synthetic construct
  source 1..9485: mol_type = other RNA
aggaaataagagagaaaagaagagtaagaagaaatataagagccaccatggcccctaagaagaagcgtaaagtgagccggatggaacgcctcgtctacgaggtgcggcagaagtgcagaaacatcgaggacatctgcatctcctgcggatctctgaacgtgaccctggagcacccactgttcatcggcggcatgtgccagaactgtaaaaactgttttctggagtgtgcctatcaatacgacgatgacggctaccagagctactgcaccatctgttgcggcggaagagaggtgctgatgtgtggaaataacaactgctgccggtgcttctgcgtggaatgcgtggacctgctggtgggccccggcgccgcccaggccgctattaaggaagatccttggaactgctacatgtgcggccacaagggcacatacggcctgctgagacggagagaggactggcctagcagactgcagatgttcttcgccaataaccacgaccaggagttcgacccccctaaggtgtaccctcccgtccccgccgagaagagaaagcccatccgggtcctgagcctgttcgatggcatcgccaccggtctgctggtgctgaaggacctgggcatccaggtggataggtacattgcctccgaggtgtgcgaggactccatcaccgtgggaatggtgcgtcatcagggcaagatcatgtacgtgggcgacgtgcggagcgtgacacagaagcatatccaggagtggggccctttcgacctggtgatcggcggcagcccttgcaatgacctgagcatcgtgaacccagcccggaagggcctgtacgagggaaccggcagactgttcttcgagttttacagactgctgcacgacgcccggcctaaggaaggcgacgaccggcccttcttttggctgttcgagaatgtggtggccatgggagtcagcgacaagcgggatattagccggttcctggagagcaaccccgtgatgatcgatgccaaggaagtgagcgccgcccaccgggccagatacttctggggcaatctgcctggcatgaacagacccctggccagcaccgtgaacgacaagctggagctgcaggagtgcctggagcacggccggatcgccaagttcagcaaggtgagaaccatcaccacccgaagcaacagcatcaaacaaggcaaggaccagcactttcctgtgttcatgaacgagaaggaggacatcctgtggtgtaccgagatggagagagtgttcgggttcccagtccactacacagatgtcagcaacatgtctagactggccagacagagactgctgggaagaagctggtccgtccctgtgatcagacacctgttcgcccctctgaaggagtacttcgcctgcgtgagcagcggcaacagcaacgccaacagccggggccccagcttctctagcggcctggtgccactgtccctgagagggagccacatgggccccatggagatctacaaaaccgtgagcgcctggaagcggcagcctgtgcgcgtgctgagcctgtttcggaatatcgataaagtcctgaaaagcctgggattcctggagagcggctctggctccggcggtggcaccctgaagtacgtggaggatgtgacaaacgtggtcagacgggatgtggagaagtggggccccttcgatctggtgtacggcagcacccaacccctgggcagctcttgtgaccggtgccctggctggtacatgtttcagttccaccggatcctgcagtacgccctgccgagacaggagtcccagcggccattcttttggattttcatggacaacttgctgctgaccgaggatgaccaggaaactaccactcggttcctgcagaccgaagccgtgaccctgcaggacgtgagaggccgggactaccagaacgccatgcgggtgtggtccaacatccctggactgaaaagcaagcacgcacctctgacccctaaagaagaggagtacctgcaggcccaggtgcggagcagaagcaagctggacgcccctaaggtggatctgctggtgaagaattgcctcctgcccctgagagagtacttcaagtatttcagccagaatagtctgcccctgggaggcagcggcggcggcgccctggtgacatttgaggacgtcgccgtgcggttcacccaggaggaatgggctctgctggatccttctcagaaaatcctgtaccgggacgtgatgagagagacataccggaatctgacctccgtgggcatcaactgggaatgttgggaccttgaagcctgcttcagaagcctgggaagaaacctgagagtgcaggtggtgaagagaaagtgcgagctgaccaacagcggcccctgcgccgagggcggcccaagcagcggcgcccctcctcccagcggcggcagcccagccggctccccaacctctaccgaggagggcacctctgagtccgccacccccgagagcggccctggcacctccaccgagcccagcgagggcagcgcacccggcagccctgccggcagccccacctccacagaggagggaaccagcaccgagcccagcgaaggcagcgccccaggcaccagcaccgagcctagtgagcaggagattaaacggatcaacaagatcagaagaagacttgtgaaagacagcaacaccaagaaggccggcaagacaggccccatgaaaaccctgctggttagagtgatgacacccgatctgagagagcggctggaaaacctgagaaagaagcctgaaaatatcccccagcccatcagcaatacatctagagccaacctgaataagctgctgaccgattacaccgaaatgaagaaggcgatcctgcatgtgtactgggaagagttccagaaggaccctgtgggcctgatgagccgggtggcccagcctgccagcaagaagatcgatcagaacaagctgaaacctgagatggacgagaagggcaacctgaccaccgccggctttgcctgctctcagtgtggccagcccctgttcgtgtacaagctggagcaggtgtctgagaagggcaaggcttacaccaactacttcggacggtgcaatgtggccgagcacgaaaagctgatcctgctggcccagctgaagcccgagaaggatagcgacgaagccgtgacatatagcctgggaaagtttgggcagagggccctggatttctacagcattcatgtgaccaaggagtccacccaccccgtgaagcccctggcccagatcgccggaaacagatacgcctccggacctgtgggaaaggccctgagcgacgcatgtatgggcacaatcgcctccttcctgtctaagtaccaggacatcatcatcgaacaccagaaggtggtgaagggcaaccagaagagactggagagcctgcgggagctggccggcaaggaaaacctggaataccctagcgtgaccctgccacctcagcctcacaccaaggagggcgttgatgcctacaacgaagtgatcgcccgggtgcgaatgtgggtgaacctgaacctgtggcagaagctgaagctaagcagagatgatgccaagcctctgctgagactgaagggattcccttcctttcctctggtcgagagacaggccaacgaagtggactggtgggacatggtgtgtaacgtgaagaagctgatcaacgagaaaaaggaggatggcaaggtgttttggcagaatctggctggctacaagagacaggaagccctgagaccatacctgagcagcgaggaagatcggaagaagggaaagaaattcgctcggtaccagctgggcgacctgctgctgcacctggaaaagaagcacggcgaggactggggaaaggtgtacgacgaggcctgggagcggattgacaagaaagtggaaggcctgagcaagcacatcaagctggaagaggaacggagaagcgaggacgcccagagcaaggccgccctgaccgactggctgcgggctaaggccagcttcgtgatcgagggcctgaaggaggccgacaaggacgagttctgcagatgcgagctgaagctgcagaagtggtacggggacctgcggggaaagcccttcgccatcgaagccgagaacagcatcctggacatcagcggcttcagcaagcagtacaactgtgccttcatctggcagaaggacggcgtgaagaagctgaacctgtacctgatcatcaactacttcaagggcggcaagctgcggttcaagaagatcaaacctgaagccttcgaagccaacagattctacaccgtgatcaacaaaaagagcggcgagatcgtgcccatggaggtgaacttcaacttcgacgaccccaacctgatcatcctgcctctggcctttggcaagagacagggcagagaattcatctggaacgacctgctgtccctggaaaccggcagcctgaagctggccaacggaagagtgatcgagaagacactgtacaacagaagaacccggcaggatgagcctgccctgttcgtggccctgaccttcgagcggcgggaggtcctggactcctccaatatcaaaccaatgaacctgatcggcgtggcaagaggcgaaaacatccccgccgtgatcgccctgaccgaccccgagggctgcccactgagccggtttaaggatagcctgggaaacccaacccacatcctgagaatcggcgagagctataaggagaagcagcggaccatccaggccaagaaggaggtggagcagcggagagccggcggctacagccggaagtacgccagcaaagccaagaatctggcagacgatatggtgagaaacaccgctagagatctgctgtactacgccgtgacccaggatgccatgctgatcttcgccaacctgagccggggcttcggccggcagggcaagcggaccttcatggccgagagacagtacacacggatggaggactggctgaccgccaagctggcctacgagggcctgagcaagacctacctgtccaagacactggcccagtacacctccaagacatgcagcaactgtgggtttaccatcaccagcgccgactacgacagggtgctggagaagctgaagaagacagcaacaggctggatgaccacaattaacggcaaggagctgaaggtggagggccagattacctactacaacagatacaagagacagaacgtagtcaaggacctgtccgtcgagctggatagactgagcgaagaatctgtgaacaacgacatctcctcctggacaaagggcagaagcggagaagctctgagcctcctgaagaaaagattctcccatagacccgtgcaggagaagttcgtgtgcctgaactgcggcttcgagacacacgcagccgagcaagccgccctgaacatcgccagatcctggctgttcctgcggagccaggagtacaagaaataccagacaaacaagacaaccggcaacaccgataagagagccttcgtcgagacctggcagtccttttaccggaagaagcttaaggaggtgtggaaacctgccgtgcggtctggcggatctggcggaggctccaggcccggcgccgtgagcttcgccgacgtggccgtgtacttcagccccgaggagtggggctgcctgaggcccgcccagagggccctgtacaggaacgtgatgagggagacctacggccacctgggcgccctgggcttcgccggccccaagcccgccctgatcagctggctggagaggaagaaggaggtgtggagccccgaggccgaggaccccgaggccggcgccaggcaccccggcagcggcggcggcccaagcagcggcgcccctcctcccagcggcggcagcccagccggctccccaacctctaccgaggagggcacctctgagtccgccacccccgagagcggccctggcacctccaccgagcccagcgagggcagcgcacccggcagccctgccggcagccccacctccacagaggagggaaccagcaccgagcccagcgaaggcagcgccccaggcaccagcaccgagcctagtgagcaggagattaaacggatcaacaagatcagaagaagacttgtgaaagacagcaacaccaagaaggccggcaagacaggccccatgaaaaccctgctggttagagtgatgacacccgatctgagagagcggctggaaaacctgagaaagaagcctgaaaatatcccccagcccatcagcaatacatctagagccaacctgaataagctgctgaccgattacaccgaaatgaagaaggcgatcctgcatgtgtactgggaagagttccagaaggaccctgtgggcctgatgagccgggtggcccagcctgccagcaagaagatcgatcagaacaagctgaaacctgagatggacgagaagggcaacctgaccaccgccggctttgcctgctctcagtgtggccagcccctgttcgtgtacaagctggagcaggtgtctgagaagggcaaggcttacaccaactacttcggacggtgcaatgtggccgagcacgaaaagctgatcctgctggcccagctgaagcccgagaaggatagcgacgaagccgtgacatatagcctgggaaagtttgggcagagggccctggatttctacagcattcatgtgaccaaggagtccacccaccccgtgaagcccctggcccagatcgccggaaacagatacgcctccggacctgtgggaaaggccctgagcgacgcatgtatgggcacaatcgcctccttcctgtctaagtaccaggacatcatcatcgaacaccagaaggtggtgaagggcaaccagaagagactggagagcctgcgggagctggccggcaaggaaaacctggaataccctagcgtgaccctgccacctcagcctcacaccaaggagggcgttgatgcctacaacgaagtgatcgcccgggtgcgaatgtgggtgaacctgaacctgtggcagaagctgaagctaagcagagatgatgccaagcctctgctgagactgaagggattcccttcctttcctctggtcgagagacaggccaacgaagtggactggtgggacatggtgtgtaacgtgaagaagctgatcaacgagaaaaaggaggatggcaaggtgttttggcagaatctggctggctacaagagacaggaagccctgagaccatacctgagcagcgaggaagatcggaagaagggaaagaaattcgctcggtaccagctgggcgacctgctgctgcacctggaaaagaagcacggcgaggactggggaaaggtgtacgacgaggcctgggagcggattgacaagaaagtggaaggcctgagcaagcacatcaagctggaagaggaacggagaagcgaggacgcccagagcaaggccgccctgaccgactggctgcgggctaaggccagcttcgtgatcgagggcctgaaggaggccgacaaggacgagttctgcagatgcgagctgaagctgcagaagtggtacggggacctgcggggaaagcccttcgccatcgaagccgagaacagcatcctggacatcagcggcttcagcaagcagtacaactgtgccttcatctggcagaaggacggcgtgaagaagctgaacctgtacctgatcatcaactacttcaagggcggcaagctgcggttcaagaagatcaaacctgaagccttcgaagccaacagattctacaccgtgatcaacaaaaagagcggcgagatcgtgcccatggaggtgaacttcaacttcgacgaccccaacctgatcatcctgcctctggcctttggcaagagacagggcagagaattcatctggaacgacctgctgtccctggaaaccggcagcctgaagctggccaacggaagagtgatcgagaagacactgtacaacagaagaacccggcaggatgagcctgccctgttcgtggccctgaccttcgagcggcgggaggtcctggactcctccaatatcaaaccaatgaacctgatcggcgtggcaagaggcgaaaacatccccgccgtgatcgccctgaccgaccccgagggctgcccactgagccggtttaaggatagcctgggaaacccaacccacatcctgagaatcggcgagagctataaggagaagcagcggaccatccaggccaagaaggaggtggagcagcggagagccggcggctacagccggaagtacgccagcaaagccaagaatctggcagacgatatggtgagaaacaccgctagagatctgctgtactacgccgtgacccaggatgccatgctgatcttcgccaacctgagccggggcttcggccggcagggcaagcggaccttcatggccgagagacagtacacacggatggaggactggctgaccgccaagctggcctacgagggcctgagcaagacctacctgtccaagacactggcccagtacacctccaagacatgcagcaactgtgggtttaccatcaccagcgccgactacgacagggtgctggagaagctgaagaagacagcaacaggctggatgaccacaattaacggcaaggagctgaaggtggagggccagattacctactacaacagatacaagagacagaacgtagtcaaggacctgtccgtcgagctggatagactgagcgaagaatctgtgaacaacgacatctcctcctggacaaagggcagaagcggagaagctctgagcctcctgaagaaaagattctcccatagacccgtgcaggagaagttcgtgtgcctgaactgcggcttcgagacacacgcagccgagcaagccgccctgaacatcgccagatcctggctgttcctgcggagccaggagtacaagaaataccagacaaacaagacaaccggcaacaccgataagagagccttcgtcgagacctggcagtccttttaccggaagaagcttaaggaggtgtggaaacctgccgtgcggtctggcggatctggcggaggctcctaggcccggcgccgtgagcttcgccgacgtggccgtgtacttcagccccgaggagtggggctgcctgaggcccgcccagagggccctgtacaggaacgtgatgagggagacctacggccacctgggcgccctgggcttcgccggccccaagcccgccctgatcagctggctggagaggaagaaggaggtgtggagccccgaggccgaggaccccgaggccggcgccaggcaccccggcagcggcggatctggctccggcagcggccccaagaaaaagagaaaagtctaagctgccttctgcggggcttgccttctggccatgcccttcttctctcccttgcacctgtacctcttggtctttgaataaagcctgagtaggaaggctagcaaaaaaaaaaaaaaaaaaaaaaaaaaaaaaaaaaaaaaaaaaaaaaaaaaaaaaaaaaaaaaaaaaaaaaaaaaaaaaaa

SEQ ID NO: 15547 - RNA, 9485 nt, synthetic construct
  source 1..9485: mol_type = other RNA
aggaaataagagagaaaagaagagtaagaagaaatataagagccaccatggcccctaagaagaagcgtaaagtgagccggatggaacgcctcgtctacgaggtgcggcagaagtgcagaaacatcgaggacatctgcatctcctgcggatctctgaacgtgaccctggagcacccactgttcatcggcggcatgtgccagaactgtaaaaactgttttctggagtgtgcctatcaatacgacgatgacggctaccagagctactgcaccatctgttgcggcggaagagaggtgctgatgtgtggaaataacaactgctgccggtgcttctgcgtggaatgcgtggacctgctggtgggccccggcgccgcccaggccgctattaaggaagatccttggaactgctacatgtgcggccacaagggcacatacggcctgctgagacggagagaggactggcctagcagactgcagatgttcttcgccaataaccacgaccaggagttcgacccccctaaggtgtaccctcccgtccccgccgagaagagaaagcccatccgggtcctgagcctgttcgatggcatcgccaccggtctgctggtgctgaaggacctgggcatccaggtggataggtacattgcctccgaggtgtgcgaggactccatcaccgtgggaatggtgcgtcatcagggcaagatcatgtacgtgggcgacgtgcggagcgtgacacagaagcatatccaggagtggggccctttcgacctggtgatcggcggcagcccttgcaatgacctgagcatcgtgaacccagcccggaagggcctgtacgagggaaccggcagactgttcttcgagttttacagactgctgcacgacgcccggcctaaggaaggcgacgaccggcccttcttttggctgttcgagaatgtggtggccatgggagtcagcgacaagcgggatattagccggttcctggagagcaaccccgtgatgatcgatgccaaggaagtgagcgccgcccaccgggccagatacttctggggcaatctgcctggcatgaacagacccctggccagcaccgtgaacgacaagctggagctgcaggagtgcctggagcacggccggatcgccaagttcagcaaggtgagaaccatcaccacccgaagcaacagcatcaaacaaggcaaggaccagcactttcctgtgttcatgaacgagaaggaggacatcctgtggtgtaccgagatggagagagtgttcgggttcccagtccactacacagatgtcagcaacatgtctagactggccagacagagactgctgggaagaagctggtccgtccctgtgatcagacacctgttcgcccctctgaaggagtacttcgcctgcgtgagcagcggcaacagcaacgccaacagccggggccccagcttctctagcggcctggtgccactgtccctgagagggagccacatgggccccatggagatctacaaaaccgtgagcgcctggaagcggcagcctgtgcgcgtgctgagcctgtttcggaatatcgataaagtcctgaaaagcctgggattcctggagagcggctctggctccggcggtggcaccctgaagtacgtggaggatgtgacaaacgtggtcagacgggatgtggagaagtggggccccttcgatctggtgtacggcagcacccaacccctgggcagctcttgtgaccggtgccctggctggtacatgtttcagttccaccggatcctgcagtacgccctgccgagacaggagtcccagcggccattcttttggattttcatggacaacttgctgctgaccgaggatgaccaggaaactaccactcggttcctgcagaccgaagccgtgaccctgcaggacgtgagaggccgggactaccagaacgccatgcgggtgtggtccaacatccctggactgaaaagcaagcacgcacctctgacccctaaagaagaggagtacctgcaggcccaggtgcggagcagaagcaagctggacgcccctaaggtggatctgctggtgaagaattgcctcctgcccctgagagagtacttcaagtatttcagccagaatagtctgcccctgggaggcagcggcggcggcgccctggtgacatttgaggacgtcgccgtgcggttcacccaggaggaatgggctctgctggatccttctcagaaaatcctgtaccgggacgtgatgagagagacataccggaatctgacctccgtgggcatcaactgggaatgttgggaccttgaagcctgcttcagaagcctgggaagaaacctgagagtgcaggtggtgaagagaaagtgcgagctgaccaacagcggcccctgcgccgagggcggcccaagcagcggcgcccctcctcccagcggcggcagcccagccggctccccaacctctaccgaggagggcacctctgagtccgccacccccgagagcggccctggcacctccaccgagcccagcgagggcagcgcacccggcagccctgccggcagccccacctccacagaggagggaaccagcaccgagcccagcgaaggcagcgccccaggcaccagcaccgagcctagtgagcaggagattaaacggatcaacaagatcagaagaagacttgtgaaagacagcaacaccaagaaggccggcaagacaggccccatgaaaaccctgctggttagagtgatgacacccgatctgagagagcggctggaaaacctgagaaagaagcctgaaaatatcccccagcccatcagcaatacatctagagccaacctgaataagctgctgaccgattacaccgaaatgaagaaggcgatcctgcatgtgtactgggaagagttccagaaggaccctgtgggcctgatgagccgggtggcccagcctgccagcaagaagatcgatcagaacaagctgaaacctgagatggacgagaagggcaacctgaccaccgccggctttgcctgctctcagtgtggccagcccctgttcgtgtacaagctggagcaggtgtctgagaagggcaaggcttacaccaactacttcggacggtgcaatgtggccgagcacgaaaagctgatcctgctggcccagctgaagcccgagaaggatagcgacgaagccgtgacatatagcctgggaaagtttgggcagagggccctggatttctacagcattcatgtgaccaaggagtccacccaccccgtgaagcccctggcccagatcgccggaaacagatacgcctccggacctgtgggaaaggccctgagcgacgcatgtatgggcacaatcgcctccttcctgtctaagtaccaggacatcatcatcgaacaccagaaggtggtgaagggcaaccagaagagactggagagcctgcgggagctggccggcaaggaaaacctggaataccctagcgtgaccctgccacctcagcctcacaccaaggagggcgttgatgcctacaacgaagtgatcgcccgggtgcgaatgtgggtgaacctgaacctgtggcagaagctgaagctaagcagagatgatgccaagcctctgctgagactgaagggattcccttcctttcctctggtcgagagacaggccaacgaagtggactggtgggacatggtgtgtaacgtgaagaagctgatcaacgagaaaaaggaggatggcaaggtgttttggcagaatctggctggctacaagagacaggaagccctgagaccatacctgagcagcgaggaagatcggaagaagggaaagaaattcgctcggtaccagctgggcgacctgctgctgcacctggaaaagaagcacggcgaggactggggaaaggtgtacgacgaggcctgggagcggattgacaagaaagtggaaggcctgagcaagcacatcaagctggaagaggaacggagaagcgaggacgcccagagcaaggccgccctgaccgactggctgcgggctaaggccagcttcgtgatcgagggcctgaaggaggccgacaaggacgagttctgcagatgcgagctgaagctgcagaagtggtacggggacctgcggggaaagcccttcgccatcgaagccgagaacagcatcctggacatcagcggcttcagcaagcagtacaactgtgccttcatctggcagaaggacggcgtgaagaagctgaacctgtacctgatcatcaactacttcaagggcggcaagctgcggttcaagaagatcaaacctgaagccttcgaagccaacagattctacaccgtgatcaacaaaaagagcggcgagatcgtgcccatggaggtgaacttcaacttcgacgaccccaacctgatcatcctgcctctggcctttggcaagagacagggcagagaattcatctggaacgacctgctgtccctggaaaccggcagcctgaagctggccaacggaagagtgatcgagaagacactgtacaacagaagaacccggcaggatgagcctgccctgttcgtggccctgaccttcgagcggcgggaggtcctggactcctccaatatcaaaccaatgaacctgatcggcgtggcaagaggcgaaaacatccccgccgtgatcgccctgaccgaccccgagggctgcccactgagccggtttaaggatagcctgggaaacccaacccacatcctgagaatcggcgagagctataaggagaagcagcggaccatccaggccaagaaggaggtggagcagcggagagccggcggctacagccggaagtacgccagcaaagccaagaatctggcagacgatatggtgagaaacaccgctagagatctgctgtactacgccgtgacccaggatgccatgctgatcttcgccaacctgagccggggcttcggccggcagggcaagcggaccttcatggccgagagacagtacacacggatggaggactggctgaccgccaagctggcctacgagggcctgagcaagacctacctgtccaagacactggcccagtacacctccaagacatgcagcaactgtgggtttaccatcaccagcgccgactacgacagggtgctggagaagctgaagaagacagcaacaggctggatgaccacaattaacggcaaggagctgaaggtggagggccagattacctactacaacagatacaagagacagaacgtagtcaaggacctgtccgtcgagctggatagactgagcgaagaatctgtgaacaacgacatctcctcctggacaaagggcagaagcggagaagctctgagcctcctgaagaaaagattctcccatagacccgtgcaggagaagttcgtgtgcctgaactgcggcttcgagacacacgcagccgagcaagccgccctgaacatcgccagatcctggctgttcctgcggagccaggagtacaagaaataccagacaaacaagacaaccggcaacaccgataagagagccttcgtcgagacctggcagtccttttaccggaagaagcttaaggaggtgtggaaacctgccgtgcggtctggcggatctggcggaggctccagcaaggcccccatcaccttcggcgacctggccatctacttcagccaggaggagtgggagtggctgagccccatccagaaggacctgtacgaggacgtgatgctggagaactacaggaacctggtgagcctgggcctgagcttcaggaggcccaacgtgatcaccctgctggagaagggcaaggccccctggatggtggagcccgtgaggaggaggcaggcccccgacagcggcagcaagtgcggcggcccaagcagcggcgcccctcctcccagcggcggcagcccagccggctccccaacctctaccgaggagggcacctctgagtccgccacccccgagagcggccctggcacctccaccgagcccagcgagggcagcgcacccggcagccctgccggcagccccacctccacagaggagggaaccagcaccgagcccagcgaaggcagcgccccaggcaccagcaccgagcctagtgagcaggagattaaacggatcaacaagatcagaagaagacttgtgaaagacagcaacaccaagaaggccggcaagacaggccccatgaaaaccctgctggttagagtgatgacacccgatctgagagagcggctggaaaacctgagaaagaagcctgaaaatatcccccagcccatcagcaatacatctagagccaacctgaataagctgctgaccgattacaccgaaatgaagaaggcgatcctgcatgtgtactgggaagagttccagaaggaccctgtgggcctgatgagccgggtggcccagcctgccagcaagaagatcgatcagaacaagctgaaacctgagatggacgagaagggcaacctgaccaccgccggctttgcctgctctcagtgtggccagcccctgttcgtgtacaagctggagcaggtgtctgagaagggcaaggcttacaccaactacttcggacggtgcaatgtggccgagcacgaaaagctgatcctgctggcccagctgaagcccgagaaggatagcgacgaagccgtgacatatagcctgggaaagtttgggcagagggccctggatttctacagcattcatgtgaccaaggagtccacccaccccgtgaagcccctggcccagatcgccggaaacagatacgcctccggacctgtgggaaaggccctgagcgacgcatgtatgggcacaatcgcctccttcctgtctaagtaccaggacatcatcatcgaacaccagaaggtggtgaagggcaaccagaagagactggagagcctgcgggagctggccggcaaggaaaacctggaataccctagcgtgaccctgccacctcagcctcacaccaaggagggcgttgatgcctacaacgaagtgatcgcccgggtgcgaatgtgggtgaacctgaacctgtggcagaagctgaagctaagcagagatgatgccaagcctctgctgagactgaagggattcccttcctttcctctggtcgagagacaggccaacgaagtggactggtgggacatggtgtgtaacgtgaagaagctgatcaacgagaaaaaggaggatggcaaggtgttttggcagaatctggctggctacaagagacaggaagccctgagaccatacctgagcagcgaggaagatcggaagaagggaaagaaattcgctcggtaccagctgggcgacctgctgctgcacctggaaaagaagcacggcgaggactggggaaaggtgtacgacgaggcctgggagcggattgacaagaaagtggaaggcctgagcaagcacatcaagctggaagaggaacggagaagcgaggacgcccagagcaaggccgccctgaccgactggctgcgggctaaggccagcttcgtgatcgagggcctgaaggaggccgacaaggacgagttctgcagatgcgagctgaagctgcagaagtggtacggggacctgcggggaaagcccttcgccatcgaagccgagaacagcatcctggacatcagcggcttcagcaagcagtacaactgtgccttcatctggcagaaggacggcgtgaagaagctgaacctgtacctgatcatcaactacttcaagggcggcaagctgcggttcaagaagatcaaacctgaagccttcgaagccaacagattctacaccgtgatcaacaaaaagagcggcgagatcgtgcccatggaggtgaacttcaacttcgacgaccccaacctgatcatcctgcctctggcctttggcaagagacagggcagagaattcatctggaacgacctgctgtccctggaaaccggcagcctgaagctggccaacggaagagtgatcgagaagacactgtacaacagaagaacccggcaggatgagcctgccctgttcgtggccctgaccttcgagcggcgggaggtcctggactcctccaatatcaaaccaatgaacctgatcggcgtggcaagaggcgaaaacatccccgccgtgatcgccctgaccgaccccgagggctgcccactgagccggtttaaggatagcctgggaaacccaacccacatcctgagaatcggcgagagctataaggagaagcagcggaccatccaggccaagaaggaggtggagcagcggagagccggcggctacagccggaagtacgccagcaaagccaagaatctggcagacgatatggtgagaaacaccgctagagatctgctgtactacgccgtgacccaggatgccatgctgatcttcgccaacctgagccggggcttcggccggcagggcaagcggaccttcatggccgagagacagtacacacggatggaggactggctgaccgccaagctggcctacgagggcctgagcaagacctacctgtccaagacactggcccagtacacctccaagacatgcagcaactgtgggtttaccatcaccagcgccgactacgacagggtgctggagaagctgaagaagacagcaacaggctggatgaccacaattaacggcaaggagctgaaggtggagggccagattacctactacaacagatacaagagacagaacgtagtcaaggacctgtccgtcgagctggatagactgagcgaagaatctgtgaacaacgacatctcctcctggacaaagggcagaagcggagaagctctgagcctcctgaagaaaagattctcccatagacccgtgcaggagaagttcgtgtgcctgaactgcggcttcgagacacacgcagccgagcaagccgccctgaacatcgccagatcctggctgttcctgcggagccaggagtacaagaaataccagacaaacaagacaaccggcaacaccgataagagagccttcgtcgagacctggcagtccttttaccggaagaagcttaaggaggtgtggaaacctgccgtgcggtctggcggatctggcggaggctcctagcaaggcccccatcaccttcggcgacctggccatctacttcagccaggaggagtgggagtggctgagccccatccagaaggacctgtacgaggacgtgatgctggagaactacaggaacctggtgagcctgggcctgagcttcaggaggcccaacgtgatcaccctgctggagaagggcaaggccccctggatggtggagcccgtgaggaggaggcaggcccccgacagcggcagcaagtgcggatctggctccggcagcggccccaagaaaaagagaaaagtctaagctgccttctgcggggcttgccttctggccatgcccttcttctctcccttgcacctgtacctcttggtctttgaataaagcctgagtaggaaggctagcaaaaaaaaaaaaaaaaaaaaaaaaaaaaaaaaaaaaaaaaaaaaaaaaaaaaaaaaaaaaaaaaaaaaaaaaaaaaaaaa

SEQ ID NO: 15548 - RNA, 9485 nt, synthetic construct
  source 1..9485: mol_type = other RNA
aggaaataagagagaaaagaagagtaagaagaaatataagagccaccatggcccctaagaagaagcgtaaagtgagccggatggaacgcctcgtctacgaggtgcggcagaagtgcagaaacatcgaggacatctgcatctcctgcggatctctgaacgtgaccctggagcacccactgttcatcggcggcatgtgccagaactgtaaaaactgttttctggagtgtgcctatcaatacgacgatgacggctaccagagctactgcaccatctgttgcggcggaagagaggtgctgatgtgtggaaataacaactgctgccggtgcttctgcgtggaatgcgtggacctgctggtgggccccggcgccgcccaggccgctattaaggaagatccttggaactgctacatgtgcggccacaagggcacatacggcctgctgagacggagagaggactggcctagcagactgcagatgttcttcgccaataaccacgaccaggagttcgacccccctaaggtgtaccctcccgtccccgccgagaagagaaagcccatccgggtcctgagcctgttcgatggcatcgccaccggtctgctggtgctgaaggacctgggcatccaggtggataggtacattgcctccgaggtgtgcgaggactccatcaccgtgggaatggtgcgtcatcagggcaagatcatgtacgtgggcgacgtgcggagcgtgacacagaagcatatccaggagtggggccctttcgacctggtgatcggcggcagcccttgcaatgacctgagcatcgtgaacccagcccggaagggcctgtacgagggaaccggcagactgttcttcgagttttacagactgctgcacgacgcccggcctaaggaaggcgacgaccggcccttcttttggctgttcgagaatgtggtggccatgggagtcagcgacaagcgggatattagccggttcctggagagcaaccccgtgatgatcgatgccaaggaagtgagcgccgcccaccgggccagatacttctggggcaatctgcctggcatgaacagacccctggccagcaccgtgaacgacaagctggagctgcaggagtgcctggagcacggccggatcgccaagttcagcaaggtgagaaccatcaccacccgaagcaacagcatcaaacaaggcaaggaccagcactttcctgtgttcatgaacgagaaggaggacatcctgtggtgtaccgagatggagagagtgttcgggttcccagtccactacacagatgtcagcaacatgtctagactggccagacagagactgctgggaagaagctggtccgtccctgtgatcagacacctgttcgcccctctgaaggagtacttcgcctgcgtgagcagcggcaacagcaacgccaacagccggggccccagcttctctagcggcctggtgccactgtccctgagagggagccacatgggccccatggagatctacaaaaccgtgagcgcctggaagcggcagcctgtgcgcgtgctgagcctgtttcggaatatcgataaagtcctgaaaagcctgggattcctggagagcggctctggctccggcggtggcaccctgaagtacgtggaggatgtgacaaacgtggtcagacgggatgtggagaagtggggccccttcgatctggtgtacggcagcacccaacccctgggcagctcttgtgaccggtgccctggctggtacatgtttcagttccaccggatcctgcagtacgccctgccgagacaggagtcccagcggccattcttttggattttcatggacaacttgctgctgaccgaggatgaccaggaaactaccactcggttcctgcagaccgaagccgtgaccctgcaggacgtgagaggccgggactaccagaacgccatgcgggtgtggtccaacatccctggactgaaaagcaagcacgcacctctgacccctaaagaagaggagtacctgcaggcccaggtgcggagcagaagcaagctggacgcccctaaggtggatctgctggtgaagaattgcctcctgcccctgagagagtacttcaagtatttcagccagaatagtctgcccctgggaggcagcggcggcggcgccctggtgacatttgaggacgtcgccgtgcggttcacccaggaggaatgggctctgctggatccttctcagaaaatcctgtaccgggacgtgatgagagagacataccggaatctgacctccgtgggcatcaactgggaatgttgggaccttgaagcctgcttcagaagcctgggaagaaacctgagagtgcaggtggtgaagagaaagtgcgagctgaccaacagcggcccctgcgccgagggcggcccaagcagcggcgcccctcctcccagcggcggcagcccagccggctccccaacctctaccgaggagggcacctctgagtccgccacccccgagagcggccctggcacctccaccgagcccagcgagggcagcgcacccggcagccctgccggcagccccacctccacagaggagggaaccagcaccgagcccagcgaaggcagcgccccaggcaccagcaccgagcctagtgagcaggagattaaacggatcaacaagatcagaagaagacttgtgaaagacagcaacaccaagaaggccggcaagacaggccccatgaaaaccctgctggttagagtgatgacacccgatctgagagagcggctggaaaacctgagaaagaagcctgaaaatatcccccagcccatcagcaatacatctagagccaacctgaataagctgctgaccgattacaccgaaatgaagaaggcgatcctgcatgtgtactgggaagagttccagaaggaccctgtgggcctgatgagccgggtggcccagcctgccagcaagaagatcgatcagaacaagctgaaacctgagatggacgagaagggcaacctgaccaccgccggctttgcctgctctcagtgtggccagcccctgttcgtgtacaagctggagcaggtgtctgagaagggcaaggcttacaccaactacttcggacggtgcaatgtggccgagcacgaaaagctgatcctgctggcccagctgaagcccgagaaggatagcgacgaagccgtgacatatagcctgggaaagtttgggcagagggccctggatttctacagcattcatgtgaccaaggagtccacccaccccgtgaagcccctggcccagatcgccggaaacagatacgcctccggacctgtgggaaaggccctgagcgacgcatgtatgggcacaatcgcctccttcctgtctaagtaccaggacatcatcatcgaacaccagaaggtggtgaagggcaaccagaagagactggagagcctgcgggagctggccggcaaggaaaacctggaataccctagcgtgaccctgccacctcagcctcacaccaaggagggcgttgatgcctacaacgaagtgatcgcccgggtgcgaatgtgggtgaacctgaacctgtggcagaagctgaagctaagcagagatgatgccaagcctctgctgagactgaagggattcccttcctttcctctggtcgagagacaggccaacgaagtggactggtgggacatggtgtgtaacgtgaagaagctgatcaacgagaaaaaggaggatggcaaggtgttttggcagaatctggctggctacaagagacaggaagccctgagaccatacctgagcagcgaggaagatcggaagaagggaaagaaattcgctcggtaccagctgggcgacctgctgctgcacctggaaaagaagcacggcgaggactggggaaaggtgtacgacgaggcctgggagcggattgacaagaaagtggaaggcctgagcaagcacatcaagctggaagaggaacggagaagcgaggacgcccagagcaaggccgccctgaccgactggctgcgggctaaggccagcttcgtgatcgagggcctgaaggaggccgacaaggacgagttctgcagatgcgagctgaagctgcagaagtggtacggggacctgcggggaaagcccttcgccatcgaagccgagaacagcatcctggacatcagcggcttcagcaagcagtacaactgtgccttcatctggcagaaggacggcgtgaagaagctgaacctgtacctgatcatcaactacttcaagggcggcaagctgcggttcaagaagatcaaacctgaagccttcgaagccaacagattctacaccgtgatcaacaaaaagagcggcgagatcgtgcccatggaggtgaacttcaacttcgacgaccccaacctgatcatcctgcctctggcctttggcaagagacagggcagagaattcatctggaacgacctgctgtccctggaaaccggcagcctgaagctggccaacggaagagtgatcgagaagacactgtacaacagaagaacccggcaggatgagcctgccctgttcgtggccctgaccttcgagcggcgggaggtcctggactcctccaatatcaaaccaatgaacctgatcggcgtggcaagaggcgaaaacatccccgccgtgatcgccctgaccgaccccgagggctgcccactgagccggtttaaggatagcctgggaaacccaacccacatcctgagaatcggcgagagctataaggagaagcagcggaccatccaggccaagaaggaggtggagcagcggagagccggcggctacagccggaagtacgccagcaaagccaagaatctggcagacgatatggtgagaaacaccgctagagatctgctgtactacgccgtgacccaggatgccatgctgatcttcgccaacctgagccggggcttcggccggcagggcaagcggaccttcatggccgagagacagtacacacggatggaggactggctgaccgccaagctggcctacgagggcctgagcaagacctacctgtccaagacactggcccagtacacctccaagacatgcagcaactgtgggtttaccatcaccagcgccgactacgacagggtgctggagaagctgaagaagacagcaacaggctggatgaccacaattaacggcaaggagctgaaggtggagggccagattacctactacaacagatacaagagacagaacgtagtcaaggacctgtccgtcgagctggatagactgagcgaagaatctgtgaacaacgacatctcctcctggacaaagggcagaagcggagaagctctgagcctcctgaagaaaagattctcccatagacccgtgcaggagaagttcgtgtgcctgaactgcggcttcgagacacacgcagccgagcaagccgccctgaacatcgccagatcctggctgttcctgcggagccaggagtacaagaaataccagacaaacaagacaaccggcaacaccgataagagagccttcgtcgagacctggcagtccttttaccggaagaagcttaaggaggtgtggaaacctgccgtgcggtctggcggatctggcggaggctccatggtgaccttcgaggacgtggccgtgcacttcaccaagaccgagtggaccggcctgagccccgcccagagggccctgtacaggagcgtgatgctggagaacttcggcaacctgaccgccctgggctaccccgtgcccaagcccgccctgatcagcctgctggagggcggcgacatggcctggggcctggaggcccaggacgacccccccgccgagaggaccaagaacgtgtgcaaggtgatcggcggcccaagcagcggcgcccctcctcccagcggcggcagcccagccggctccccaacctctaccgaggagggcacctctgagtccgccacccccgagagcggccctggcacctccaccgagcccagcgagggcagcgcacccggcagccctgccggcagccccacctccacagaggagggaaccagcaccgagcccagcgaaggcagcgccccaggcaccagcaccgagcctagtgagcaggagattaaacggatcaacaagatcagaagaagacttgtgaaagacagcaacaccaagaaggccggcaagacaggccccatgaaaaccctgctggttagagtgatgacacccgatctgagagagcggctggaaaacctgagaaagaagcctgaaaatatcccccagcccatcagcaatacatctagagccaacctgaataagctgctgaccgattacaccgaaatgaagaaggcgatcctgcatgtgtactgggaagagttccagaaggaccctgtgggcctgatgagccgggtggcccagcctgccagcaagaagatcgatcagaacaagctgaaacctgagatggacgagaagggcaacctgaccaccgccggctttgcctgctctcagtgtggccagcccctgttcgtgtacaagctggagcaggtgtctgagaagggcaaggcttacaccaactacttcggacggtgcaatgtggccgagcacgaaaagctgatcctgctggcccagctgaagcccgagaaggatagcgacgaagccgtgacatatagcctgggaaagtttgggcagagggccctggatttctacagcattcatgtgaccaaggagtccacccaccccgtgaagcccctggcccagatcgccggaaacagatacgcctccggacctgtgggaaaggccctgagcgacgcatgtatgggcacaatcgcctccttcctgtctaagtaccaggacatcatcatcgaacaccagaaggtggtgaagggcaaccagaagagactggagagcctgcgggagctggccggcaaggaaaacctggaataccctagcgtgaccctgccacctcagcctcacaccaaggagggcgttgatgcctacaacgaagtgatcgcccgggtgcgaatgtgggtgaacctgaacctgtggcagaagctgaagctaagcagagatgatgccaagcctctgctgagactgaagggattcccttcctttcctctggtcgagagacaggccaacgaagtggactggtgggacatggtgtgtaacgtgaagaagctgatcaacgagaaaaaggaggatggcaaggtgttttggcagaatctggctggctacaagagacaggaagccctgagaccatacctgagcagcgaggaagatcggaagaagggaaagaaattcgctcggtaccagctgggcgacctgctgctgcacctggaaaagaagcacggcgaggactggggaaaggtgtacgacgaggcctgggagcggattgacaagaaagtggaaggcctgagcaagcacatcaagctggaagaggaacggagaagcgaggacgcccagagcaaggccgccctgaccgactggctgcgggctaaggccagcttcgtgatcgagggcctgaaggaggccgacaaggacgagttctgcagatgcgagctgaagctgcagaagtggtacggggacctgcggggaaagcccttcgccatcgaagccgagaacagcatcctggacatcagcggcttcagcaagcagtacaactgtgccttcatctggcagaaggacggcgtgaagaagctgaacctgtacctgatcatcaactacttcaagggcggcaagctgcggttcaagaagatcaaacctgaagccttcgaagccaacagattctacaccgtgatcaacaaaaagagcggcgagatcgtgcccatggaggtgaacttcaacttcgacgaccccaacctgatcatcctgcctctggcctttggcaagagacagggcagagaattcatctggaacgacctgctgtccctggaaaccggcagcctgaagctggccaacggaagagtgatcgagaagacactgtacaacagaagaacccggcaggatgagcctgccctgttcgtggccctgaccttcgagcggcgggaggtcctggactcctccaatatcaaaccaatgaacctgatcggcgtggcaagaggcgaaaacatccccgccgtgatcgccctgaccgaccccgagggctgcccactgagccggtttaaggatagcctgggaaacccaacccacatcctgagaatcggcgagagctataaggagaagcagcggaccatccaggccaagaaggaggtggagcagcggagagccggcggctacagccggaagtacgccagcaaagccaagaatctggcagacgatatggtgagaaacaccgctagagatctgctgtactacgccgtgacccaggatgccatgctgatcttcgccaacctgagccggggcttcggccggcagggcaagcggaccttcatggccgagagacagtacacacggatggaggactggctgaccgccaagctggcctacgagggcctgagcaagacctacctgtccaagacactggcccagtacacctccaagacatgcagcaactgtgggtttaccatcaccagcgccgactacgacagggtgctggagaagctgaagaagacagcaacaggctggatgaccacaattaacggcaaggagctgaaggtggagggccagattacctactacaacagatacaagagacagaacgtagtcaaggacctgtccgtcgagctggatagactgagcgaagaatctgtgaacaacgacatctcctcctggacaaagggcagaagcggagaagctctgagcctcctgaagaaaagattctcccatagacccgtgcaggagaagttcgtgtgcctgaactgcggcttcgagacacacgcagccgagcaagccgccctgaacatcgccagatcctggctgttcctgcggagccaggagtacaagaaataccagacaaacaagacaaccggcaacaccgataagagagccttcgtcgagacctggcagtccttttaccggaagaagcttaaggaggtgtggaaacctgccgtgcggtctggcggatctggcggaggctcctatggtgaccttcgaggacgtggccgtgcacttcaccaagaccgagtggaccggcctgagccccgcccagagggccctgtacaggagcgtgatgctggagaacttcggcaacctgaccgccctgggctaccccgtgcccaagcccgccctgatcagcctgctggagggcggcgacatggcctggggcctggaggcccaggacgacccccccgccgagaggaccaagaacgtgtgcaaggtgatcggatctggctccggcagcggccccaagaaaaagagaaaagtctaagctgccttctgcggggcttgccttctggccatgcccttcttctctcccttgcacctgtacctcttggtctttgaataaagcctgagtaggaaggctagcaaaaaaaaaaaaaaaaaaaaaaaaaaaaaaaaaaaaaaaaaaaaaaaaaaaaaaaaaaaaaaaaaaaaaaaaaaaaaaaa

SEQ ID NO: 15549 - RNA, 9485 nt, synthetic construct
  source 1..9485: mol_type = other RNA
aggaaataagagagaaaagaagagtaagaagaaatataagagccaccatggcccctaagaagaagcgtaaagtgagccggatggaacgcctcgtctacgaggtgcggcagaagtgcagaaacatcgaggacatctgcatctcctgcggatctctgaacgtgaccctggagcacccactgttcatcggcggcatgtgccagaactgtaaaaactgttttctggagtgtgcctatcaatacgacgatgacggctaccagagctactgcaccatctgttgcggcggaagagaggtgctgatgtgtggaaataacaactgctgccggtgcttctgcgtggaatgcgtggacctgctggtgggccccggcgccgcccaggccgctattaaggaagatccttggaactgctacatgtgcggccacaagggcacatacggcctgctgagacggagagaggactggcctagcagactgcagatgttcttcgccaataaccacgaccaggagttcgacccccctaaggtgtaccctcccgtccccgccgagaagagaaagcccatccgggtcctgagcctgttcgatggcatcgccaccggtctgctggtgctgaaggacctgggcatccaggtggataggtacattgcctccgaggtgtgcgaggactccatcaccgtgggaatggtgcgtcatcagggcaagatcatgtacgtgggcgacgtgcggagcgtgacacagaagcatatccaggagtggggccctttcgacctggtgatcggcggcagcccttgcaatgacctgagcatcgtgaacccagcccggaagggcctgtacgagggaaccggcagactgttcttcgagttttacagactgctgcacgacgcccggcctaaggaaggcgacgaccggcccttcttttggctgttcgagaatgtggtggccatgggagtcagcgacaagcgggatattagccggttcctggagagcaaccccgtgatgatcgatgccaaggaagtgagcgccgcccaccgggccagatacttctggggcaatctgcctggcatgaacagacccctggccagcaccgtgaacgacaagctggagctgcaggagtgcctggagcacggccggatcgccaagttcagcaaggtgagaaccatcaccacccgaagcaacagcatcaaacaaggcaaggaccagcactttcctgtgttcatgaacgagaaggaggacatcctgtggtgtaccgagatggagagagtgttcgggttcccagtccactacacagatgtcagcaacatgtctagactggccagacagagactgctgggaagaagctggtccgtccctgtgatcagacacctgttcgcccctctgaaggagtacttcgcctgcgtgagcagcggcaacagcaacgccaacagccggggccccagcttctctagcggcctggtgccactgtccctgagagggagccacatgggccccatggagatctacaaaaccgtgagcgcctggaagcggcagcctgtgcgcgtgctgagcctgtttcggaatatcgataaagtcctgaaaagcctgggattcctggagagcggctctggctccggcggtggcaccctgaagtacgtggaggatgtgacaaacgtggtcagacgggatgtggagaagtggggccccttcgatctggtgtacggcagcacccaacccctgggcagctcttgtgaccggtgccctggctggtacatgtttcagttccaccggatcctgcagtacgccctgccgagacaggagtcccagcggccattcttttggattttcatggacaacttgctgctgaccgaggatgaccaggaaactaccactcggttcctgcagaccgaagccgtgaccctgcaggacgtgagaggccgggactaccagaacgccatgcgggtgtggtccaacatccctggactgaaaagcaagcacgcacctctgacccctaaagaagaggagtacctgcaggcccaggtgcggagcagaagcaagctggacgcccctaaggtggatctgctggtgaagaattgcctcctgcccctgagagagtacttcaagtatttcagccagaatagtctgcccctgggaggcagcggcggcggcgccctggtgacatttgaggacgtcgccgtgcggttcacccaggaggaatgggctctgctggatccttctcagaaaatcctgtaccgggacgtgatgagagagacataccggaatctgacctccgtgggcatcaactgggaatgttgggaccttgaagcctgcttcagaagcctgggaagaaacctgagagtgcaggtggtgaagagaaagtgcgagctgaccaacagcggcccctgcgccgagggcggcccaagcagcggcgcccctcctcccagcggcggcagcccagccggctccccaacctctaccgaggagggcacctctgagtccgccacccccgagagcggccctggcacctccaccgagcccagcgagggcagcgcacccggcagccctgccggcagccccacctccacagaggagggaaccagcaccgagcccagcgaaggcagcgccccaggcaccagcaccgagcctagtgagcaggagattaaacggatcaacaagatcagaagaagacttgtgaaagacagcaacaccaagaaggccggcaagacaggccccatgaaaaccctgctggttagagtgatgacacccgatctgagagagcggctggaaaacctgagaaagaagcctgaaaatatcccccagcccatcagcaatacatctagagccaacctgaataagctgctgaccgattacaccgaaatgaagaaggcgatcctgcatgtgtactgggaagagttccagaaggaccctgtgggcctgatgagccgggtggcccagcctgccagcaagaagatcgatcagaacaagctgaaacctgagatggacgagaagggcaacctgaccaccgccggctttgcctgctctcagtgtggccagcccctgttcgtgtacaagctggagcaggtgtctgagaagggcaaggcttacaccaactacttcggacggtgcaatgtggccgagcacgaaaagctgatcctgctggcccagctgaagcccgagaaggatagcgacgaagccgtgacatatagcctgggaaagtttgggcagagggccctggatttctacagcattcatgtgaccaaggagtccacccaccccgtgaagcccctggcccagatcgccggaaacagatacgcctccggacctgtgggaaaggccctgagcgacgcatgtatgggcacaatcgcctccttcctgtctaagtaccaggacatcatcatcgaacaccagaaggtggtgaagggcaaccagaagagactggagagcctgcgggagctggccggcaaggaaaacctggaataccctagcgtgaccctgccacctcagcctcacaccaaggagggcgttgatgcctacaacgaagtgatcgcccgggtgcgaatgtgggtgaacctgaacctgtggcagaagctgaagctaagcagagatgatgccaagcctctgctgagactgaagggattcccttcctttcctctggtcgagagacaggccaacgaagtggactggtgggacatggtgtgtaacgtgaagaagctgatcaacgagaaaaaggaggatggcaaggtgttttggcagaatctggctggctacaagagacaggaagccctgagaccatacctgagcagcgaggaagatcggaagaagggaaagaaattcgctcggtaccagctgggcgacctgctgctgcacctggaaaagaagcacggcgaggactggggaaaggtgtacgacgaggcctgggagcggattgacaagaaagtggaaggcctgagcaagcacatcaagctggaagaggaacggagaagcgaggacgcccagagcaaggccgccctgaccgactggctgcgggctaaggccagcttcgtgatcgagggcctgaaggaggccgacaaggacgagttctgcagatgcgagctgaagctgcagaagtggtacggggacctgcggggaaagcccttcgccatcgaagccgagaacagcatcctggacatcagcggcttcagcaagcagtacaactgtgccttcatctggcagaaggacggcgtgaagaagctgaacctgtacctgatcatcaactacttcaagggcggcaagctgcggttcaagaagatcaaacctgaagccttcgaagccaacagattctacaccgtgatcaacaaaaagagcggcgagatcgtgcccatggaggtgaacttcaacttcgacgaccccaacctgatcatcctgcctctggcctttggcaagagacagggcagagaattcatctggaacgacctgctgtccctggaaaccggcagcctgaagctggccaacggaagagtgatcgagaagacactgtacaacagaagaacccggcaggatgagcctgccctgttcgtggccctgaccttcgagcggcgggaggtcctggactcctccaatatcaaaccaatgaacctgatcggcgtggcaagaggcgaaaacatccccgccgtgatcgccctgaccgaccccgagggctgcccactgagccggtttaaggatagcctgggaaacccaacccacatcctgagaatcggcgagagctataaggagaagcagcggaccatccaggccaagaaggaggtggagcagcggagagccggcggctacagccggaagtacgccagcaaagccaagaatctggcagacgatatggtgagaaacaccgctagagatctgctgtactacgccgtgacccaggatgccatgctgatcttcgccaacctgagccggggcttcggccggcagggcaagcggaccttcatggccgagagacagtacacacggatggaggactggctgaccgccaagctggcctacgagggcctgagcaagacctacctgtccaagacactggcccagtacacctccaagacatgcagcaactgtgggtttaccatcaccagcgccgactacgacagggtgctggagaagctgaagaagacagcaacaggctggatgaccacaattaacggcaaggagctgaaggtggagggccagattacctactacaacagatacaagagacagaacgtagtcaaggacctgtccgtcgagctggatagactgagcgaagaatctgtgaacaacgacatctcctcctggacaaagggcagaagcggagaagctctgagcctcctgaagaaaagattctcccatagacccgtgcaggagaagttcgtgtgcctgaactgcggcttcgagacacacgcagccgagcaagccgccctgaacatcgccagatcctggctgttcctgcggagccaggagtacaagaaataccagacaaacaagacaaccggcaacaccgataagagagccttcgtcgagacctggcagtccttttaccggaagaagcttaaggaggtgtggaaacctgccgtgcggtctggcggatctggcggaggctccagcaaggcccccgtgaccttcggcgacctggccatctacttcagccaggaggagtgggagtggctgagccccatccagaaggacctgtacgaggacgtgatgctggagaactaccagaacctggtgagcctgggcctgagcttcaggaggcccaacgtgatcaccctgctggagaagggcaaggccccctggatggtggagcccgtgaagaggaggaggggcctggacctgggcagcaagtgcggcggcccaagcagcggcgcccctcctcccagcggcggcagcccagccggctccccaacctctaccgaggagggcacctctgagtccgccacccccgagagcggccctggcacctccaccgagcccagcgagggcagcgcacccggcagccctgccggcagccccacctccacagaggagggaaccagcaccgagcccagcgaaggcagcgccccaggcaccagcaccgagcctagtgagcaggagattaaacggatcaacaagatcagaagaagacttgtgaaagacagcaacaccaagaaggccggcaagacaggccccatgaaaaccctgctggttagagtgatgacacccgatctgagagagcggctggaaaacctgagaaagaagcctgaaaatatcccccagcccatcagcaatacatctagagccaacctgaataagctgctgaccgattacaccgaaatgaagaaggcgatcctgcatgtgtactgggaagagttccagaaggaccctgtgggcctgatgagccgggtggcccagcctgccagcaagaagatcgatcagaacaagctgaaacctgagatggacgagaagggcaacctgaccaccgccggctttgcctgctctcagtgtggccagcccctgttcgtgtacaagctggagcaggtgtctgagaagggcaaggcttacaccaactacttcggacggtgcaatgtggccgagcacgaaaagctgatcctgctggcccagctgaagcccgagaaggatagcgacgaagccgtgacatatagcctgggaaagtttgggcagagggccctggatttctacagcattcatgtgaccaaggagtccacccaccccgtgaagcccctggcccagatcgccggaaacagatacgcctccggacctgtgggaaaggccctgagcgacgcatgtatgggcacaatcgcctccttcctgtctaagtaccaggacatcatcatcgaacaccagaaggtggtgaagggcaaccagaagagactggagagcctgcgggagctggccggcaaggaaaacctggaataccctagcgtgaccctgccacctcagcctcacaccaaggagggcgttgatgcctacaacgaagtgatcgcccgggtgcgaatgtgggtgaacctgaacctgtggcagaagctgaagctaagcagagatgatgccaagcctctgctgagactgaagggattcccttcctttcctctggtcgagagacaggccaacgaagtggactggtgggacatggtgtgtaacgtgaagaagctgatcaacgagaaaaaggaggatggcaaggtgttttggcagaatctggctggctacaagagacaggaagccctgagaccatacctgagcagcgaggaagatcggaagaagggaaagaaattcgctcggtaccagctgggcgacctgctgctgcacctggaaaagaagcacggcgaggactggggaaaggtgtacgacgaggcctgggagcggattgacaagaaagtggaaggcctgagcaagcacatcaagctggaagaggaacggagaagcgaggacgcccagagcaaggccgccctgaccgactggctgcgggctaaggccagcttcgtgatcgagggcctgaaggaggccgacaaggacgagttctgcagatgcgagctgaagctgcagaagtggtacggggacctgcggggaaagcccttcgccatcgaagccgagaacagcatcctggacatcagcggcttcagcaagcagtacaactgtgccttcatctggcagaaggacggcgtgaagaagctgaacctgtacctgatcatcaactacttcaagggcggcaagctgcggttcaagaagatcaaacctgaagccttcgaagccaacagattctacaccgtgatcaacaaaaagagcggcgagatcgtgcccatggaggtgaacttcaacttcgacgaccccaacctgatcatcctgcctctggcctttggcaagagacagggcagagaattcatctggaacgacctgctgtccctggaaaccggcagcctgaagctggccaacggaagagtgatcgagaagacactgtacaacagaagaacccggcaggatgagcctgccctgttcgtggccctgaccttcgagcggcgggaggtcctggactcctccaatatcaaaccaatgaacctgatcggcgtggcaagaggcgaaaacatccccgccgtgatcgccctgaccgaccccgagggctgcccactgagccggtttaaggatagcctgggaaacccaacccacatcctgagaatcggcgagagctataaggagaagcagcggaccatccaggccaagaaggaggtggagcagcggagagccggcggctacagccggaagtacgccagcaaagccaagaatctggcagacgatatggtgagaaacaccgctagagatctgctgtactacgccgtgacccaggatgccatgctgatcttcgccaacctgagccggggcttcggccggcagggcaagcggaccttcatggccgagagacagtacacacggatggaggactggctgaccgccaagctggcctacgagggcctgagcaagacctacctgtccaagacactggcccagtacacctccaagacatgcagcaactgtgggtttaccatcaccagcgccgactacgacagggtgctggagaagctgaagaagacagcaacaggctggatgaccacaattaacggcaaggagctgaaggtggagggccagattacctactacaacagatacaagagacagaacgtagtcaaggacctgtccgtcgagctggatagactgagcgaagaatctgtgaacaacgacatctcctcctggacaaagggcagaagcggagaagctctgagcctcctgaagaaaagattctcccatagacccgtgcaggagaagttcgtgtgcctgaactgcggcttcgagacacacgcagccgagcaagccgccctgaacatcgccagatcctggctgttcctgcggagccaggagtacaagaaataccagacaaacaagacaaccggcaacaccgataagagagccttcgtcgagacctggcagtccttttaccggaagaagcttaaggaggtgtggaaacctgccgtgcggtctggcggatctggcggaggctcctagcaaggcccccgtgaccttcggcgacctggccatctacttcagccaggaggagtgggagtggctgagccccatccagaaggacctgtacgaggacgtgatgctggagaactaccagaacctggtgagcctgggcctgagcttcaggaggcccaacgtgatcaccctgctggagaagggcaaggccccctggatggtggagcccgtgaagaggaggaggggcctggacctgggcagcaagtgcggatctggctccggcagcggccccaagaaaaagagaaaagtctaagctgccttctgcggggcttgccttctggccatgcccttcttctctcccttgcacctgtacctcttggtctttgaataaagcctgagtaggaaggctagcaaaaaaaaaaaaaaaaaaaaaaaaaaaaaaaaaaaaaaaaaaaaaaaaaaaaaaaaaaaaaaaaaaaaaaaaaaaaaaaa

SEQ ID NO: 15550 - RNA, 9485 nt, synthetic construct
  source 1..9485: mol_type = other RNA
aggaaataagagagaaaagaagagtaagaagaaatataagagccaccatggcccctaagaagaagcgtaaagtgagccggatggaacgcctcgtctacgaggtgcggcagaagtgcagaaacatcgaggacatctgcatctcctgcggatctctgaacgtgaccctggagcacccactgttcatcggcggcatgtgccagaactgtaaaaactgttttctggagtgtgcctatcaatacgacgatgacggctaccagagctactgcaccatctgttgcggcggaagagaggtgctgatgtgtggaaataacaactgctgccggtgcttctgcgtggaatgcgtggacctgctggtgggccccggcgccgcccaggccgctattaaggaagatccttggaactgctacatgtgcggccacaagggcacatacggcctgctgagacggagagaggactggcctagcagactgcagatgttcttcgccaataaccacgaccaggagttcgacccccctaaggtgtaccctcccgtccccgccgagaagagaaagcccatccgggtcctgagcctgttcgatggcatcgccaccggtctgctggtgctgaaggacctgggcatccaggtggataggtacattgcctccgaggtgtgcgaggactccatcaccgtgggaatggtgcgtcatcagggcaagatcatgtacgtgggcgacgtgcggagcgtgacacagaagcatatccaggagtggggccctttcgacctggtgatcggcggcagcccttgcaatgacctgagcatcgtgaacccagcccggaagggcctgtacgagggaaccggcagactgttcttcgagttttacagactgctgcacgacgcccggcctaaggaaggcgacgaccggcccttcttttggctgttcgagaatgtggtggccatgggagtcagcgacaagcgggatattagccggttcctggagagcaaccccgtgatgatcgatgccaaggaagtgagcgccgcccaccgggccagatacttctggggcaatctgcctggcatgaacagacccctggccagcaccgtgaacgacaagctggagctgcaggagtgcctggagcacggccggatcgccaagttcagcaaggtgagaaccatcaccacccgaagcaacagcatcaaacaaggcaaggaccagcactttcctgtgttcatgaacgagaaggaggacatcctgtggtgtaccgagatggagagagtgttcgggttcccagtccactacacagatgtcagcaacatgtctagactggccagacagagactgctgggaagaagctggtccgtccctgtgatcagacacctgttcgcccctctgaaggagtacttcgcctgcgtgagcagcggcaacagcaacgccaacagccggggccccagcttctctagcggcctggtgccactgtccctgagagggagccacatgggccccatggagatctacaaaaccgtgagcgcctggaagcggcagcctgtgcgcgtgctgagcctgtttcggaatatcgataaagtcctgaaaagcctgggattcctggagagcggctctggctccggcggtggcaccctgaagtacgtggaggatgtgacaaacgtggtcagacgggatgtggagaagtggggccccttcgatctggtgtacggcagcacccaacccctgggcagctcttgtgaccggtgccctggctggtacatgtttcagttccaccggatcctgcagtacgccctgccgagacaggagtcccagcggccattcttttggattttcatggacaacttgctgctgaccgaggatgaccaggaaactaccactcggttcctgcagaccgaagccgtgaccctgcaggacgtgagaggccgggactaccagaacgccatgcgggtgtggtccaacatccctggactgaaaagcaagcacgcacctctgacccctaaagaagaggagtacctgcaggcccaggtgcggagcagaagcaagctggacgcccctaaggtggatctgctggtgaagaattgcctcctgcccctgagagagtacttcaagtatttcagccagaatagtctgcccctgggaggcagcggcggcggcgccctggtgacatttgaggacgtcgccgtgcggttcacccaggaggaatgggctctgctggatccttctcagaaaatcctgtaccgggacgtgatgagagagacataccggaatctgacctccgtgggcatcaactgggaatgttgggaccttgaagcctgcttcagaagcctgggaagaaacctgagagtgcaggtggtgaagagaaagtgcgagctgaccaacagcggcccctgcgccgagggcggcccaagcagcggcgcccctcctcccagcggcggcagcccagccggctccccaacctctaccgaggagggcacctctgagtccgccacccccgagagcggccctggcacctccaccgagcccagcgagggcagcgcacccggcagccctgccggcagccccacctccacagaggagggaaccagcaccgagcccagcgaaggcagcgccccaggcaccagcaccgagcctagtgagcaggagattaaacggatcaacaagatcagaagaagacttgtgaaagacagcaacaccaagaaggccggcaagacaggccccatgaaaaccctgctggttagagtgatgacacccgatctgagagagcggctggaaaacctgagaaagaagcctgaaaatatcccccagcccatcagcaatacatctagagccaacctgaataagctgctgaccgattacaccgaaatgaagaaggcgatcctgcatgtgtactgggaagagttccagaaggaccctgtgggcctgatgagccgggtggcccagcctgccagcaagaagatcgatcagaacaagctgaaacctgagatggacgagaagggcaacctgaccaccgccggctttgcctgctctcagtgtggccagcccctgttcgtgtacaagctggagcaggtgtctgagaagggcaaggcttacaccaactacttcggacggtgcaatgtggccgagcacgaaaagctgatcctgctggcccagctgaagcccgagaaggatagcgacgaagccgtgacatatagcctgggaaagtttgggcagagggccctggatttctacagcattcatgtgaccaaggagtccacccaccccgtgaagcccctggcccagatcgccggaaacagatacgcctccggacctgtgggaaaggccctgagcgacgcatgtatgggcacaatcgcctccttcctgtctaagtaccaggacatcatcatcgaacaccagaaggtggtgaagggcaaccagaagagactggagagcctgcgggagctggccggcaaggaaaacctggaataccctagcgtgaccctgccacctcagcctcacaccaaggagggcgttgatgcctacaacgaagtgatcgcccgggtgcgaatgtgggtgaacctgaacctgtggcagaagctgaagctaagcagagatgatgccaagcctctgctgagactgaagggattcccttcctttcctctggtcgagagacaggccaacgaagtggactggtgggacatggtgtgtaacgtgaagaagctgatcaacgagaaaaaggaggatggcaaggtgttttggcagaatctggctggctacaagagacaggaagccctgagaccatacctgagcagcgaggaagatcggaagaagggaaagaaattcgctcggtaccagctgggcgacctgctgctgcacctggaaaagaagcacggcgaggactggggaaaggtgtacgacgaggcctgggagcggattgacaagaaagtggaaggcctgagcaagcacatcaagctggaagaggaacggagaagcgaggacgcccagagcaaggccgccctgaccgactggctgcgggctaaggccagcttcgtgatcgagggcctgaaggaggccgacaaggacgagttctgcagatgcgagctgaagctgcagaagtggtacggggacctgcggggaaagcccttcgccatcgaagccgagaacagcatcctggacatcagcggcttcagcaagcagtacaactgtgccttcatctggcagaaggacggcgtgaagaagctgaacctgtacctgatcatcaactacttcaagggcggcaagctgcggttcaagaagatcaaacctgaagccttcgaagccaacagattctacaccgtgatcaacaaaaagagcggcgagatcgtgcccatggaggtgaacttcaacttcgacgaccccaacctgatcatcctgcctctggcctttggcaagagacagggcagagaattcatctggaacgacctgctgtccctggaaaccggcagcctgaagctggccaacggaagagtgatcgagaagacactgtacaacagaagaacccggcaggatgagcctgccctgttcgtggccctgaccttcgagcggcgggaggtcctggactcctccaatatcaaaccaatgaacctgatcggcgtggcaagaggcgaaaacatccccgccgtgatcgccctgaccgaccccgagggctgcccactgagccggtttaaggatagcctgggaaacccaacccacatcctgagaatcggcgagagctataaggagaagcagcggaccatccaggccaagaaggaggtggagcagcggagagccggcggctacagccggaagtacgccagcaaagccaagaatctggcagacgatatggtgagaaacaccgctagagatctgctgtactacgccgtgacccaggatgccatgctgatcttcgccaacctgagccggggcttcggccggcagggcaagcggaccttcatggccgagagacagtacacacggatggaggactggctgaccgccaagctggcctacgagggcctgagcaagacctacctgtccaagacactggcccagtacacctccaagacatgcagcaactgtgggtttaccatcaccagcgccgactacgacagggtgctggagaagctgaagaagacagcaacaggctggatgaccacaattaacggcaaggagctgaaggtggagggccagattacctactacaacagatacaagagacagaacgtagtcaaggacctgtccgtcgagctggatagactgagcgaagaatctgtgaacaacgacatctcctcctggacaaagggcagaagcggagaagctctgagcctcctgaagaaaagattctcccatagacccgtgcaggagaagttcgtgtgcctgaactgcggcttcgagacacacgcagccgagcaagccgccctgaacatcgccagatcctggctgttcctgcggagccaggagtacaagaaataccagacaaacaagacaaccggcaacaccgataagagagccttcgtcgagacctggcagtccttttaccggaagaagcttaaggaggtgtggaaacctgccgtgcggtctggcggatctggcggaggctccagcaaggcccccgtgaccttcggcgacctggccatctacttcagccaggaggagtgggagtggctgagccccatccagaaggacctgtacgaggacgtgatgctggagaactaccagaacctggtgagcctgggcctgagcttcaggaggcccaacgtgatcgccctgctggagaagggcaaggccccctggatggtggagcccgtgaagaggaggaggggcctggacagcggcagcaagtgcggcggcccaagcagcggcgcccctcctcccagcggcggcagcccagccggctccccaacctctaccgaggagggcacctctgagtccgccacccccgagagcggccctggcacctccaccgagcccagcgagggcagcgcacccggcagccctgccggcagccccacctccacagaggagggaaccagcaccgagcccagcgaaggcagcgccccaggcaccagcaccgagcctagtgagcaggagattaaacggatcaacaagatcagaagaagacttgtgaaagacagcaacaccaagaaggccggcaagacaggccccatgaaaaccctgctggttagagtgatgacacccgatctgagagagcggctggaaaacctgagaaagaagcctgaaaatatcccccagcccatcagcaatacatctagagccaacctgaataagctgctgaccgattacaccgaaatgaagaaggcgatcctgcatgtgtactgggaagagttccagaaggaccctgtgggcctgatgagccgggtggcccagcctgccagcaagaagatcgatcagaacaagctgaaacctgagatggacgagaagggcaacctgaccaccgccggctttgcctgctctcagtgtggccagcccctgttcgtgtacaagctggagcaggtgtctgagaagggcaaggcttacaccaactacttcggacggtgcaatgtggccgagcacgaaaagctgatcctgctggcccagctgaagcccgagaaggatagcgacgaagccgtgacatatagcctgggaaagtttgggcagagggccctggatttctacagcattcatgtgaccaaggagtccacccaccccgtgaagcccctggcccagatcgccggaaacagatacgcctccggacctgtgggaaaggccctgagcgacgcatgtatgggcacaatcgcctccttcctgtctaagtaccaggacatcatcatcgaacaccagaaggtggtgaagggcaaccagaagagactggagagcctgcgggagctggccggcaaggaaaacctggaataccctagcgtgaccctgccacctcagcctcacaccaaggagggcgttgatgcctacaacgaagtgatcgcccgggtgcgaatgtgggtgaacctgaacctgtggcagaagctgaagctaagcagagatgatgccaagcctctgctgagactgaagggattcccttcctttcctctggtcgagagacaggccaacgaagtggactggtgggacatggtgtgtaacgtgaagaagctgatcaacgagaaaaaggaggatggcaaggtgttttggcagaatctggctggctacaagagacaggaagccctgagaccatacctgagcagcgaggaagatcggaagaagggaaagaaattcgctcggtaccagctgggcgacctgctgctgcacctggaaaagaagcacggcgaggactggggaaaggtgtacgacgaggcctgggagcggattgacaagaaagtggaaggcctgagcaagcacatcaagctggaagaggaacggagaagcgaggacgcccagagcaaggccgccctgaccgactggctgcgggctaaggccagcttcgtgatcgagggcctgaaggaggccgacaaggacgagttctgcagatgcgagctgaagctgcagaagtggtacggggacctgcggggaaagcccttcgccatcgaagccgagaacagcatcctggacatcagcggcttcagcaagcagtacaactgtgccttcatctggcagaaggacggcgtgaagaagctgaacctgtacctgatcatcaactacttcaagggcggcaagctgcggttcaagaagatcaaacctgaagccttcgaagccaacagattctacaccgtgatcaacaaaaagagcggcgagatcgtgcccatggaggtgaacttcaacttcgacgaccccaacctgatcatcctgcctctggcctttggcaagagacagggcagagaattcatctggaacgacctgctgtccctggaaaccggcagcctgaagctggccaacggaagagtgatcgagaagacactgtacaacagaagaacccggcaggatgagcctgccctgttcgtggccctgaccttcgagcggcgggaggtcctggactcctccaatatcaaaccaatgaacctgatcggcgtggcaagaggcgaaaacatccccgccgtgatcgccctgaccgaccccgagggctgcccactgagccggtttaaggatagcctgggaaacccaacccacatcctgagaatcggcgagagctataaggagaagcagcggaccatccaggccaagaaggaggtggagcagcggagagccggcggctacagccggaagtacgccagcaaagccaagaatctggcagacgatatggtgagaaacaccgctagagatctgctgtactacgccgtgacccaggatgccatgctgatcttcgccaacctgagccggggcttcggccggcagggcaagcggaccttcatggccgagagacagtacacacggatggaggactggctgaccgccaagctggcctacgagggcctgagcaagacctacctgtccaagacactggcccagtacacctccaagacatgcagcaactgtgggtttaccatcaccagcgccgactacgacagggtgctggagaagctgaagaagacagcaacaggctggatgaccacaattaacggcaaggagctgaaggtggagggccagattacctactacaacagatacaagagacagaacgtagtcaaggacctgtccgtcgagctggatagactgagcgaagaatctgtgaacaacgacatctcctcctggacaaagggcagaagcggagaagctctgagcctcctgaagaaaagattctcccatagacccgtgcaggagaagttcgtgtgcctgaactgcggcttcgagacacacgcagccgagcaagccgccctgaacatcgccagatcctggctgttcctgcggagccaggagtacaagaaataccagacaaacaagacaaccggcaacaccgataagagagccttcgtcgagacctggcagtccttttaccggaagaagcttaaggaggtgtggaaacctgccgtgcggtctggcggatctggcggaggctcctagcaaggcccccgtgaccttcggcgacctggccatctacttcagccaggaggagtgggagtggctgagccccatccagaaggacctgtacgaggacgtgatgctggagaactaccagaacctggtgagcctgggcctgagcttcaggaggcccaacgtgatcgccctgctggagaagggcaaggccccctggatggtggagcccgtgaagaggaggaggggcctggacagcggcagcaagtgcggatctggctccggcagcggccccaagaaaaagagaaaagtctaagctgccttctgcggggcttgccttctggccatgcccttcttctctcccttgcacctgtacctcttggtctttgaataaagcctgagtaggaaggctagcaaaaaaaaaaaaaaaaaaaaaaaaaaaaaaaaaaaaaaaaaaaaaaaaaaaaaaaaaaaaaaaaaaaaaaaaaaaaaaaa

SEQ ID NO: 15551 - RNA, 9485 nt, synthetic construct
  source 1..9485: mol_type = other RNA
aggaaataagagagaaaagaagagtaagaagaaatataagagccaccatggcccctaagaagaagcgtaaagtgagccggatggaacgcctcgtctacgaggtgcggcagaagtgcagaaacatcgaggacatctgcatctcctgcggatctctgaacgtgaccctggagcacccactgttcatcggcggcatgtgccagaactgtaaaaactgttttctggagtgtgcctatcaatacgacgatgacggctaccagagctactgcaccatctgttgcggcggaagagaggtgctgatgtgtggaaataacaactgctgccggtgcttctgcgtggaatgcgtggacctgctggtgggccccggcgccgcccaggccgctattaaggaagatccttggaactgctacatgtgcggccacaagggcacatacggcctgctgagacggagagaggactggcctagcagactgcagatgttcttcgccaataaccacgaccaggagttcgacccccctaaggtgtaccctcccgtccccgccgagaagagaaagcccatccgggtcctgagcctgttcgatggcatcgccaccggtctgctggtgctgaaggacctgggcatccaggtggataggtacattgcctccgaggtgtgcgaggactccatcaccgtgggaatggtgcgtcatcagggcaagatcatgtacgtgggcgacgtgcggagcgtgacacagaagcatatccaggagtggggccctttcgacctggtgatcggcggcagcccttgcaatgacctgagcatcgtgaacccagcccggaagggcctgtacgagggaaccggcagactgttcttcgagttttacagactgctgcacgacgcccggcctaaggaaggcgacgaccggcccttcttttggctgttcgagaatgtggtggccatgggagtcagcgacaagcgggatattagccggttcctggagagcaaccccgtgatgatcgatgccaaggaagtgagcgccgcccaccgggccagatacttctggggcaatctgcctggcatgaacagacccctggccagcaccgtgaacgacaagctggagctgcaggagtgcctggagcacggccggatcgccaagttcagcaaggtgagaaccatcaccacccgaagcaacagcatcaaacaaggcaaggaccagcactttcctgtgttcatgaacgagaaggaggacatcctgtggtgtaccgagatggagagagtgttcgggttcccagtccactacacagatgtcagcaacatgtctagactggccagacagagactgctgggaagaagctggtccgtccctgtgatcagacacctgttcgcccctctgaaggagtacttcgcctgcgtgagcagcggcaacagcaacgccaacagccggggccccagcttctctagcggcctggtgccactgtccctgagagggagccacatgggccccatggagatctacaaaaccgtgagcgcctggaagcggcagcctgtgcgcgtgctgagcctgtttcggaatatcgataaagtcctgaaaagcctgggattcctggagagcggctctggctccggcggtggcaccctgaagtacgtggaggatgtgacaaacgtggtcagacgggatgtggagaagtggggccccttcgatctggtgtacggcagcacccaacccctgggcagctcttgtgaccggtgccctggctggtacatgtttcagttccaccggatcctgcagtacgccctgccgagacaggagtcccagcggccattcttttggattttcatggacaacttgctgctgaccgaggatgaccaggaaactaccactcggttcctgcagaccgaagccgtgaccctgcaggacgtgagaggccgggactaccagaacgccatgcgggtgtggtccaacatccctggactgaaaagcaagcacgcacctctgacccctaaagaagaggagtacctgcaggcccaggtgcggagcagaagcaagctggacgcccctaaggtggatctgctggtgaagaattgcctcctgcccctgagagagtacttcaagtatttcagccagaatagtctgcccctgggaggcagcggcggcggcgccctggtgacatttgaggacgtcgccgtgcggttcacccaggaggaatgggctctgctggatccttctcagaaaatcctgtaccgggacgtgatgagagagacataccggaatctgacctccgtgggcatcaactgggaatgttgggaccttgaagcctgcttcagaagcctgggaagaaacctgagagtgcaggtggtgaagagaaagtgcgagctgaccaacagcggcccctgcgccgagggcggcccaagcagcggcgcccctcctcccagcggcggcagcccagccggctccccaacctctaccgaggagggcacctctgagtccgccacccccgagagcggccctggcacctccaccgagcccagcgagggcagcgcacccggcagccctgccggcagccccacctccacagaggagggaaccagcaccgagcccagcgaaggcagcgccccaggcaccagcaccgagcctagtgagcaggagattaaacggatcaacaagatcagaagaagacttgtgaaagacagcaacaccaagaaggccggcaagacaggccccatgaaaaccctgctggttagagtgatgacacccgatctgagagagcggctggaaaacctgagaaagaagcctgaaaatatcccccagcccatcagcaatacatctagagccaacctgaataagctgctgaccgattacaccgaaatgaagaaggcgatcctgcatgtgtactgggaagagttccagaaggaccctgtgggcctgatgagccgggtggcccagcctgccagcaagaagatcgatcagaacaagctgaaacctgagatggacgagaagggcaacctgaccaccgccggctttgcctgctctcagtgtggccagcccctgttcgtgtacaagctggagcaggtgtctgagaagggcaaggcttacaccaactacttcggacggtgcaatgtggccgagcacgaaaagctgatcctgctggcccagctgaagcccgagaaggatagcgacgaagccgtgacatatagcctgggaaagtttgggcagagggccctggatttctacagcattcatgtgaccaaggagtccacccaccccgtgaagcccctggcccagatcgccggaaacagatacgcctccggacctgtgggaaaggccctgagcgacgcatgtatgggcacaatcgcctccttcctgtctaagtaccaggacatcatcatcgaacaccagaaggtggtgaagggcaaccagaagagactggagagcctgcgggagctggccggcaaggaaaacctggaataccctagcgtgaccctgccacctcagcctcacaccaaggagggcgttgatgcctacaacgaagtgatcgcccgggtgcgaatgtgggtgaacctgaacctgtggcagaagctgaagctaagcagagatgatgccaagcctctgctgagactgaagggattcccttcctttcctctggtcgagagacaggccaacgaagtggactggtgggacatggtgtgtaacgtgaagaagctgatcaacgagaaaaaggaggatggcaaggtgttttggcagaatctggctggctacaagagacaggaagccctgagaccatacctgagcagcgaggaagatcggaagaagggaaagaaattcgctcggtaccagctgggcgacctgctgctgcacctggaaaagaagcacggcgaggactggggaaaggtgtacgacgaggcctgggagcggattgacaagaaagtggaaggcctgagcaagcacatcaagctggaagaggaacggagaagcgaggacgcccagagcaaggccgccctgaccgactggctgcgggctaaggccagcttcgtgatcgagggcctgaaggaggccgacaaggacgagttctgcagatgcgagctgaagctgcagaagtggtacggggacctgcggggaaagcccttcgccatcgaagccgagaacagcatcctggacatcagcggcttcagcaagcagtacaactgtgccttcatctggcagaaggacggcgtgaagaagctgaacctgtacctgatcatcaactacttcaagggcggcaagctgcggttcaagaagatcaaacctgaagccttcgaagccaacagattctacaccgtgatcaacaaaaagagcggcgagatcgtgcccatggaggtgaacttcaacttcgacgaccccaacctgatcatcctgcctctggcctttggcaagagacagggcagagaattcatctggaacgacctgctgtccctggaaaccggcagcctgaagctggccaacggaagagtgatcgagaagacactgtacaacagaagaacccggcaggatgagcctgccctgttcgtggccctgaccttcgagcggcgggaggtcctggactcctccaatatcaaaccaatgaacctgatcggcgtggcaagaggcgaaaacatccccgccgtgatcgccctgaccgaccccgagggctgcccactgagccggtttaaggatagcctgggaaacccaacccacatcctgagaatcggcgagagctataaggagaagcagcggaccatccaggccaagaaggaggtggagcagcggagagccggcggctacagccggaagtacgccagcaaagccaagaatctggcagacgatatggtgagaaacaccgctagagatctgctgtactacgccgtgacccaggatgccatgctgatcttcgccaacctgagccggggcttcggccggcagggcaagcggaccttcatggccgagagacagtacacacggatggaggactggctgaccgccaagctggcctacgagggcctgagcaagacctacctgtccaagacactggcccagtacacctccaagacatgcagcaactgtgggtttaccatcaccagcgccgactacgacagggtgctggagaagctgaagaagacagcaacaggctggatgaccacaattaacggcaaggagctgaaggtggagggccagattacctactacaacagatacaagagacagaacgtagtcaaggacctgtccgtcgagctggatagactgagcgaagaatctgtgaacaacgacatctcctcctggacaaagggcagaagcggagaagctctgagcctcctgaagaaaagattctcccatagacccgtgcaggagaagttcgtgtgcctgaactgcggcttcgagacacacgcagccgagcaagccgccctgaacatcgccagatcctggctgttcctgcggagccaggagtacaagaaataccagacaaacaagacaaccggcaacaccgataagagagccttcgtcgagacctggcagtccttttaccggaagaagcttaaggaggtgtggaaacctgccgtgcggtctggcggatctggcggaggctccaggcccagggccctgaagttcgccgacgtggccgtgtacttcagcctggaggagtggggctgcctgaggcccgcccagaggaccctgtacaggaacgtgatgagggagacctacggccacctgggcgccctgggctgcgccggccccaagcccgccctgatcagctggctggagaggaacaccgacgactgggagcccgccgccctggacccccaggagtaccccaggggcgtgaccgtgcagggcggcccaagcagcggcgcccctcctcccagcggcggcagcccagccggctccccaacctctaccgaggagggcacctctgagtccgccacccccgagagcggccctggcacctccaccgagcccagcgagggcagcgcacccggcagccctgccggcagccccacctccacagaggagggaaccagcaccgagcccagcgaaggcagcgccccaggcaccagcaccgagcctagtgagcaggagattaaacggatcaacaagatcagaagaagacttgtgaaagacagcaacaccaagaaggccggcaagacaggccccatgaaaaccctgctggttagagtgatgacacccgatctgagagagcggctggaaaacctgagaaagaagcctgaaaatatcccccagcccatcagcaatacatctagagccaacctgaataagctgctgaccgattacaccgaaatgaagaaggcgatcctgcatgtgtactgggaagagttccagaaggaccctgtgggcctgatgagccgggtggcccagcctgccagcaagaagatcgatcagaacaagctgaaacctgagatggacgagaagggcaacctgaccaccgccggctttgcctgctctcagtgtggccagcccctgttcgtgtacaagctggagcaggtgtctgagaagggcaaggcttacaccaactacttcggacggtgcaatgtggccgagcacgaaaagctgatcctgctggcccagctgaagcccgagaaggatagcgacgaagccgtgacatatagcctgggaaagtttgggcagagggccctggatttctacagcattcatgtgaccaaggagtccacccaccccgtgaagcccctggcccagatcgccggaaacagatacgcctccggacctgtgggaaaggccctgagcgacgcatgtatgggcacaatcgcctccttcctgtctaagtaccaggacatcatcatcgaacaccagaaggtggtgaagggcaaccagaagagactggagagcctgcgggagctggccggcaaggaaaacctggaataccctagcgtgaccctgccacctcagcctcacaccaaggagggcgttgatgcctacaacgaagtgatcgcccgggtgcgaatgtgggtgaacctgaacctgtggcagaagctgaagctaagcagagatgatgccaagcctctgctgagactgaagggattcccttcctttcctctggtcgagagacaggccaacgaagtggactggtgggacatggtgtgtaacgtgaagaagctgatcaacgagaaaaaggaggatggcaaggtgttttggcagaatctggctggctacaagagacaggaagccctgagaccatacctgagcagcgaggaagatcggaagaagggaaagaaattcgctcggtaccagctgggcgacctgctgctgcacctggaaaagaagcacggcgaggactggggaaaggtgtacgacgaggcctgggagcggattgacaagaaagtggaaggcctgagcaagcacatcaagctggaagaggaacggagaagcgaggacgcccagagcaaggccgccctgaccgactggctgcgggctaaggccagcttcgtgatcgagggcctgaaggaggccgacaaggacgagttctgcagatgcgagctgaagctgcagaagtggtacggggacctgcggggaaagcccttcgccatcgaagccgagaacagcatcctggacatcagcggcttcagcaagcagtacaactgtgccttcatctggcagaaggacggcgtgaagaagctgaacctgtacctgatcatcaactacttcaagggcggcaagctgcggttcaagaagatcaaacctgaagccttcgaagccaacagattctacaccgtgatcaacaaaaagagcggcgagatcgtgcccatggaggtgaacttcaacttcgacgaccccaacctgatcatcctgcctctggcctttggcaagagacagggcagagaattcatctggaacgacctgctgtccctggaaaccggcagcctgaagctggccaacggaagagtgatcgagaagacactgtacaacagaagaacccggcaggatgagcctgccctgttcgtggccctgaccttcgagcggcgggaggtcctggactcctccaatatcaaaccaatgaacctgatcggcgtggcaagaggcgaaaacatccccgccgtgatcgccctgaccgaccccgagggctgcccactgagccggtttaaggatagcctgggaaacccaacccacatcctgagaatcggcgagagctataaggagaagcagcggaccatccaggccaagaaggaggtggagcagcggagagccggcggctacagccggaagtacgccagcaaagccaagaatctggcagacgatatggtgagaaacaccgctagagatctgctgtactacgccgtgacccaggatgccatgctgatcttcgccaacctgagccggggcttcggccggcagggcaagcggaccttcatggccgagagacagtacacacggatggaggactggctgaccgccaagctggcctacgagggcctgagcaagacctacctgtccaagacactggcccagtacacctccaagacatgcagcaactgtgggtttaccatcaccagcgccgactacgacagggtgctggagaagctgaagaagacagcaacaggctggatgaccacaattaacggcaaggagctgaaggtggagggccagattacctactacaacagatacaagagacagaacgtagtcaaggacctgtccgtcgagctggatagactgagcgaagaatctgtgaacaacgacatctcctcctggacaaagggcagaagcggagaagctctgagcctcctgaagaaaagattctcccatagacccgtgcaggagaagttcgtgtgcctgaactgcggcttcgagacacacgcagccgagcaagccgccctgaacatcgccagatcctggctgttcctgcggagccaggagtacaagaaataccagacaaacaagacaaccggcaacaccgataagagagccttcgtcgagacctggcagtccttttaccggaagaagcttaaggaggtgtggaaacctgccgtgcggtctggcggatctggcggaggctcctaggcccagggccctgaagttcgccgacgtggccgtgtacttcagcctggaggagtggggctgcctgaggcccgcccagaggaccctgtacaggaacgtgatgagggagacctacggccacctgggcgccctgggctgcgccggccccaagcccgccctgatcagctggctggagaggaacaccgacgactgggagcccgccgccctggacccccaggagtaccccaggggcgtgaccgtgcagggatctggctccggcagcggccccaagaaaaagagaaaagtctaagctgccttctgcggggcttgccttctggccatgcccttcttctctcccttgcacctgtacctcttggtctttgaataaagcctgagtaggaaggctagcaaaaaaaaaaaaaaaaaaaaaaaaaaaaaaaaaaaaaaaaaaaaaaaaaaaaaaaaaaaaaaaaaaaaaaaaaaaaaaaa

SEQ ID NO: 15552 - RNA, 9503 nt, synthetic construct
  source 1..9503: mol_type = other RNA
aggaaataagagagaaaagaagagtaagaagaaatataagagccaccatggcccctaagaagaagcgtaaagtgagccggatggaacgcctcgtctacgaggtgcggcagaagtgcagaaacatcgaggacatctgcatctcctgcggatctctgaacgtgaccctggagcacccactgttcatcggcggcatgtgccagaactgtaaaaactgttttctggagtgtgcctatcaatacgacgatgacggctaccagagctactgcaccatctgttgcggcggaagagaggtgctgatgtgtggaaataacaactgctgccggtgcttctgcgtggaatgcgtggacctgctggtgggccccggcgccgcccaggccgctattaaggaagatccttggaactgctacatgtgcggccacaagggcacatacggcctgctgagacggagagaggactggcctagcagactgcagatgttcttcgccaataaccacgaccaggagttcgacccccctaaggtgtaccctcccgtccccgccgagaagagaaagcccatccgggtcctgagcctgttcgatggcatcgccaccggtctgctggtgctgaaggacctgggcatccaggtggataggtacattgcctccgaggtgtgcgaggactccatcaccgtgggaatggtgcgtcatcagggcaagatcatgtacgtgggcgacgtgcggagcgtgacacagaagcatatccaggagtggggccctttcgacctggtgatcggcggcagcccttgcaatgacctgagcatcgtgaacccagcccggaagggcctgtacgagggaaccggcagactgttcttcgagttttacagactgctgcacgacgcccggcctaaggaaggcgacgaccggcccttcttttggctgttcgagaatgtggtggccatgggagtcagcgacaagcgggatattagccggttcctggagagcaaccccgtgatgatcgatgccaaggaagtgagcgccgcccaccgggccagatacttctggggcaatctgcctggcatgaacagacccctggccagcaccgtgaacgacaagctggagctgcaggagtgcctggagcacggccggatcgccaagttcagcaaggtgagaaccatcaccacccgaagcaacagcatcaaacaaggcaaggaccagcactttcctgtgttcatgaacgagaaggaggacatcctgtggtgtaccgagatggagagagtgttcgggttcccagtccactacacagatgtcagcaacatgtctagactggccagacagagactgctgggaagaagctggtccgtccctgtgatcagacacctgttcgcccctctgaaggagtacttcgcctgcgtgagcagcggcaacagcaacgccaacagccggggccccagcttctctagcggcctggtgccactgtccctgagagggagccacatgggccccatggagatctacaaaaccgtgagcgcctggaagcggcagcctgtgcgcgtgctgagcctgtttcggaatatcgataaagtcctgaaaagcctgggattcctggagagcggctctggctccggcggtggcaccctgaagtacgtggaggatgtgacaaacgtggtcagacgggatgtggagaagtggggccccttcgatctggtgtacggcagcacccaacccctgggcagctcttgtgaccggtgccctggctggtacatgtttcagttccaccggatcctgcagtacgccctgccgagacaggagtcccagcggccattcttttggattttcatggacaacttgctgctgaccgaggatgaccaggaaactaccactcggttcctgcagaccgaagccgtgaccctgcaggacgtgagaggccgggactaccagaacgccatgcgggtgtggtccaacatccctggactgaaaagcaagcacgcacctctgacccctaaagaagaggagtacctgcaggcccaggtgcggagcagaagcaagctggacgcccctaaggtggatctgctggtgaagaattgcctcctgcccctgagagagtacttcaagtatttcagccagaatagtctgcccctgggaggcagcggcggcggcgccctggtgacatttgaggacgtcgccgtgcggttcacccaggaggaatgggctctgctggatccttctcagaaaatcctgtaccgggacgtgatgagagagacataccggaatctgacctccgtgggcatcaactgggaatgttgggaccttgaagcctgcttcagaagcctgggaagaaacctgagagtgcaggtggtgaagagaaagtgcgagctgaccaacagcggcccctgcgccgagggcggcccaagcagcggcgcccctcctcccagcggcggcagcccagccggctccccaacctctaccgaggagggcacctctgagtccgccacccccgagagcggccctggcacctccaccgagcccagcgagggcagcgcacccggcagccctgccggcagccccacctccacagaggagggaaccagcaccgagcccagcgaaggcagcgccccaggcaccagcaccgagcctagtgagcaggagattaaacggatcaacaagatcagaagaagacttgtgaaagacagcaacaccaagaaggccggcaagacaggccccatgaaaaccctgctggttagagtgatgacacccgatctgagagagcggctggaaaacctgagaaagaagcctgaaaatatcccccagcccatcagcaatacatctagagccaacctgaataagctgctgaccgattacaccgaaatgaagaaggcgatcctgcatgtgtactgggaagagttccagaaggaccctgtgggcctgatgagccgggtggcccagcctgccagcaagaagatcgatcagaacaagctgaaacctgagatggacgagaagggcaacctgaccaccgccggctttgcctgctctcagtgtggccagcccctgttcgtgtacaagctggagcaggtgtctgagaagggcaaggcttacaccaactacttcggacggtgcaatgtggccgagcacgaaaagctgatcctgctggcccagctgaagcccgagaaggatagcgacgaagccgtgacatatagcctgggaaagtttgggcagagggccctggatttctacagcattcatgtgaccaaggagtccacccaccccgtgaagcccctggcccagatcgccggaaacagatacgcctccggacctgtgggaaaggccctgagcgacgcatgtatgggcacaatcgcctccttcctgtctaagtaccaggacatcatcatcgaacaccagaaggtggtgaagggcaaccagaagagactggagagcctgcgggagctggccggcaaggaaaacctggaataccctagcgtgaccctgccacctcagcctcacaccaaggagggcgttgatgcctacaacgaagtgatcgcccgggtgcgaatgtgggtgaacctgaacctgtggcagaagctgaagctaagcagagatgatgccaagcctctgctgagactgaagggattcccttcctttcctctggtcgagagacaggccaacgaagtggactggtgggacatggtgtgtaacgtgaagaagctgatcaacgagaaaaaggaggatggcaaggtgttttggcagaatctggctggctacaagagacaggaagccctgagaccatacctgagcagcgaggaagatcggaagaagggaaagaaattcgctcggtaccagctgggcgacctgctgctgcacctggaaaagaagcacggcgaggactggggaaaggtgtacgacgaggcctgggagcggattgacaagaaagtggaaggcctgagcaagcacatcaagctggaagaggaacggagaagcgaggacgcccagagcaaggccgccctgaccgactggctgcgggctaaggccagcttcgtgatcgagggcctgaaggaggccgacaaggacgagttctgcagatgcgagctgaagctgcagaagtggtacggggacctgcggggaaagcccttcgccatcgaagccgagaacagcatcctggacatcagcggcttcagcaagcagtacaactgtgccttcatctggcagaaggacggcgtgaagaagctgaacctgtacctgatcatcaactacttcaagggcggcaagctgcggttcaagaagatcaaacctgaagccttcgaagccaacagattctacaccgtgatcaacaaaaagagcggcgagatcgtgcccatggaggtgaacttcaacttcgacgaccccaacctgatcatcctgcctctggcctttggcaagagacagggcagagaattcatctggaacgacctgctgtccctggaaaccggcagcctgaagctggccaacggaagagtgatcgagaagacactgtacaacagaagaacccggcaggatgagcctgccctgttcgtggccctgaccttcgagcggcgggaggtcctggactcctccaatatcaaaccaatgaacctgatcggcgtggcaagaggcgaaaacatccccgccgtgatcgccctgaccgaccccgagggctgcccactgagccggtttaaggatagcctgggaaacccaacccacatcctgagaatcggcgagagctataaggagaagcagcggaccatccaggccaagaaggaggtggagcagcggagagccggcggctacagccggaagtacgccagcaaagccaagaatctggcagacgatatggtgagaaacaccgctagagatctgctgtactacgccgtgacccaggatgccatgctgatcttcgccaacctgagccggggcttcggccggcagggcaagcggaccttcatggccgagagacagtacacacggatggaggactggctgaccgccaagctggcctacgagggcctgagcaagacctacctgtccaagacactggcccagtacacctccaagacatgcagcaactgtgggtttaccatcaccagcgccgactacgacagggtgctggagaagctgaagaagacagcaacaggctggatgaccacaattaacggcaaggagctgaaggtggagggccagattacctactacaacagatacaagagacagaacgtagtcaaggacctgtccgtcgagctggatagactgagcgaagaatctgtgaacaacgacatctcctcctggacaaagggcagaagcggagaagctctgagcctcctgaagaaaagattctcccatagacccgtgcaggagaagttcgtgtgcctgaactgcggcttcgagacacacgcagccgagcaagccgccctgaacatcgccagatcctggctgttcctgcggagccaggagtacaagaaataccagacaaacaagacaaccggcaacaccgataagagagccttcgtcgagacctggcagtccttttaccggaagaagcttaaggaggtgtggaaacctgccgtgcggtctggcggatctggcggaggctccctgacctacgacgacgtgcagatcaacttcaccagcgaggagtggagcctgctggacaccagccagaagaacctgtacaaggacgtgatgctggagacctacaagaacctgaccgacatcggctacacctgggaggactgcagcatcgaggagcactgcgccagcagcaagaggaaggagaggcccaagaggagccagaccggcgagaagcccagcgcctacacccagtgcgccaaggacttcgcctacagcggcggcccaagcagcggcgcccctcctcccagcggcggcagcccagccggctccccaacctctaccgaggagggcacctctgagtccgccacccccgagagcggccctggcacctccaccgagcccagcgagggcagcgcacccggcagccctgccggcagccccacctccacagaggagggaaccagcaccgagcccagcgaaggcagcgccccaggcaccagcaccgagcctagtgagcaggagattaaacggatcaacaagatcagaagaagacttgtgaaagacagcaacaccaagaaggccggcaagacaggccccatgaaaaccctgctggttagagtgatgacacccgatctgagagagcggctggaaaacctgagaaagaagcctgaaaatatcccccagcccatcagcaatacatctagagccaacctgaataagctgctgaccgattacaccgaaatgaagaaggcgatcctgcatgtgtactgggaagagttccagaaggaccctgtgggcctgatgagccgggtggcccagcctgccagcaagaagatcgatcagaacaagctgaaacctgagatggacgagaagggcaacctgaccaccgccggctttgcctgctctcagtgtggccagcccctgttcgtgtacaagctggagcaggtgtctgagaagggcaaggcttacaccaactacttcggacggtgcaatgtggccgagcacgaaaagctgatcctgctggcccagctgaagcccgagaaggatagcgacgaagccgtgacatatagcctgggaaagtttgggcagagggccctggatttctacagcattcatgtgaccaaggagtccacccaccccgtgaagcccctggcccagatcgccggaaacagatacgcctccggacctgtgggaaaggccctgagcgacgcatgtatgggcacaatcgcctccttcctgtctaagtaccaggacatcatcatcgaacaccagaaggtggtgaagggcaaccagaagagactggagagcctgcgggagctggccggcaaggaaaacctggaataccctagcgtgaccctgccacctcagcctcacaccaaggagggcgttgatgcctacaacgaagtgatcgcccgggtgcgaatgtgggtgaacctgaacctgtggcagaagctgaagctaagcagagatgatgccaagcctctgctgagactgaagggattcccttcctttcctctggtcgagagacaggccaacgaagtggactggtgggacatggtgtgtaacgtgaagaagctgatcaacgagaaaaaggaggatggcaaggtgttttggcagaatctggctggctacaagagacaggaagccctgagaccatacctgagcagcgaggaagatcggaagaagggaaagaaattcgctcggtaccagctgggcgacctgctgctgcacctggaaaagaagcacggcgaggactggggaaaggtgtacgacgaggcctgggagcggattgacaagaaagtggaaggcctgagcaagcacatcaagctggaagaggaacggagaagcgaggacgcccagagcaaggccgccctgaccgactggctgcgggctaaggccagcttcgtgatcgagggcctgaaggaggccgacaaggacgagttctgcagatgcgagctgaagctgcagaagtggtacggggacctgcggggaaagcccttcgccatcgaagccgagaacagcatcctggacatcagcggcttcagcaagcagtacaactgtgccttcatctggcagaaggacggcgtgaagaagctgaacctgtacctgatcatcaactacttcaagggcggcaagctgcggttcaagaagatcaaacctgaagccttcgaagccaacagattctacaccgtgatcaacaaaaagagcggcgagatcgtgcccatggaggtgaacttcaacttcgacgaccccaacctgatcatcctgcctctggcctttggcaagagacagggcagagaattcatctggaacgacctgctgtccctggaaaccggcagcctgaagctggccaacggaagagtgatcgagaagacactgtacaacagaagaacccggcaggatgagcctgccctgttcgtggccctgaccttcgagcggcgggaggtcctggactcctccaatatcaaaccaatgaacctgatcggcgtggcaagaggcgaaaacatccccgccgtgatcgccctgaccgaccccgagggctgcccactgagccggtttaaggatagcctgggaaacccaacccacatcctgagaatcggcgagagctataaggagaagcagcggaccatccaggccaagaaggaggtggagcagcggagagccggcggctacagccggaagtacgccagcaaagccaagaatctggcagacgatatggtgagaaacaccgctagagatctgctgtactacgccgtgacccaggatgccatgctgatcttcgccaacctgagccggggcttcggccggcagggcaagcggaccttcatggccgagagacagtacacacggatggaggactggctgaccgccaagctggcctacgagggcctgagcaagacctacctgtccaagacactggcccagtacacctccaagacatgcagcaactgtgggtttaccatcaccagcgccgactacgacagggtgctggagaagctgaagaagacagcaacaggctggatgaccacaattaacggcaaggagctgaaggtggagggccagattacctactacaacagatacaagagacagaacgtagtcaaggacctgtccgtcgagctggatagactgagcgaagaatctgtgaacaacgacatctcctcctggacaaagggcagaagcggagaagctctgagcctcctgaagaaaagattctcccatagacccgtgcaggagaagttcgtgtgcctgaactgcggcttcgagacacacgcagccgagcaagccgccctgaacatcgccagatcctggctgttcctgcggagccaggagtacaagaaataccagacaaacaagacaaccggcaacaccgataagagagccttcgtcgagacctggcagtccttttaccggaagaagcttaaggaggtgtggaaacctgccgtgcggtctggcggatctggcggaggctcctctgacctacgacgacgtgcagatcaacttcaccagcgaggagtggagcctgctggacaccagccagaagaacctgtacaaggacgtgatgctggagacctacaagaacctgaccgacatcggctacacctgggaggactgcagcatcgaggagcactgcgccagcagcaagaggaaggagaggcccaagaggagccagaccggcgagaagcccagcgcctacacccagtgcgccaaggacttcgcctacagcggatctggctccggcagcggccccaagaaaaagagaaaagtctaagctgccttctgcggggcttgccttctggccatgcccttcttctctcccttgcacctgtacctcttggtctttgaataaagcctgagtaggaaggctagcaaaaaaaaaaaaaaaaaaaaaaaaaaaaaaaaaaaaaaaaaaaaaaaaaaaaaaaaaaaaaaaaaaaaaaaaaaaaaaaa

SEQ ID NO: 15553 - RNA, 9485 nt, synthetic construct
  source 1..9485: mol_type = other RNA
aggaaataagagagaaaagaagagtaagaagaaatataagagccaccatggcccctaagaagaagcgtaaagtgagccggatggaacgcctcgtctacgaggtgcggcagaagtgcagaaacatcgaggacatctgcatctcctgcggatctctgaacgtgaccctggagcacccactgttcatcggcggcatgtgccagaactgtaaaaactgttttctggagtgtgcctatcaatacgacgatgacggctaccagagctactgcaccatctgttgcggcggaagagaggtgctgatgtgtggaaataacaactgctgccggtgcttctgcgtggaatgcgtggacctgctggtgggccccggcgccgcccaggccgctattaaggaagatccttggaactgctacatgtgcggccacaagggcacatacggcctgctgagacggagagaggactggcctagcagactgcagatgttcttcgccaataaccacgaccaggagttcgacccccctaaggtgtaccctcccgtccccgccgagaagagaaagcccatccgggtcctgagcctgttcgatggcatcgccaccggtctgctggtgctgaaggacctgggcatccaggtggataggtacattgcctccgaggtgtgcgaggactccatcaccgtgggaatggtgcgtcatcagggcaagatcatgtacgtgggcgacgtgcggagcgtgacacagaagcatatccaggagtggggccctttcgacctggtgatcggcggcagcccttgcaatgacctgagcatcgtgaacccagcccggaagggcctgtacgagggaaccggcagactgttcttcgagttttacagactgctgcacgacgcccggcctaaggaaggcgacgaccggcccttcttttggctgttcgagaatgtggtggccatgggagtcagcgacaagcgggatattagccggttcctggagagcaaccccgtgatgatcgatgccaaggaagtgagcgccgcccaccgggccagatacttctggggcaatctgcctggcatgaacagacccctggccagcaccgtgaacgacaagctggagctgcaggagtgcctggagcacggccggatcgccaagttcagcaaggtgagaaccatcaccacccgaagcaacagcatcaaacaaggcaaggaccagcactttcctgtgttcatgaacgagaaggaggacatcctgtggtgtaccgagatggagagagtgttcgggttcccagtccactacacagatgtcagcaacatgtctagactggccagacagagactgctgggaagaagctggtccgtccctgtgatcagacacctgttcgcccctctgaaggagtacttcgcctgcgtgagcagcggcaacagcaacgccaacagccggggccccagcttctctagcggcctggtgccactgtccctgagagggagccacatgggccccatggagatctacaaaaccgtgagcgcctggaagcggcagcctgtgcgcgtgctgagcctgtttcggaatatcgataaagtcctgaaaagcctgggattcctggagagcggctctggctccggcggtggcaccctgaagtacgtggaggatgtgacaaacgtggtcagacgggatgtggagaagtggggccccttcgatctggtgtacggcagcacccaacccctgggcagctcttgtgaccggtgccctggctggtacatgtttcagttccaccggatcctgcagtacgccctgccgagacaggagtcccagcggccattcttttggattttcatggacaacttgctgctgaccgaggatgaccaggaaactaccactcggttcctgcagaccgaagccgtgaccctgcaggacgtgagaggccgggactaccagaacgccatgcgggtgtggtccaacatccctggactgaaaagcaagcacgcacctctgacccctaaagaagaggagtacctgcaggcccaggtgcggagcagaagcaagctggacgcccctaaggtggatctgctggtgaagaattgcctcctgcccctgagagagtacttcaagtatttcagccagaatagtctgcccctgggaggcagcggcggcggcgccctggtgacatttgaggacgtcgccgtgcggttcacccaggaggaatgggctctgctggatccttctcagaaaatcctgtaccgggacgtgatgagagagacataccggaatctgacctccgtgggcatcaactgggaatgttgggaccttgaagcctgcttcagaagcctgggaagaaacctgagagtgcaggtggtgaagagaaagtgcgagctgaccaacagcggcccctgcgccgagggcggcccaagcagcggcgcccctcctcccagcggcggcagcccagccggctccccaacctctaccgaggagggcacctctgagtccgccacccccgagagcggccctggcacctccaccgagcccagcgagggcagcgcacccggcagccctgccggcagccccacctccacagaggagggaaccagcaccgagcccagcgaaggcagcgccccaggcaccagcaccgagcctagtgagcaggagattaaacggatcaacaagatcagaagaagacttgtgaaagacagcaacaccaagaaggccggcaagacaggccccatgaaaaccctgctggttagagtgatgacacccgatctgagagagcggctggaaaacctgagaaagaagcctgaaaatatcccccagcccatcagcaatacatctagagccaacctgaataagctgctgaccgattacaccgaaatgaagaaggcgatcctgcatgtgtactgggaagagttccagaaggaccctgtgggcctgatgagccgggtggcccagcctgccagcaagaagatcgatcagaacaagctgaaacctgagatggacgagaagggcaacctgaccaccgccggctttgcctgctctcagtgtggccagcccctgttcgtgtacaagctggagcaggtgtctgagaagggcaaggcttacaccaactacttcggacggtgcaatgtggccgagcacgaaaagctgatcctgctggcccagctgaagcccgagaaggatagcgacgaagccgtgacatatagcctgggaaagtttgggcagagggccctggatttctacagcattcatgtgaccaaggagtccacccaccccgtgaagcccctggcccagatcgccggaaacagatacgcctccggacctgtgggaaaggccctgagcgacgcatgtatgggcacaatcgcctccttcctgtctaagtaccaggacatcatcatcgaacaccagaaggtggtgaagggcaaccagaagagactggagagcctgcgggagctggccggcaaggaaaacctggaataccctagcgtgaccctgccacctcagcctcacaccaaggagggcgttgatgcctacaacgaagtgatcgcccgggtgcgaatgtgggtgaacctgaacctgtggcagaagctgaagctaagcagagatgatgccaagcctctgctgagactgaagggattcccttcctttcctctggtcgagagacaggccaacgaagtggactggtgggacatggtgtgtaacgtgaagaagctgatcaacgagaaaaaggaggatggcaaggtgttttggcagaatctggctggctacaagagacaggaagccctgagaccatacctgagcagcgaggaagatcggaagaagggaaagaaattcgctcggtaccagctgggcgacctgctgctgcacctggaaaagaagcacggcgaggactggggaaaggtgtacgacgaggcctgggagcggattgacaagaaagtggaaggcctgagcaagcacatcaagctggaagaggaacggagaagcgaggacgcccagagcaaggccgccctgaccgactggctgcgggctaaggccagcttcgtgatcgagggcctgaaggaggccgacaaggacgagttctgcagatgcgagctgaagctgcagaagtggtacggggacctgcggggaaagcccttcgccatcgaagccgagaacagcatcctggacatcagcggcttcagcaagcagtacaactgtgccttcatctggcagaaggacggcgtgaagaagctgaacctgtacctgatcatcaactacttcaagggcggcaagctgcggttcaagaagatcaaacctgaagccttcgaagccaacagattctacaccgtgatcaacaaaaagagcggcgagatcgtgcccatggaggtgaacttcaacttcgacgaccccaacctgatcatcctgcctctggcctttggcaagagacagggcagagaattcatctggaacgacctgctgtccctggaaaccggcagcctgaagctggccaacggaagagtgatcgagaagacactgtacaacagaagaacccggcaggatgagcctgccctgttcgtggccctgaccttcgagcggcgggaggtcctggactcctccaatatcaaaccaatgaacctgatcggcgtggcaagaggcgaaaacatccccgccgtgatcgccctgaccgaccccgagggctgcccactgagccggtttaaggatagcctgggaaacccaacccacatcctgagaatcggcgagagctataaggagaagcagcggaccatccaggccaagaaggaggtggagcagcggagagccggcggctacagccggaagtacgccagcaaagccaagaatctggcagacgatatggtgagaaacaccgctagagatctgctgtactacgccgtgacccaggatgccatgctgatcttcgccaacctgagccggggcttcggccggcagggcaagcggaccttcatggccgagagacagtacacacggatggaggactggctgaccgccaagctggcctacgagggcctgagcaagacctacctgtccaagacactggcccagtacacctccaagacatgcagcaactgtgggtttaccatcaccagcgccgactacgacagggtgctggagaagctgaagaagacagcaacaggctggatgaccacaattaacggcaaggagctgaaggtggagggccagattacctactacaacagatacaagagacagaacgtagtcaaggacctgtccgtcgagctggatagactgagcgaagaatctgtgaacaacgacatctcctcctggacaaagggcagaagcggagaagctctgagcctcctgaagaaaagattctcccatagacccgtgcaggagaagttcgtgtgcctgaactgcggcttcgagacacacgcagccgagcaagccgccctgaacatcgccagatcctggctgttcctgcggagccaggagtacaagaaataccagacaaacaagacaaccggcaacaccgataagagagccttcgtcgagacctggcagtccttttaccggaagaagcttaaggaggtgtggaaacctgccgtgcggtctggcggatctggcggaggctccaggcaggccttcctggccttcggcgacgtgaccgtggacttcacccagaaggagtggaggctgctgagccccgcccagagggccctgtacagggaggtgaccctggagaactacagccacctggtgagcctgggcatcctgcacagcaagcccgagctgatcaggaggctggagcagggcgaggccccctggggcgaggagaggaggaggaggcccggcccctgcgccggcatctacgccgagggcggcccaagcagcggcgcccctcctcccagcggcggcagcccagccggctccccaacctctaccgaggagggcacctctgagtccgccacccccgagagcggccctggcacctccaccgagcccagcgagggcagcgcacccggcagccctgccggcagccccacctccacagaggagggaaccagcaccgagcccagcgaaggcagcgccccaggcaccagcaccgagcctagtgagcaggagattaaacggatcaacaagatcagaagaagacttgtgaaagacagcaacaccaagaaggccggcaagacaggccccatgaaaaccctgctggttagagtgatgacacccgatctgagagagcggctggaaaacctgagaaagaagcctgaaaatatcccccagcccatcagcaatacatctagagccaacctgaataagctgctgaccgattacaccgaaatgaagaaggcgatcctgcatgtgtactgggaagagttccagaaggaccctgtgggcctgatgagccgggtggcccagcctgccagcaagaagatcgatcagaacaagctgaaacctgagatggacgagaagggcaacctgaccaccgccggctttgcctgctctcagtgtggccagcccctgttcgtgtacaagctggagcaggtgtctgagaagggcaaggcttacaccaactacttcggacggtgcaatgtggccgagcacgaaaagctgatcctgctggcccagctgaagcccgagaaggatagcgacgaagccgtgacatatagcctgggaaagtttgggcagagggccctggatttctacagcattcatgtgaccaaggagtccacccaccccgtgaagcccctggcccagatcgccggaaacagatacgcctccggacctgtgggaaaggccctgagcgacgcatgtatgggcacaatcgcctccttcctgtctaagtaccaggacatcatcatcgaacaccagaaggtggtgaagggcaaccagaagagactggagagcctgcgggagctggccggcaaggaaaacctggaataccctagcgtgaccctgccacctcagcctcacaccaaggagggcgttgatgcctacaacgaagtgatcgcccgggtgcgaatgtgggtgaacctgaacctgtggcagaagctgaagctaagcagagatgatgccaagcctctgctgagactgaagggattcccttcctttcctctggtcgagagacaggccaacgaagtggactggtgggacatggtgtgtaacgtgaagaagctgatcaacgagaaaaaggaggatggcaaggtgttttggcagaatctggctggctacaagagacaggaagccctgagaccatacctgagcagcgaggaagatcggaagaagggaaagaaattcgctcggtaccagctgggcgacctgctgctgcacctggaaaagaagcacggcgaggactggggaaaggtgtacgacgaggcctgggagcggattgacaagaaagtggaaggcctgagcaagcacatcaagctggaagaggaacggagaagcgaggacgcccagagcaaggccgccctgaccgactggctgcgggctaaggccagcttcgtgatcgagggcctgaaggaggccgacaaggacgagttctgcagatgcgagctgaagctgcagaagtggtacggggacctgcggggaaagcccttcgccatcgaagccgagaacagcatcctggacatcagcggcttcagcaagcagtacaactgtgccttcatctggcagaaggacggcgtgaagaagctgaacctgtacctgatcatcaactacttcaagggcggcaagctgcggttcaagaagatcaaacctgaagccttcgaagccaacagattctacaccgtgatcaacaaaaagagcggcgagatcgtgcccatggaggtgaacttcaacttcgacgaccccaacctgatcatcctgcctctggcctttggcaagagacagggcagagaattcatctggaacgacctgctgtccctggaaaccggcagcctgaagctggccaacggaagagtgatcgagaagacactgtacaacagaagaacccggcaggatgagcctgccctgttcgtggccctgaccttcgagcggcgggaggtcctggactcctccaatatcaaaccaatgaacctgatcggcgtggcaagaggcgaaaacatccccgccgtgatcgccctgaccgaccccgagggctgcccactgagccggtttaaggatagcctgggaaacccaacccacatcctgagaatcggcgagagctataaggagaagcagcggaccatccaggccaagaaggaggtggagcagcggagagccggcggctacagccggaagtacgccagcaaagccaagaatctggcagacgatatggtgagaaacaccgctagagatctgctgtactacgccgtgacccaggatgccatgctgatcttcgccaacctgagccggggcttcggccggcagggcaagcggaccttcatggccgagagacagtacacacggatggaggactggctgaccgccaagctggcctacgagggcctgagcaagacctacctgtccaagacactggcccagtacacctccaagacatgcagcaactgtgggtttaccatcaccagcgccgactacgacagggtgctggagaagctgaagaagacagcaacaggctggatgaccacaattaacggcaaggagctgaaggtggagggccagattacctactacaacagatacaagagacagaacgtagtcaaggacctgtccgtcgagctggatagactgagcgaagaatctgtgaacaacgacatctcctcctggacaaagggcagaagcggagaagctctgagcctcctgaagaaaagattctcccatagacccgtgcaggagaagttcgtgtgcctgaactgcggcttcgagacacacgcagccgagcaagccgccctgaacatcgccagatcctggctgttcctgcggagccaggagtacaagaaataccagacaaacaagacaaccggcaacaccgataagagagccttcgtcgagacctggcagtccttttaccggaagaagcttaaggaggtgtggaaacctgccgtgcggtctggcggatctggcggaggctcctaggcaggccttcctggccttcggcgacgtgaccgtggacttcacccagaaggagtggaggctgctgagccccgcccagagggccctgtacagggaggtgaccctggagaactacagccacctggtgagcctgggcatcctgcacagcaagcccgagctgatcaggaggctggagcagggcgaggccccctggggcgaggagaggaggaggaggcccggcccctgcgccggcatctacgccgagggatctggctccggcagcggccccaagaaaaagagaaaagtctaagctgccttctgcggggcttgccttctggccatgcccttcttctctcccttgcacctgtacctcttggtctttgaataaagcctgagtaggaaggctagcaaaaaaaaaaaaaaaaaaaaaaaaaaaaaaaaaaaaaaaaaaaaaaaaaaaaaaaaaaaaaaaaaaaaaaaaaaaaaaaa

SEQ ID NO: 15554 - RNA, 9485 nt, synthetic construct
  source 1..9485: mol_type = other RNA
aggaaataagagagaaaagaagagtaagaagaaatataagagccaccatggcccctaagaagaagcgtaaagtgagccggatggaacgcctcgtctacgaggtgcggcagaagtgcagaaacatcgaggacatctgcatctcctgcggatctctgaacgtgaccctggagcacccactgttcatcggcggcatgtgccagaactgtaaaaactgttttctggagtgtgcctatcaatacgacgatgacggctaccagagctactgcaccatctgttgcggcggaagagaggtgctgatgtgtggaaataacaactgctgccggtgcttctgcgtggaatgcgtggacctgctggtgggccccggcgccgcccaggccgctattaaggaagatccttggaactgctacatgtgcggccacaagggcacatacggcctgctgagacggagagaggactggcctagcagactgcagatgttcttcgccaataaccacgaccaggagttcgacccccctaaggtgtaccctcccgtccccgccgagaagagaaagcccatccgggtcctgagcctgttcgatggcatcgccaccggtctgctggtgctgaaggacctgggcatccaggtggataggtacattgcctccgaggtgtgcgaggactccatcaccgtgggaatggtgcgtcatcagggcaagatcatgtacgtgggcgacgtgcggagcgtgacacagaagcatatccaggagtggggccctttcgacctggtgatcggcggcagcccttgcaatgacctgagcatcgtgaacccagcccggaagggcctgtacgagggaaccggcagactgttcttcgagttttacagactgctgcacgacgcccggcctaaggaaggcgacgaccggcccttcttttggctgttcgagaatgtggtggccatgggagtcagcgacaagcgggatattagccggttcctggagagcaaccccgtgatgatcgatgccaaggaagtgagcgccgcccaccgggccagatacttctggggcaatctgcctggcatgaacagacccctggccagcaccgtgaacgacaagctggagctgcaggagtgcctggagcacggccggatcgccaagttcagcaaggtgagaaccatcaccacccgaagcaacagcatcaaacaaggcaaggaccagcactttcctgtgttcatgaacgagaaggaggacatcctgtggtgtaccgagatggagagagtgttcgggttcccagtccactacacagatgtcagcaacatgtctagactggccagacagagactgctgggaagaagctggtccgtccctgtgatcagacacctgttcgcccctctgaaggagtacttcgcctgcgtgagcagcggcaacagcaacgccaacagccggggccccagcttctctagcggcctggtgccactgtccctgagagggagccacatgggccccatggagatctacaaaaccgtgagcgcctggaagcggcagcctgtgcgcgtgctgagcctgtttcggaatatcgataaagtcctgaaaagcctgggattcctggagagcggctctggctccggcggtggcaccctgaagtacgtggaggatgtgacaaacgtggtcagacgggatgtggagaagtggggccccttcgatctggtgtacggcagcacccaacccctgggcagctcttgtgaccggtgccctggctggtacatgtttcagttccaccggatcctgcagtacgccctgccgagacaggagtcccagcggccattcttttggattttcatggacaacttgctgctgaccgaggatgaccaggaaactaccactcggttcctgcagaccgaagccgtgaccctgcaggacgtgagaggccgggactaccagaacgccatgcgggtgtggtccaacatccctggactgaaaagcaagcacgcacctctgacccctaaagaagaggagtacctgcaggcccaggtgcggagcagaagcaagctggacgcccctaaggtggatctgctggtgaagaattgcctcctgcccctgagagagtacttcaagtatttcagccagaatagtctgcccctgggaggcagcggcggcggcgccctggtgacatttgaggacgtcgccgtgcggttcacccaggaggaatgggctctgctggatccttctcagaaaatcctgtaccgggacgtgatgagagagacataccggaatctgacctccgtgggcatcaactgggaatgttgggaccttgaagcctgcttcagaagcctgggaagaaacctgagagtgcaggtggtgaagagaaagtgcgagctgaccaacagcggcccctgcgccgagggcggcccaagcagcggcgcccctcctcccagcggcggcagcccagccggctccccaacctctaccgaggagggcacctctgagtccgccacccccgagagcggccctggcacctccaccgagcccagcgagggcagcgcacccggcagccctgccggcagccccacctccacagaggagggaaccagcaccgagcccagcgaaggcagcgccccaggcaccagcaccgagcctagtgagcaggagattaaacggatcaacaagatcagaagaagacttgtgaaagacagcaacaccaagaaggccggcaagacaggccccatgaaaaccctgctggttagagtgatgacacccgatctgagagagcggctggaaaacctgagaaagaagcctgaaaatatcccccagcccatcagcaatacatctagagccaacctgaataagctgctgaccgattacaccgaaatgaagaaggcgatcctgcatgtgtactgggaagagttccagaaggaccctgtgggcctgatgagccgggtggcccagcctgccagcaagaagatcgatcagaacaagctgaaacctgagatggacgagaagggcaacctgaccaccgccggctttgcctgctctcagtgtggccagcccctgttcgtgtacaagctggagcaggtgtctgagaagggcaaggcttacaccaactacttcggacggtgcaatgtggccgagcacgaaaagctgatcctgctggcccagctgaagcccgagaaggatagcgacgaagccgtgacatatagcctgggaaagtttgggcagagggccctggatttctacagcattcatgtgaccaaggagtccacccaccccgtgaagcccctggcccagatcgccggaaacagatacgcctccggacctgtgggaaaggccctgagcgacgcatgtatgggcacaatcgcctccttcctgtctaagtaccaggacatcatcatcgaacaccagaaggtggtgaagggcaaccagaagagactggagagcctgcgggagctggccggcaaggaaaacctggaataccctagcgtgaccctgccacctcagcctcacaccaaggagggcgttgatgcctacaacgaagtgatcgcccgggtgcgaatgtgggtgaacctgaacctgtggcagaagctgaagctaagcagagatgatgccaagcctctgctgagactgaagggattcccttcctttcctctggtcgagagacaggccaacgaagtggactggtgggacatggtgtgtaacgtgaagaagctgatcaacgagaaaaaggaggatggcaaggtgttttggcagaatctggctggctacaagagacaggaagccctgagaccatacctgagcagcgaggaagatcggaagaagggaaagaaattcgctcggtaccagctgggcgacctgctgctgcacctggaaaagaagcacggcgaggactggggaaaggtgtacgacgaggcctgggagcggattgacaagaaagtggaaggcctgagcaagcacatcaagctggaagaggaacggagaagcgaggacgcccagagcaaggccgccctgaccgactggctgcgggctaaggccagcttcgtgatcgagggcctgaaggaggccgacaaggacgagttctgcagatgcgagctgaagctgcagaagtggtacggggacctgcggggaaagcccttcgccatcgaagccgagaacagcatcctggacatcagcggcttcagcaagcagtacaactgtgccttcatctggcagaaggacggcgtgaagaagctgaacctgtacctgatcatcaactacttcaagggcggcaagctgcggttcaagaagatcaaacctgaagccttcgaagccaacagattctacaccgtgatcaacaaaaagagcggcgagatcgtgcccatggaggtgaacttcaacttcgacgaccccaacctgatcatcctgcctctggcctttggcaagagacagggcagagaattcatctggaacgacctgctgtccctggaaaccggcagcctgaagctggccaacggaagagtgatcgagaagacactgtacaacagaagaacccggcaggatgagcctgccctgttcgtggccctgaccttcgagcggcgggaggtcctggactcctccaatatcaaaccaatgaacctgatcggcgtggcaagaggcgaaaacatccccgccgtgatcgccctgaccgaccccgagggctgcccactgagccggtttaaggatagcctgggaaacccaacccacatcctgagaatcggcgagagctataaggagaagcagcggaccatccaggccaagaaggaggtggagcagcggagagccggcggctacagccggaagtacgccagcaaagccaagaatctggcagacgatatggtgagaaacaccgctagagatctgctgtactacgccgtgacccaggatgccatgctgatcttcgccaacctgagccggggcttcggccggcagggcaagcggaccttcatggccgagagacagtacacacggatggaggactggctgaccgccaagctggcctacgagggcctgagcaagacctacctgtccaagacactggcccagtacacctccaagacatgcagcaactgtgggtttaccatcaccagcgccgactacgacagggtgctggagaagctgaagaagacagcaacaggctggatgaccacaattaacggcaaggagctgaaggtggagggccagattacctactacaacagatacaagagacagaacgtagtcaaggacctgtccgtcgagctggatagactgagcgaagaatctgtgaacaacgacatctcctcctggacaaagggcagaagcggagaagctctgagcctcctgaagaaaagattctcccatagacccgtgcaggagaagttcgtgtgcctgaactgcggcttcgagacacacgcagccgagcaagccgccctgaacatcgccagatcctggctgttcctgcggagccaggagtacaagaaataccagacaaacaagacaaccggcaacaccgataagagagccttcgtcgagacctggcagtccttttaccggaagaagcttaaggaggtgtggaaacctgccgtgcggtctggcggatctggcggaggctccaggcccagggccctgaagttcgtggacgtggccgtgtacttcagcagcgaggagtggggctgcctgaggcccgcccagagggccctgtacagggacgtgatgagggagacctacggccacctgggcgccctgggcttccccggccccaagcccgccctgatcagctggatggagcaggagagcgaggcctggagcagcgccgcccaggaccccgagaagggcgagaacctgggcggcgccaggggcggcccaagcagcggcgcccctcctcccagcggcggcagcccagccggctccccaacctctaccgaggagggcacctctgagtccgccacccccgagagcggccctggcacctccaccgagcccagcgagggcagcgcacccggcagccctgccggcagccccacctccacagaggagggaaccagcaccgagcccagcgaaggcagcgccccaggcaccagcaccgagcctagtgagcaggagattaaacggatcaacaagatcagaagaagacttgtgaaagacagcaacaccaagaaggccggcaagacaggccccatgaaaaccctgctggttagagtgatgacacccgatctgagagagcggctggaaaacctgagaaagaagcctgaaaatatcccccagcccatcagcaatacatctagagccaacctgaataagctgctgaccgattacaccgaaatgaagaaggcgatcctgcatgtgtactgggaagagttccagaaggaccctgtgggcctgatgagccgggtggcccagcctgccagcaagaagatcgatcagaacaagctgaaacctgagatggacgagaagggcaacctgaccaccgccggctttgcctgctctcagtgtggccagcccctgttcgtgtacaagctggagcaggtgtctgagaagggcaaggcttacaccaactacttcggacggtgcaatgtggccgagcacgaaaagctgatcctgctggcccagctgaagcccgagaaggatagcgacgaagccgtgacatatagcctgggaaagtttgggcagagggccctggatttctacagcattcatgtgaccaaggagtccacccaccccgtgaagcccctggcccagatcgccggaaacagatacgcctccggacctgtgggaaaggccctgagcgacgcatgtatgggcacaatcgcctccttcctgtctaagtaccaggacatcatcatcgaacaccagaaggtggtgaagggcaaccagaagagactggagagcctgcgggagctggccggcaaggaaaacctggaataccctagcgtgaccctgccacctcagcctcacaccaaggagggcgttgatgcctacaacgaagtgatcgcccgggtgcgaatgtgggtgaacctgaacctgtggcagaagctgaagctaagcagagatgatgccaagcctctgctgagactgaagggattcccttcctttcctctggtcgagagacaggccaacgaagtggactggtgggacatggtgtgtaacgtgaagaagctgatcaacgagaaaaaggaggatggcaaggtgttttggcagaatctggctggctacaagagacaggaagccctgagaccatacctgagcagcgaggaagatcggaagaagggaaagaaattcgctcggtaccagctgggcgacctgctgctgcacctggaaaagaagcacggcgaggactggggaaaggtgtacgacgaggcctgggagcggattgacaagaaagtggaaggcctgagcaagcacatcaagctggaagaggaacggagaagcgaggacgcccagagcaaggccgccctgaccgactggctgcgggctaaggccagcttcgtgatcgagggcctgaaggaggccgacaaggacgagttctgcagatgcgagctgaagctgcagaagtggtacggggacctgcggggaaagcccttcgccatcgaagccgagaacagcatcctggacatcagcggcttcagcaagcagtacaactgtgccttcatctggcagaaggacggcgtgaagaagctgaacctgtacctgatcatcaactacttcaagggcggcaagctgcggttcaagaagatcaaacctgaagccttcgaagccaacagattctacaccgtgatcaacaaaaagagcggcgagatcgtgcccatggaggtgaacttcaacttcgacgaccccaacctgatcatcctgcctctggcctttggcaagagacagggcagagaattcatctggaacgacctgctgtccctggaaaccggcagcctgaagctggccaacggaagagtgatcgagaagacactgtacaacagaagaacccggcaggatgagcctgccctgttcgtggccctgaccttcgagcggcgggaggtcctggactcctccaatatcaaaccaatgaacctgatcggcgtggcaagaggcgaaaacatccccgccgtgatcgccctgaccgaccccgagggctgcccactgagccggtttaaggatagcctgggaaacccaacccacatcctgagaatcggcgagagctataaggagaagcagcggaccatccaggccaagaaggaggtggagcagcggagagccggcggctacagccggaagtacgccagcaaagccaagaatctggcagacgatatggtgagaaacaccgctagagatctgctgtactacgccgtgacccaggatgccatgctgatcttcgccaacctgagccggggcttcggccggcagggcaagcggaccttcatggccgagagacagtacacacggatggaggactggctgaccgccaagctggcctacgagggcctgagcaagacctacctgtccaagacactggcccagtacacctccaagacatgcagcaactgtgggtttaccatcaccagcgccgactacgacagggtgctggagaagctgaagaagacagcaacaggctggatgaccacaattaacggcaaggagctgaaggtggagggccagattacctactacaacagatacaagagacagaacgtagtcaaggacctgtccgtcgagctggatagactgagcgaagaatctgtgaacaacgacatctcctcctggacaaagggcagaagcggagaagctctgagcctcctgaagaaaagattctcccatagacccgtgcaggagaagttcgtgtgcctgaactgcggcttcgagacacacgcagccgagcaagccgccctgaacatcgccagatcctggctgttcctgcggagccaggagtacaagaaataccagacaaacaagacaaccggcaacaccgataagagagccttcgtcgagacctggcagtccttttaccggaagaagcttaaggaggtgtggaaacctgccgtgcggtctggcggatctggcggaggctcctaggcccagggccctgaagttcgtggacgtggccgtgtacttcagcagcgaggagtggggctgcctgaggcccgcccagagggccctgtacagggacgtgatgagggagacctacggccacctgggcgccctgggcttccccggccccaagcccgccctgatcagctggatggagcaggagagcgaggcctggagcagcgccgcccaggaccccgagaagggcgagaacctgggcggcgccaggggatctggctccggcagcggccccaagaaaaagagaaaagtctaagctgccttctgcggggcttgccttctggccatgcccttcttctctcccttgcacctgtacctcttggtctttgaataaagcctgagtaggaaggctagcaaaaaaaaaaaaaaaaaaaaaaaaaaaaaaaaaaaaaaaaaaaaaaaaaaaaaaaaaaaaaaaaaaaaaaaaaaaaaaaa

SEQ ID NO: 15555 - RNA, 9485 nt, synthetic construct
  source 1..9485: mol_type = other RNA
aggaaataagagagaaaagaagagtaagaagaaatataagagccaccatggcccctaagaagaagcgtaaagtgagccggatggaacgcctcgtctacgaggtgcggcagaagtgcagaaacatcgaggacatctgcatctcctgcggatctctgaacgtgaccctggagcacccactgttcatcggcggcatgtgccagaactgtaaaaactgttttctggagtgtgcctatcaatacgacgatgacggctaccagagctactgcaccatctgttgcggcggaagagaggtgctgatgtgtggaaataacaactgctgccggtgcttctgcgtggaatgcgtggacctgctggtgggccccggcgccgcccaggccgctattaaggaagatccttggaactgctacatgtgcggccacaagggcacatacggcctgctgagacggagagaggactggcctagcagactgcagatgttcttcgccaataaccacgaccaggagttcgacccccctaaggtgtaccctcccgtccccgccgagaagagaaagcccatccgggtcctgagcctgttcgatggcatcgccaccggtctgctggtgctgaaggacctgggcatccaggtggataggtacattgcctccgaggtgtgcgaggactccatcaccgtgggaatggtgcgtcatcagggcaagatcatgtacgtgggcgacgtgcggagcgtgacacagaagcatatccaggagtggggccctttcgacctggtgatcggcggcagcccttgcaatgacctgagcatcgtgaacccagcccggaagggcctgtacgagggaaccggcagactgttcttcgagttttacagactgctgcacgacgcccggcctaaggaaggcgacgaccggcccttcttttggctgttcgagaatgtggtggccatgggagtcagcgacaagcgggatattagccggttcctggagagcaaccccgtgatgatcgatgccaaggaagtgagcgccgcccaccgggccagatacttctggggcaatctgcctggcatgaacagacccctggccagcaccgtgaacgacaagctggagctgcaggagtgcctggagcacggccggatcgccaagttcagcaaggtgagaaccatcaccacccgaagcaacagcatcaaacaaggcaaggaccagcactttcctgtgttcatgaacgagaaggaggacatcctgtggtgtaccgagatggagagagtgttcgggttcccagtccactacacagatgtcagcaacatgtctagactggccagacagagactgctgggaagaagctggtccgtccctgtgatcagacacctgttcgcccctctgaaggagtacttcgcctgcgtgagcagcggcaacagcaacgccaacagccggggccccagcttctctagcggcctggtgccactgtccctgagagggagccacatgggccccatggagatctacaaaaccgtgagcgcctggaagcggcagcctgtgcgcgtgctgagcctgtttcggaatatcgataaagtcctgaaaagcctgggattcctggagagcggctctggctccggcggtggcaccctgaagtacgtggaggatgtgacaaacgtggtcagacgggatgtggagaagtggggccccttcgatctggtgtacggcagcacccaacccctgggcagctcttgtgaccggtgccctggctggtacatgtttcagttccaccggatcctgcagtacgccctgccgagacaggagtcccagcggccattcttttggattttcatggacaacttgctgctgaccgaggatgaccaggaaactaccactcggttcctgcagaccgaagccgtgaccctgcaggacgtgagaggccgggactaccagaacgccatgcgggtgtggtccaacatccctggactgaaaagcaagcacgcacctctgacccctaaagaagaggagtacctgcaggcccaggtgcggagcagaagcaagctggacgcccctaaggtggatctgctggtgaagaattgcctcctgcccctgagagagtacttcaagtatttcagccagaatagtctgcccctgggaggcagcggcggcggcgccctggtgacatttgaggacgtcgccgtgcggttcacccaggaggaatgggctctgctggatccttctcagaaaatcctgtaccgggacgtgatgagagagacataccggaatctgacctccgtgggcatcaactgggaatgttgggaccttgaagcctgcttcagaagcctgggaagaaacctgagagtgcaggtggtgaagagaaagtgcgagctgaccaacagcggcccctgcgccgagggcggcccaagcagcggcgcccctcctcccagcggcggcagcccagccggctccccaacctctaccgaggagggcacctctgagtccgccacccccgagagcggccctggcacctccaccgagcccagcgagggcagcgcacccggcagccctgccggcagccccacctccacagaggagggaaccagcaccgagcccagcgaaggcagcgccccaggcaccagcaccgagcctagtgagcaggagattaaacggatcaacaagatcagaagaagacttgtgaaagacagcaacaccaagaaggccggcaagacaggccccatgaaaaccctgctggttagagtgatgacacccgatctgagagagcggctggaaaacctgagaaagaagcctgaaaatatcccccagcccatcagcaatacatctagagccaacctgaataagctgctgaccgattacaccgaaatgaagaaggcgatcctgcatgtgtactgggaagagttccagaaggaccctgtgggcctgatgagccgggtggcccagcctgccagcaagaagatcgatcagaacaagctgaaacctgagatggacgagaagggcaacctgaccaccgccggctttgcctgctctcagtgtggccagcccctgttcgtgtacaagctggagcaggtgtctgagaagggcaaggcttacaccaactacttcggacggtgcaatgtggccgagcacgaaaagctgatcctgctggcccagctgaagcccgagaaggatagcgacgaagccgtgacatatagcctgggaaagtttgggcagagggccctggatttctacagcattcatgtgaccaaggagtccacccaccccgtgaagcccctggcccagatcgccggaaacagatacgcctccggacctgtgggaaaggccctgagcgacgcatgtatgggcacaatcgcctccttcctgtctaagtaccaggacatcatcatcgaacaccagaaggtggtgaagggcaaccagaagagactggagagcctgcgggagctggccggcaaggaaaacctggaataccctagcgtgaccctgccacctcagcctcacaccaaggagggcgttgatgcctacaacgaagtgatcgcccgggtgcgaatgtgggtgaacctgaacctgtggcagaagctgaagctaagcagagatgatgccaagcctctgctgagactgaagggattcccttcctttcctctggtcgagagacaggccaacgaagtggactggtgggacatggtgtgtaacgtgaagaagctgatcaacgagaaaaaggaggatggcaaggtgttttggcagaatctggctggctacaagagacaggaagccctgagaccatacctgagcagcgaggaagatcggaagaagggaaagaaattcgctcggtaccagctgggcgacctgctgctgcacctggaaaagaagcacggcgaggactggggaaaggtgtacgacgaggcctgggagcggattgacaagaaagtggaaggcctgagcaagcacatcaagctggaagaggaacggagaagcgaggacgcccagagcaaggccgccctgaccgactggctgcgggctaaggccagcttcgtgatcgagggcctgaaggaggccgacaaggacgagttctgcagatgcgagctgaagctgcagaagtggtacggggacctgcggggaaagcccttcgccatcgaagccgagaacagcatcctggacatcagcggcttcagcaagcagtacaactgtgccttcatctggcagaaggacggcgtgaagaagctgaacctgtacctgatcatcaactacttcaagggcggcaagctgcggttcaagaagatcaaacctgaagccttcgaagccaacagattctacaccgtgatcaacaaaaagagcggcgagatcgtgcccatggaggtgaacttcaacttcgacgaccccaacctgatcatcctgcctctggcctttggcaagagacagggcagagaattcatctggaacgacctgctgtccctggaaaccggcagcctgaagctggccaacggaagagtgatcgagaagacactgtacaacagaagaacccggcaggatgagcctgccctgttcgtggccctgaccttcgagcggcgggaggtcctggactcctccaatatcaaaccaatgaacctgatcggcgtggcaagaggcgaaaacatccccgccgtgatcgccctgaccgaccccgagggctgcccactgagccggtttaaggatagcctgggaaacccaacccacatcctgagaatcggcgagagctataaggagaagcagcggaccatccaggccaagaaggaggtggagcagcggagagccggcggctacagccggaagtacgccagcaaagccaagaatctggcagacgatatggtgagaaacaccgctagagatctgctgtactacgccgtgacccaggatgccatgctgatcttcgccaacctgagccggggcttcggccggcagggcaagcggaccttcatggccgagagacagtacacacggatggaggactggctgaccgccaagctggcctacgagggcctgagcaagacctacctgtccaagacactggcccagtacacctccaagacatgcagcaactgtgggtttaccatcaccagcgccgactacgacagggtgctggagaagctgaagaagacagcaacaggctggatgaccacaattaacggcaaggagctgaaggtggagggccagattacctactacaacagatacaagagacagaacgtagtcaaggacctgtccgtcgagctggatagactgagcgaagaatctgtgaacaacgacatctcctcctggacaaagggcagaagcggagaagctctgagcctcctgaagaaaagattctcccatagacccgtgcaggagaagttcgtgtgcctgaactgcggcttcgagacacacgcagccgagcaagccgccctgaacatcgccagatcctggctgttcctgcggagccaggagtacaagaaataccagacaaacaagacaaccggcaacaccgataagagagccttcgtcgagacctggcagtccttttaccggaagaagcttaaggaggtgtggaaacctgccgtgcggtctggcggatctggcggaggctccgagcccgtgaccttcgaggacgtggccgtgtacttcagccagaaccagtgggccagcctggacagcgcccagagggccctgtacagggaggtgatgctggagaactacgccaacgtggccagcctggtgagccccttccccaggcccgacctgatcagccagctggagaggggcgaggccccctgggaccccaacccctgggaggccgaggacctgaggggcatctgccccggcggcgagaggggcggcccaagcagcggcgcccctcctcccagcggcggcagcccagccggctccccaacctctaccgaggagggcacctctgagtccgccacccccgagagcggccctggcacctccaccgagcccagcgagggcagcgcacccggcagccctgccggcagccccacctccacagaggagggaaccagcaccgagcccagcgaaggcagcgccccaggcaccagcaccgagcctagtgagcaggagattaaacggatcaacaagatcagaagaagacttgtgaaagacagcaacaccaagaaggccggcaagacaggccccatgaaaaccctgctggttagagtgatgacacccgatctgagagagcggctggaaaacctgagaaagaagcctgaaaatatcccccagcccatcagcaatacatctagagccaacctgaataagctgctgaccgattacaccgaaatgaagaaggcgatcctgcatgtgtactgggaagagttccagaaggaccctgtgggcctgatgagccgggtggcccagcctgccagcaagaagatcgatcagaacaagctgaaacctgagatggacgagaagggcaacctgaccaccgccggctttgcctgctctcagtgtggccagcccctgttcgtgtacaagctggagcaggtgtctgagaagggcaaggcttacaccaactacttcggacggtgcaatgtggccgagcacgaaaagctgatcctgctggcccagctgaagcccgagaaggatagcgacgaagccgtgacatatagcctgggaaagtttgggcagagggccctggatttctacagcattcatgtgaccaaggagtccacccaccccgtgaagcccctggcccagatcgccggaaacagatacgcctccggacctgtgggaaaggccctgagcgacgcatgtatgggcacaatcgcctccttcctgtctaagtaccaggacatcatcatcgaacaccagaaggtggtgaagggcaaccagaagagactggagagcctgcgggagctggccggcaaggaaaacctggaataccctagcgtgaccctgccacctcagcctcacaccaaggagggcgttgatgcctacaacgaagtgatcgcccgggtgcgaatgtgggtgaacctgaacctgtggcagaagctgaagctaagcagagatgatgccaagcctctgctgagactgaagggattcccttcctttcctctggtcgagagacaggccaacgaagtggactggtgggacatggtgtgtaacgtgaagaagctgatcaacgagaaaaaggaggatggcaaggtgttttggcagaatctggctggctacaagagacaggaagccctgagaccatacctgagcagcgaggaagatcggaagaagggaaagaaattcgctcggtaccagctgggcgacctgctgctgcacctggaaaagaagcacggcgaggactggggaaaggtgtacgacgaggcctgggagcggattgacaagaaagtggaaggcctgagcaagcacatcaagctggaagaggaacggagaagcgaggacgcccagagcaaggccgccctgaccgactggctgcgggctaaggccagcttcgtgatcgagggcctgaaggaggccgacaaggacgagttctgcagatgcgagctgaagctgcagaagtggtacggggacctgcggggaaagcccttcgccatcgaagccgagaacagcatcctggacatcagcggcttcagcaagcagtacaactgtgccttcatctggcagaaggacggcgtgaagaagctgaacctgtacctgatcatcaactacttcaagggcggcaagctgcggttcaagaagatcaaacctgaagccttcgaagccaacagattctacaccgtgatcaacaaaaagagcggcgagatcgtgcccatggaggtgaacttcaacttcgacgaccccaacctgatcatcctgcctctggcctttggcaagagacagggcagagaattcatctggaacgacctgctgtccctggaaaccggcagcctgaagctggccaacggaagagtgatcgagaagacactgtacaacagaagaacccggcaggatgagcctgccctgttcgtggccctgaccttcgagcggcgggaggtcctggactcctccaatatcaaaccaatgaacctgatcggcgtggcaagaggcgaaaacatccccgccgtgatcgccctgaccgaccccgagggctgcccactgagccggtttaaggatagcctgggaaacccaacccacatcctgagaatcggcgagagctataaggagaagcagcggaccatccaggccaagaaggaggtggagcagcggagagccggcggctacagccggaagtacgccagcaaagccaagaatctggcagacgatatggtgagaaacaccgctagagatctgctgtactacgccgtgacccaggatgccatgctgatcttcgccaacctgagccggggcttcggccggcagggcaagcggaccttcatggccgagagacagtacacacggatggaggactggctgaccgccaagctggcctacgagggcctgagcaagacctacctgtccaagacactggcccagtacacctccaagacatgcagcaactgtgggtttaccatcaccagcgccgactacgacagggtgctggagaagctgaagaagacagcaacaggctggatgaccacaattaacggcaaggagctgaaggtggagggccagattacctactacaacagatacaagagacagaacgtagtcaaggacctgtccgtcgagctggatagactgagcgaagaatctgtgaacaacgacatctcctcctggacaaagggcagaagcggagaagctctgagcctcctgaagaaaagattctcccatagacccgtgcaggagaagttcgtgtgcctgaactgcggcttcgagacacacgcagccgagcaagccgccctgaacatcgccagatcctggctgttcctgcggagccaggagtacaagaaataccagacaaacaagacaaccggcaacaccgataagagagccttcgtcgagacctggcagtccttttaccggaagaagcttaaggaggtgtggaaacctgccgtgcggtctggcggatctggcggaggctcctgagcccgtgaccttcgaggacgtggccgtgtacttcagccagaaccagtgggccagcctggacagcgcccagagggccctgtacagggaggtgatgctggagaactacgccaacgtggccagcctggtgagccccttccccaggcccgacctgatcagccagctggagaggggcgaggccccctgggaccccaacccctgggaggccgaggacctgaggggcatctgccccggcggcgagaggggatctggctccggcagcggccccaagaaaaagagaaaagtctaagctgccttctgcggggcttgccttctggccatgcccttcttctctcccttgcacctgtacctcttggtctttgaataaagcctgagtaggaaggctagcaaaaaaaaaaaaaaaaaaaaaaaaaaaaaaaaaaaaaaaaaaaaaaaaaaaaaaaaaaaaaaaaaaaaaaaaaaaaaaaa

SEQ ID NO: 15556 - RNA, 9485 nt, synthetic construct
  source 1..9485: mol_type = other RNA
aggaaataagagagaaaagaagagtaagaagaaatataagagccaccatggcccctaagaagaagcgtaaagtgagccggatggaacgcctcgtctacgaggtgcggcagaagtgcagaaacatcgaggacatctgcatctcctgcggatctctgaacgtgaccctggagcacccactgttcatcggcggcatgtgccagaactgtaaaaactgttttctggagtgtgcctatcaatacgacgatgacggctaccagagctactgcaccatctgttgcggcggaagagaggtgctgatgtgtggaaataacaactgctgccggtgcttctgcgtggaatgcgtggacctgctggtgggccccggcgccgcccaggccgctattaaggaagatccttggaactgctacatgtgcggccacaagggcacatacggcctgctgagacggagagaggactggcctagcagactgcagatgttcttcgccaataaccacgaccaggagttcgacccccctaaggtgtaccctcccgtccccgccgagaagagaaagcccatccgggtcctgagcctgttcgatggcatcgccaccggtctgctggtgctgaaggacctgggcatccaggtggataggtacattgcctccgaggtgtgcgaggactccatcaccgtgggaatggtgcgtcatcagggcaagatcatgtacgtgggcgacgtgcggagcgtgacacagaagcatatccaggagtggggccctttcgacctggtgatcggcggcagcccttgcaatgacctgagcatcgtgaacccagcccggaagggcctgtacgagggaaccggcagactgttcttcgagttttacagactgctgcacgacgcccggcctaaggaaggcgacgaccggcccttcttttggctgttcgagaatgtggtggccatgggagtcagcgacaagcgggatattagccggttcctggagagcaaccccgtgatgatcgatgccaaggaagtgagcgccgcccaccgggccagatacttctggggcaatctgcctggcatgaacagacccctggccagcaccgtgaacgacaagctggagctgcaggagtgcctggagcacggccggatcgccaagttcagcaaggtgagaaccatcaccacccgaagcaacagcatcaaacaaggcaaggaccagcactttcctgtgttcatgaacgagaaggaggacatcctgtggtgtaccgagatggagagagtgttcgggttcccagtccactacacagatgtcagcaacatgtctagactggccagacagagactgctgggaagaagctggtccgtccctgtgatcagacacctgttcgcccctctgaaggagtacttcgcctgcgtgagcagcggcaacagcaacgccaacagccggggccccagcttctctagcggcctggtgccactgtccctgagagggagccacatgggccccatggagatctacaaaaccgtgagcgcctggaagcggcagcctgtgcgcgtgctgagcctgtttcggaatatcgataaagtcctgaaaagcctgggattcctggagagcggctctggctccggcggtggcaccctgaagtacgtggaggatgtgacaaacgtggtcagacgggatgtggagaagtggggccccttcgatctggtgtacggcagcacccaacccctgggcagctcttgtgaccggtgccctggctggtacatgtttcagttccaccggatcctgcagtacgccctgccgagacaggagtcccagcggccattcttttggattttcatggacaacttgctgctgaccgaggatgaccaggaaactaccactcggttcctgcagaccgaagccgtgaccctgcaggacgtgagaggccgggactaccagaacgccatgcgggtgtggtccaacatccctggactgaaaagcaagcacgcacctctgacccctaaagaagaggagtacctgcaggcccaggtgcggagcagaagcaagctggacgcccctaaggtggatctgctggtgaagaattgcctcctgcccctgagagagtacttcaagtatttcagccagaatagtctgcccctgggaggcagcggcggcggcgccctggtgacatttgaggacgtcgccgtgcggttcacccaggaggaatgggctctgctggatccttctcagaaaatcctgtaccgggacgtgatgagagagacataccggaatctgacctccgtgggcatcaactgggaatgttgggaccttgaagcctgcttcagaagcctgggaagaaacctgagagtgcaggtggtgaagagaaagtgcgagctgaccaacagcggcccctgcgccgagggcggcccaagcagcggcgcccctcctcccagcggcggcagcccagccggctccccaacctctaccgaggagggcacctctgagtccgccacccccgagagcggccctggcacctccaccgagcccagcgagggcagcgcacccggcagccctgccggcagccccacctccacagaggagggaaccagcaccgagcccagcgaaggcagcgccccaggcaccagcaccgagcctagtgagcaggagattaaacggatcaacaagatcagaagaagacttgtgaaagacagcaacaccaagaaggccggcaagacaggccccatgaaaaccctgctggttagagtgatgacacccgatctgagagagcggctggaaaacctgagaaagaagcctgaaaatatcccccagcccatcagcaatacatctagagccaacctgaataagctgctgaccgattacaccgaaatgaagaaggcgatcctgcatgtgtactgggaagagttccagaaggaccctgtgggcctgatgagccgggtggcccagcctgccagcaagaagatcgatcagaacaagctgaaacctgagatggacgagaagggcaacctgaccaccgccggctttgcctgctctcagtgtggccagcccctgttcgtgtacaagctggagcaggtgtctgagaagggcaaggcttacaccaactacttcggacggtgcaatgtggccgagcacgaaaagctgatcctgctggcccagctgaagcccgagaaggatagcgacgaagccgtgacatatagcctgggaaagtttgggcagagggccctggatttctacagcattcatgtgaccaaggagtccacccaccccgtgaagcccctggcccagatcgccggaaacagatacgcctccggacctgtgggaaaggccctgagcgacgcatgtatgggcacaatcgcctccttcctgtctaagtaccaggacatcatcatcgaacaccagaaggtggtgaagggcaaccagaagagactggagagcctgcgggagctggccggcaaggaaaacctggaataccctagcgtgaccctgccacctcagcctcacaccaaggagggcgttgatgcctacaacgaagtgatcgcccgggtgcgaatgtgggtgaacctgaacctgtggcagaagctgaagctaagcagagatgatgccaagcctctgctgagactgaagggattcccttcctttcctctggtcgagagacaggccaacgaagtggactggtgggacatggtgtgtaacgtgaagaagctgatcaacgagaaaaaggaggatggcaaggtgttttggcagaatctggctggctacaagagacaggaagccctgagaccatacctgagcagcgaggaagatcggaagaagggaaagaaattcgctcggtaccagctgggcgacctgctgctgcacctggaaaagaagcacggcgaggactggggaaaggtgtacgacgaggcctgggagcggattgacaagaaagtggaaggcctgagcaagcacatcaagctggaagaggaacggagaagcgaggacgcccagagcaaggccgccctgaccgactggctgcgggctaaggccagcttcgtgatcgagggcctgaaggaggccgacaaggacgagttctgcagatgcgagctgaagctgcagaagtggtacggggacctgcggggaaagcccttcgccatcgaagccgagaacagcatcctggacatcagcggcttcagcaagcagtacaactgtgccttcatctggcagaaggacggcgtgaagaagctgaacctgtacctgatcatcaactacttcaagggcggcaagctgcggttcaagaagatcaaacctgaagccttcgaagccaacagattctacaccgtgatcaacaaaaagagcggcgagatcgtgcccatggaggtgaacttcaacttcgacgaccccaacctgatcatcctgcctctggcctttggcaagagacagggcagagaattcatctggaacgacctgctgtccctggaaaccggcagcctgaagctggccaacggaagagtgatcgagaagacactgtacaacagaagaacccggcaggatgagcctgccctgttcgtggccctgaccttcgagcggcgggaggtcctggactcctccaatatcaaaccaatgaacctgatcggcgtggcaagaggcgaaaacatccccgccgtgatcgccctgaccgaccccgagggctgcccactgagccggtttaaggatagcctgggaaacccaacccacatcctgagaatcggcgagagctataaggagaagcagcggaccatccaggccaagaaggaggtggagcagcggagagccggcggctacagccggaagtacgccagcaaagccaagaatctggcagacgatatggtgagaaacaccgctagagatctgctgtactacgccgtgacccaggatgccatgctgatcttcgccaacctgagccggggcttcggccggcagggcaagcggaccttcatggccgagagacagtacacacggatggaggactggctgaccgccaagctggcctacgagggcctgagcaagacctacctgtccaagacactggcccagtacacctccaagacatgcagcaactgtgggtttaccatcaccagcgccgactacgacagggtgctggagaagctgaagaagacagcaacaggctggatgaccacaattaacggcaaggagctgaaggtggagggccagattacctactacaacagatacaagagacagaacgtagtcaaggacctgtccgtcgagctggatagactgagcgaagaatctgtgaacaacgacatctcctcctggacaaagggcagaagcggagaagctctgagcctcctgaagaaaagattctcccatagacccgtgcaggagaagttcgtgtgcctgaactgcggcttcgagacacacgcagccgagcaagccgccctgaacatcgccagatcctggctgttcctgcggagccaggagtacaagaaataccagacaaacaagacaaccggcaacaccgataagagagccttcgtcgagacctggcagtccttttaccggaagaagcttaaggaggtgtggaaacctgccgtgcggtctggcggatctggcggaggctccatccacgagagcgtgaccttcgaggacgtggccgtgaacttcaccgacagggagtggcagtgcctgacccacgcccagaggcacctgtacaaggacgtgatgctggagaactacggcaacatggtgagcctgggcttccccttccccaagccccccctgatcagccacctggagagggagaccgagccctgggtgcaggacctgcaggacagggagagcctgagcagcttctaccccgtgagcggcggcccaagcagcggcgcccctcctcccagcggcggcagcccagccggctccccaacctctaccgaggagggcacctctgagtccgccacccccgagagcggccctggcacctccaccgagcccagcgagggcagcgcacccggcagccctgccggcagccccacctccacagaggagggaaccagcaccgagcccagcgaaggcagcgccccaggcaccagcaccgagcctagtgagcaggagattaaacggatcaacaagatcagaagaagacttgtgaaagacagcaacaccaagaaggccggcaagacaggccccatgaaaaccctgctggttagagtgatgacacccgatctgagagagcggctggaaaacctgagaaagaagcctgaaaatatcccccagcccatcagcaatacatctagagccaacctgaataagctgctgaccgattacaccgaaatgaagaaggcgatcctgcatgtgtactgggaagagttccagaaggaccctgtgggcctgatgagccgggtggcccagcctgccagcaagaagatcgatcagaacaagctgaaacctgagatggacgagaagggcaacctgaccaccgccggctttgcctgctctcagtgtggccagcccctgttcgtgtacaagctggagcaggtgtctgagaagggcaaggcttacaccaactacttcggacggtgcaatgtggccgagcacgaaaagctgatcctgctggcccagctgaagcccgagaaggatagcgacgaagccgtgacatatagcctgggaaagtttgggcagagggccctggatttctacagcattcatgtgaccaaggagtccacccaccccgtgaagcccctggcccagatcgccggaaacagatacgcctccggacctgtgggaaaggccctgagcgacgcatgtatgggcacaatcgcctccttcctgtctaagtaccaggacatcatcatcgaacaccagaaggtggtgaagggcaaccagaagagactggagagcctgcgggagctggccggcaaggaaaacctggaataccctagcgtgaccctgccacctcagcctcacaccaaggagggcgttgatgcctacaacgaagtgatcgcccgggtgcgaatgtgggtgaacctgaacctgtggcagaagctgaagctaagcagagatgatgccaagcctctgctgagactgaagggattcccttcctttcctctggtcgagagacaggccaacgaagtggactggtgggacatggtgtgtaacgtgaagaagctgatcaacgagaaaaaggaggatggcaaggtgttttggcagaatctggctggctacaagagacaggaagccctgagaccatacctgagcagcgaggaagatcggaagaagggaaagaaattcgctcggtaccagctgggcgacctgctgctgcacctggaaaagaagcacggcgaggactggggaaaggtgtacgacgaggcctgggagcggattgacaagaaagtggaaggcctgagcaagcacatcaagctggaagaggaacggagaagcgaggacgcccagagcaaggccgccctgaccgactggctgcgggctaaggccagcttcgtgatcgagggcctgaaggaggccgacaaggacgagttctgcagatgcgagctgaagctgcagaagtggtacggggacctgcggggaaagcccttcgccatcgaagccgagaacagcatcctggacatcagcggcttcagcaagcagtacaactgtgccttcatctggcagaaggacggcgtgaagaagctgaacctgtacctgatcatcaactacttcaagggcggcaagctgcggttcaagaagatcaaacctgaagccttcgaagccaacagattctacaccgtgatcaacaaaaagagcggcgagatcgtgcccatggaggtgaacttcaacttcgacgaccccaacctgatcatcctgcctctggcctttggcaagagacagggcagagaattcatctggaacgacctgctgtccctggaaaccggcagcctgaagctggccaacggaagagtgatcgagaagacactgtacaacagaagaacccggcaggatgagcctgccctgttcgtggccctgaccttcgagcggcgggaggtcctggactcctccaatatcaaaccaatgaacctgatcggcgtggcaagaggcgaaaacatccccgccgtgatcgccctgaccgaccccgagggctgcccactgagccggtttaaggatagcctgggaaacccaacccacatcctgagaatcggcgagagctataaggagaagcagcggaccatccaggccaagaaggaggtggagcagcggagagccggcggctacagccggaagtacgccagcaaagccaagaatctggcagacgatatggtgagaaacaccgctagagatctgctgtactacgccgtgacccaggatgccatgctgatcttcgccaacctgagccggggcttcggccggcagggcaagcggaccttcatggccgagagacagtacacacggatggaggactggctgaccgccaagctggcctacgagggcctgagcaagacctacctgtccaagacactggcccagtacacctccaagacatgcagcaactgtgggtttaccatcaccagcgccgactacgacagggtgctggagaagctgaagaagacagcaacaggctggatgaccacaattaacggcaaggagctgaaggtggagggccagattacctactacaacagatacaagagacagaacgtagtcaaggacctgtccgtcgagctggatagactgagcgaagaatctgtgaacaacgacatctcctcctggacaaagggcagaagcggagaagctctgagcctcctgaagaaaagattctcccatagacccgtgcaggagaagttcgtgtgcctgaactgcggcttcgagacacacgcagccgagcaagccgccctgaacatcgccagatcctggctgttcctgcggagccaggagtacaagaaataccagacaaacaagacaaccggcaacaccgataagagagccttcgtcgagacctggcagtccttttaccggaagaagcttaaggaggtgtggaaacctgccgtgcggtctggcggatctggcggaggctcctatccacgagagcgtgaccttcgaggacgtggccgtgaacttcaccgacagggagtggcagtgcctgacccacgcccagaggcacctgtacaaggacgtgatgctggagaactacggcaacatggtgagcctgggcttccccttccccaagccccccctgatcagccacctggagagggagaccgagccctgggtgcaggacctgcaggacagggagagcctgagcagcttctaccccgtgagcggatctggctccggcagcggccccaagaaaaagagaaaagtctaagctgccttctgcggggcttgccttctggccatgcccttcttctctcccttgcacctgtacctcttggtctttgaataaagcctgagtaggaaggctagcaaaaaaaaaaaaaaaaaaaaaaaaaaaaaaaaaaaaaaaaaaaaaaaaaaaaaaaaaaaaaaaaaaaaaaaaaaaaaaaa

SEQ ID NO: 15557 - RNA, 9485 nt, synthetic construct
  source 1..9485: mol_type = other RNA
aggaaataagagagaaaagaagagtaagaagaaatataagagccaccatggcccctaagaagaagcgtaaagtgagccggatggaacgcctcgtctacgaggtgcggcagaagtgcagaaacatcgaggacatctgcatctcctgcggatctctgaacgtgaccctggagcacccactgttcatcggcggcatgtgccagaactgtaaaaactgttttctggagtgtgcctatcaatacgacgatgacggctaccagagctactgcaccatctgttgcggcggaagagaggtgctgatgtgtggaaataacaactgctgccggtgcttctgcgtggaatgcgtggacctgctggtgggccccggcgccgcccaggccgctattaaggaagatccttggaactgctacatgtgcggccacaagggcacatacggcctgctgagacggagagaggactggcctagcagactgcagatgttcttcgccaataaccacgaccaggagttcgacccccctaaggtgtaccctcccgtccccgccgagaagagaaagcccatccgggtcctgagcctgttcgatggcatcgccaccggtctgctggtgctgaaggacctgggcatccaggtggataggtacattgcctccgaggtgtgcgaggactccatcaccgtgggaatggtgcgtcatcagggcaagatcatgtacgtgggcgacgtgcggagcgtgacacagaagcatatccaggagtggggccctttcgacctggtgatcggcggcagcccttgcaatgacctgagcatcgtgaacccagcccggaagggcctgtacgagggaaccggcagactgttcttcgagttttacagactgctgcacgacgcccggcctaaggaaggcgacgaccggcccttcttttggctgttcgagaatgtggtggccatgggagtcagcgacaagcgggatattagccggttcctggagagcaaccccgtgatgatcgatgccaaggaagtgagcgccgcccaccgggccagatacttctggggcaatctgcctggcatgaacagacccctggccagcaccgtgaacgacaagctggagctgcaggagtgcctggagcacggccggatcgccaagttcagcaaggtgagaaccatcaccacccgaagcaacagcatcaaacaaggcaaggaccagcactttcctgtgttcatgaacgagaaggaggacatcctgtggtgtaccgagatggagagagtgttcgggttcccagtccactacacagatgtcagcaacatgtctagactggccagacagagactgctgggaagaagctggtccgtccctgtgatcagacacctgttcgcccctctgaaggagtacttcgcctgcgtgagcagcggcaacagcaacgccaacagccggggccccagcttctctagcggcctggtgccactgtccctgagagggagccacatgggccccatggagatctacaaaaccgtgagcgcctggaagcggcagcctgtgcgcgtgctgagcctgtttcggaatatcgataaagtcctgaaaagcctgggattcctggagagcggctctggctccggcggtggcaccctgaagtacgtggaggatgtgacaaacgtggtcagacgggatgtggagaagtggggccccttcgatctggtgtacggcagcacccaacccctgggcagctcttgtgaccggtgccctggctggtacatgtttcagttccaccggatcctgcagtacgccctgccgagacaggagtcccagcggccattcttttggattttcatggacaacttgctgctgaccgaggatgaccaggaaactaccactcggttcctgcagaccgaagccgtgaccctgcaggacgtgagaggccgggactaccagaacgccatgcgggtgtggtccaacatccctggactgaaaagcaagcacgcacctctgacccctaaagaagaggagtacctgcaggcccaggtgcggagcagaagcaagctggacgcccctaaggtggatctgctggtgaagaattgcctcctgcccctgagagagtacttcaagtatttcagccagaatagtctgcccctgggaggcagcggcggcggcgccctggtgacatttgaggacgtcgccgtgcggttcacccaggaggaatgggctctgctggatccttctcagaaaatcctgtaccgggacgtgatgagagagacataccggaatctgacctccgtgggcatcaactgggaatgttgggaccttgaagcctgcttcagaagcctgggaagaaacctgagagtgcaggtggtgaagagaaagtgcgagctgaccaacagcggcccctgcgccgagggcggcccaagcagcggcgcccctcctcccagcggcggcagcccagccggctccccaacctctaccgaggagggcacctctgagtccgccacccccgagagcggccctggcacctccaccgagcccagcgagggcagcgcacccggcagccctgccggcagccccacctccacagaggagggaaccagcaccgagcccagcgaaggcagcgccccaggcaccagcaccgagcctagtgagcaggagattaaacggatcaacaagatcagaagaagacttgtgaaagacagcaacaccaagaaggccggcaagacaggccccatgaaaaccctgctggttagagtgatgacacccgatctgagagagcggctggaaaacctgagaaagaagcctgaaaatatcccccagcccatcagcaatacatctagagccaacctgaataagctgctgaccgattacaccgaaatgaagaaggcgatcctgcatgtgtactgggaagagttccagaaggaccctgtgggcctgatgagccgggtggcccagcctgccagcaagaagatcgatcagaacaagctgaaacctgagatggacgagaagggcaacctgaccaccgccggctttgcctgctctcagtgtggccagcccctgttcgtgtacaagctggagcaggtgtctgagaagggcaaggcttacaccaactacttcggacggtgcaatgtggccgagcacgaaaagctgatcctgctggcccagctgaagcccgagaaggatagcgacgaagccgtgacatatagcctgggaaagtttgggcagagggccctggatttctacagcattcatgtgaccaaggagtccacccaccccgtgaagcccctggcccagatcgccggaaacagatacgcctccggacctgtgggaaaggccctgagcgacgcatgtatgggcacaatcgcctccttcctgtctaagtaccaggacatcatcatcgaacaccagaaggtggtgaagggcaaccagaagagactggagagcctgcgggagctggccggcaaggaaaacctggaataccctagcgtgaccctgccacctcagcctcacaccaaggagggcgttgatgcctacaacgaagtgatcgcccgggtgcgaatgtgggtgaacctgaacctgtggcagaagctgaagctaagcagagatgatgccaagcctctgctgagactgaagggattcccttcctttcctctggtcgagagacaggccaacgaagtggactggtgggacatggtgtgtaacgtgaagaagctgatcaacgagaaaaaggaggatggcaaggtgttttggcagaatctggctggctacaagagacaggaagccctgagaccatacctgagcagcgaggaagatcggaagaagggaaagaaattcgctcggtaccagctgggcgacctgctgctgcacctggaaaagaagcacggcgaggactggggaaaggtgtacgacgaggcctgggagcggattgacaagaaagtggaaggcctgagcaagcacatcaagctggaagaggaacggagaagcgaggacgcccagagcaaggccgccctgaccgactggctgcgggctaaggccagcttcgtgatcgagggcctgaaggaggccgacaaggacgagttctgcagatgcgagctgaagctgcagaagtggtacggggacctgcggggaaagcccttcgccatcgaagccgagaacagcatcctggacatcagcggcttcagcaagcagtacaactgtgccttcatctggcagaaggacggcgtgaagaagctgaacctgtacctgatcatcaactacttcaagggcggcaagctgcggttcaagaagatcaaacctgaagccttcgaagccaacagattctacaccgtgatcaacaaaaagagcggcgagatcgtgcccatggaggtgaacttcaacttcgacgaccccaacctgatcatcctgcctctggcctttggcaagagacagggcagagaattcatctggaacgacctgctgtccctggaaaccggcagcctgaagctggccaacggaagagtgatcgagaagacactgtacaacagaagaacccggcaggatgagcctgccctgttcgtggccctgaccttcgagcggcgggaggtcctggactcctccaatatcaaaccaatgaacctgatcggcgtggcaagaggcgaaaacatccccgccgtgatcgccctgaccgaccccgagggctgcccactgagccggtttaaggatagcctgggaaacccaacccacatcctgagaatcggcgagagctataaggagaagcagcggaccatccaggccaagaaggaggtggagcagcggagagccggcggctacagccggaagtacgccagcaaagccaagaatctggcagacgatatggtgagaaacaccgctagagatctgctgtactacgccgtgacccaggatgccatgctgatcttcgccaacctgagccggggcttcggccggcagggcaagcggaccttcatggccgagagacagtacacacggatggaggactggctgaccgccaagctggcctacgagggcctgagcaagacctacctgtccaagacactggcccagtacacctccaagacatgcagcaactgtgggtttaccatcaccagcgccgactacgacagggtgctggagaagctgaagaagacagcaacaggctggatgaccacaattaacggcaaggagctgaaggtggagggccagattacctactacaacagatacaagagacagaacgtagtcaaggacctgtccgtcgagctggatagactgagcgaagaatctgtgaacaacgacatctcctcctggacaaagggcagaagcggagaagctctgagcctcctgaagaaaagattctcccatagacccgtgcaggagaagttcgtgtgcctgaactgcggcttcgagacacacgcagccgagcaagccgccctgaacatcgccagatcctggctgttcctgcggagccaggagtacaagaaataccagacaaacaagacaaccggcaacaccgataagagagccttcgtcgagacctggcagtccttttaccggaagaagcttaaggaggtgtggaaacctgccgtgcggtctggcggatctggcggaggctccagccaggagcaggtgagcttcaaggacgtgtgcgtggacttcaccagggaggagtggtacctgctggaccccgcccagaagatcctgtacagggacgtgatcctggagaactacagccacctggtgagcgtgggcaactgcatcaccaagcccgaggtgatcttcaagatcgagcagggcgaggagccctggatcctggaggagaggttccccaagcagtgctgcagcgagaggaactggaagggcggcccaagcagcggcgcccctcctcccagcggcggcagcccagccggctccccaacctctaccgaggagggcacctctgagtccgccacccccgagagcggccctggcacctccaccgagcccagcgagggcagcgcacccggcagccctgccggcagccccacctccacagaggagggaaccagcaccgagcccagcgaaggcagcgccccaggcaccagcaccgagcctagtgagcaggagattaaacggatcaacaagatcagaagaagacttgtgaaagacagcaacaccaagaaggccggcaagacaggccccatgaaaaccctgctggttagagtgatgacacccgatctgagagagcggctggaaaacctgagaaagaagcctgaaaatatcccccagcccatcagcaatacatctagagccaacctgaataagctgctgaccgattacaccgaaatgaagaaggcgatcctgcatgtgtactgggaagagttccagaaggaccctgtgggcctgatgagccgggtggcccagcctgccagcaagaagatcgatcagaacaagctgaaacctgagatggacgagaagggcaacctgaccaccgccggctttgcctgctctcagtgtggccagcccctgttcgtgtacaagctggagcaggtgtctgagaagggcaaggcttacaccaactacttcggacggtgcaatgtggccgagcacgaaaagctgatcctgctggcccagctgaagcccgagaaggatagcgacgaagccgtgacatatagcctgggaaagtttgggcagagggccctggatttctacagcattcatgtgaccaaggagtccacccaccccgtgaagcccctggcccagatcgccggaaacagatacgcctccggacctgtgggaaaggccctgagcgacgcatgtatgggcacaatcgcctccttcctgtctaagtaccaggacatcatcatcgaacaccagaaggtggtgaagggcaaccagaagagactggagagcctgcgggagctggccggcaaggaaaacctggaataccctagcgtgaccctgccacctcagcctcacaccaaggagggcgttgatgcctacaacgaagtgatcgcccgggtgcgaatgtgggtgaacctgaacctgtggcagaagctgaagctaagcagagatgatgccaagcctctgctgagactgaagggattcccttcctttcctctggtcgagagacaggccaacgaagtggactggtgggacatggtgtgtaacgtgaagaagctgatcaacgagaaaaaggaggatggcaaggtgttttggcagaatctggctggctacaagagacaggaagccctgagaccatacctgagcagcgaggaagatcggaagaagggaaagaaattcgctcggtaccagctgggcgacctgctgctgcacctggaaaagaagcacggcgaggactggggaaaggtgtacgacgaggcctgggagcggattgacaagaaagtggaaggcctgagcaagcacatcaagctggaagaggaacggagaagcgaggacgcccagagcaaggccgccctgaccgactggctgcgggctaaggccagcttcgtgatcgagggcctgaaggaggccgacaaggacgagttctgcagatgcgagctgaagctgcagaagtggtacggggacctgcggggaaagcccttcgccatcgaagccgagaacagcatcctggacatcagcggcttcagcaagcagtacaactgtgccttcatctggcagaaggacggcgtgaagaagctgaacctgtacctgatcatcaactacttcaagggcggcaagctgcggttcaagaagatcaaacctgaagccttcgaagccaacagattctacaccgtgatcaacaaaaagagcggcgagatcgtgcccatggaggtgaacttcaacttcgacgaccccaacctgatcatcctgcctctggcctttggcaagagacagggcagagaattcatctggaacgacctgctgtccctggaaaccggcagcctgaagctggccaacggaagagtgatcgagaagacactgtacaacagaagaacccggcaggatgagcctgccctgttcgtggccctgaccttcgagcggcgggaggtcctggactcctccaatatcaaaccaatgaacctgatcggcgtggcaagaggcgaaaacatccccgccgtgatcgccctgaccgaccccgagggctgcccactgagccggtttaaggatagcctgggaaacccaacccacatcctgagaatcggcgagagctataaggagaagcagcggaccatccaggccaagaaggaggtggagcagcggagagccggcggctacagccggaagtacgccagcaaagccaagaatctggcagacgatatggtgagaaacaccgctagagatctgctgtactacgccgtgacccaggatgccatgctgatcttcgccaacctgagccggggcttcggccggcagggcaagcggaccttcatggccgagagacagtacacacggatggaggactggctgaccgccaagctggcctacgagggcctgagcaagacctacctgtccaagacactggcccagtacacctccaagacatgcagcaactgtgggtttaccatcaccagcgccgactacgacagggtgctggagaagctgaagaagacagcaacaggctggatgaccacaattaacggcaaggagctgaaggtggagggccagattacctactacaacagatacaagagacagaacgtagtcaaggacctgtccgtcgagctggatagactgagcgaagaatctgtgaacaacgacatctcctcctggacaaagggcagaagcggagaagctctgagcctcctgaagaaaagattctcccatagacccgtgcaggagaagttcgtgtgcctgaactgcggcttcgagacacacgcagccgagcaagccgccctgaacatcgccagatcctggctgttcctgcggagccaggagtacaagaaataccagacaaacaagacaaccggcaacaccgataagagagccttcgtcgagacctggcagtccttttaccggaagaagcttaaggaggtgtggaaacctgccgtgcggtctggcggatctggcggaggctcctagccaggagcaggtgagcttcaaggacgtgtgcgtggacttcaccagggaggagtggtacctgctggaccccgcccagaagatcctgtacagggacgtgatcctggagaactacagccacctggtgagcgtgggcaactgcatcaccaagcccgaggtgatcttcaagatcgagcagggcgaggagccctggatcctggaggagaggttccccaagcagtgctgcagcgagaggaactggaagggatctggctccggcagcggccccaagaaaaagagaaaagtctaagctgccttctgcggggcttgccttctggccatgcccttcttctctcccttgcacctgtacctcttggtctttgaataaagcctgagtaggaaggctagcaaaaaaaaaaaaaaaaaaaaaaaaaaaaaaaaaaaaaaaaaaaaaaaaaaaaaaaaaaaaaaaaaaaaaaaaaaaaaaaa

SEQ ID NO: 15558 - RNA, 9479 nt, synthetic construct
  source 1..9479: mol_type = other RNA
aggaaataagagagaaaagaagagtaagaagaaatataagagccaccatggcccctaagaagaagcgtaaagtgagccggatggaacgcctcgtctacgaggtgcggcagaagtgcagaaacatcgaggacatctgcatctcctgcggatctctgaacgtgaccctggagcacccactgttcatcggcggcatgtgccagaactgtaaaaactgttttctggagtgtgcctatcaatacgacgatgacggctaccagagctactgcaccatctgttgcggcggaagagaggtgctgatgtgtggaaataacaactgctgccggtgcttctgcgtggaatgcgtggacctgctggtgggccccggcgccgcccaggccgctattaaggaagatccttggaactgctacatgtgcggccacaagggcacatacggcctgctgagacggagagaggactggcctagcagactgcagatgttcttcgccaataaccacgaccaggagttcgacccccctaaggtgtaccctcccgtccccgccgagaagagaaagcccatccgggtcctgagcctgttcgatggcatcgccaccggtctgctggtgctgaaggacctgggcatccaggtggataggtacattgcctccgaggtgtgcgaggactccatcaccgtgggaatggtgcgtcatcagggcaagatcatgtacgtgggcgacgtgcggagcgtgacacagaagcatatccaggagtggggccctttcgacctggtgatcggcggcagcccttgcaatgacctgagcatcgtgaacccagcccggaagggcctgtacgagggaaccggcagactgttcttcgagttttacagactgctgcacgacgcccggcctaaggaaggcgacgaccggcccttcttttggctgttcgagaatgtggtggccatgggagtcagcgacaagcgggatattagccggttcctggagagcaaccccgtgatgatcgatgccaaggaagtgagcgccgcccaccgggccagatacttctggggcaatctgcctggcatgaacagacccctggccagcaccgtgaacgacaagctggagctgcaggagtgcctggagcacggccggatcgccaagttcagcaaggtgagaaccatcaccacccgaagcaacagcatcaaacaaggcaaggaccagcactttcctgtgttcatgaacgagaaggaggacatcctgtggtgtaccgagatggagagagtgttcgggttcccagtccactacacagatgtcagcaacatgtctagactggccagacagagactgctgggaagaagctggtccgtccctgtgatcagacacctgttcgcccctctgaaggagtacttcgcctgcgtgagcagcggcaacagcaacgccaacagccggggccccagcttctctagcggcctggtgccactgtccctgagagggagccacatgggccccatggagatctacaaaaccgtgagcgcctggaagcggcagcctgtgcgcgtgctgagcctgtttcggaatatcgataaagtcctgaaaagcctgggattcctggagagcggctctggctccggcggtggcaccctgaagtacgtggaggatgtgacaaacgtggtcagacgggatgtggagaagtggggccccttcgatctggtgtacggcagcacccaacccctgggcagctcttgtgaccggtgccctggctggtacatgtttcagttccaccggatcctgcagtacgccctgccgagacaggagtcccagcggccattcttttggattttcatggacaacttgctgctgaccgaggatgaccaggaaactaccactcggttcctgcagaccgaagccgtgaccctgcaggacgtgagaggccgggactaccagaacgccatgcgggtgtggtccaacatccctggactgaaaagcaagcacgcacctctgacccctaaagaagaggagtacctgcaggcccaggtgcggagcagaagcaagctggacgcccctaaggtggatctgctggtgaagaattgcctcctgcccctgagagagtacttcaagtatttcagccagaatagtctgcccctgggaggcagcggcggcggcgccctggtgacatttgaggacgtcgccgtgcggttcacccaggaggaatgggctctgctggatccttctcagaaaatcctgtaccgggacgtgatgagagagacataccggaatctgacctccgtgggcatcaactgggaatgttgggaccttgaagcctgcttcagaagcctgggaagaaacctgagagtgcaggtggtgaagagaaagtgcgagctgaccaacagcggcccctgcgccgagggcggcccaagcagcggcgcccctcctcccagcggcggcagcccagccggctccccaacctctaccgaggagggcacctctgagtccgccacccccgagagcggccctggcacctccaccgagcccagcgagggcagcgcacccggcagccctgccggcagccccacctccacagaggagggaaccagcaccgagcccagcgaaggcagcgccccaggcaccagcaccgagcctagtgagcaggagattaaacggatcaacaagatcagaagaagacttgtgaaagacagcaacaccaagaaggccggcaagacaggccccatgaaaaccctgctggttagagtgatgacacccgatctgagagagcggctggaaaacctgagaaagaagcctgaaaatatcccccagcccatcagcaatacatctagagccaacctgaataagctgctgaccgattacaccgaaatgaagaaggcgatcctgcatgtgtactgggaagagttccagaaggaccctgtgggcctgatgagccgggtggcccagcctgccagcaagaagatcgatcagaacaagctgaaacctgagatggacgagaagggcaacctgaccaccgccggctttgcctgctctcagtgtggccagcccctgttcgtgtacaagctggagcaggtgtctgagaagggcaaggcttacaccaactacttcggacggtgcaatgtggccgagcacgaaaagctgatcctgctggcccagctgaagcccgagaaggatagcgacgaagccgtgacatatagcctgggaaagtttgggcagagggccctggatttctacagcattcatgtgaccaaggagtccacccaccccgtgaagcccctggcccagatcgccggaaacagatacgcctccggacctgtgggaaaggccctgagcgacgcatgtatgggcacaatcgcctccttcctgtctaagtaccaggacatcatcatcgaacaccagaaggtggtgaagggcaaccagaagagactggagagcctgcgggagctggccggcaaggaaaacctggaataccctagcgtgaccctgccacctcagcctcacaccaaggagggcgttgatgcctacaacgaagtgatcgcccgggtgcgaatgtgggtgaacctgaacctgtggcagaagctgaagctaagcagagatgatgccaagcctctgctgagactgaagggattcccttcctttcctctggtcgagagacaggccaacgaagtggactggtgggacatggtgtgtaacgtgaagaagctgatcaacgagaaaaaggaggatggcaaggtgttttggcagaatctggctggctacaagagacaggaagccctgagaccatacctgagcagcgaggaagatcggaagaagggaaagaaattcgctcggtaccagctgggcgacctgctgctgcacctggaaaagaagcacggcgaggactggggaaaggtgtacgacgaggcctgggagcggattgacaagaaagtggaaggcctgagcaagcacatcaagctggaagaggaacggagaagcgaggacgcccagagcaaggccgccctgaccgactggctgcgggctaaggccagcttcgtgatcgagggcctgaaggaggccgacaaggacgagttctgcagatgcgagctgaagctgcagaagtggtacggggacctgcggggaaagcccttcgccatcgaagccgagaacagcatcctggacatcagcggcttcagcaagcagtacaactgtgccttcatctggcagaaggacggcgtgaagaagctgaacctgtacctgatcatcaactacttcaagggcggcaagctgcggttcaagaagatcaaacctgaagccttcgaagccaacagattctacaccgtgatcaacaaaaagagcggcgagatcgtgcccatggaggtgaacttcaacttcgacgaccccaacctgatcatcctgcctctggcctttggcaagagacagggcagagaattcatctggaacgacctgctgtccctggaaaccggcagcctgaagctggccaacggaagagtgatcgagaagacactgtacaacagaagaacccggcaggatgagcctgccctgttcgtggccctgaccttcgagcggcgggaggtcctggactcctccaatatcaaaccaatgaacctgatcggcgtggcaagaggcgaaaacatccccgccgtgatcgccctgaccgaccccgagggctgcccactgagccggtttaaggatagcctgggaaacccaacccacatcctgagaatcggcgagagctataaggagaagcagcggaccatccaggccaagaaggaggtggagcagcggagagccggcggctacagccggaagtacgccagcaaagccaagaatctggcagacgatatggtgagaaacaccgctagagatctgctgtactacgccgtgacccaggatgccatgctgatcttcgccaacctgagccggggcttcggccggcagggcaagcggaccttcatggccgagagacagtacacacggatggaggactggctgaccgccaagctggcctacgagggcctgagcaagacctacctgtccaagacactggcccagtacacctccaagacatgcagcaactgtgggtttaccatcaccagcgccgactacgacagggtgctggagaagctgaagaagacagcaacaggctggatgaccacaattaacggcaaggagctgaaggtggagggccagattacctactacaacagatacaagagacagaacgtagtcaaggacctgtccgtcgagctggatagactgagcgaagaatctgtgaacaacgacatctcctcctggacaaagggcagaagcggagaagctctgagcctcctgaagaaaagattctcccatagacccgtgcaggagaagttcgtgtgcctgaactgcggcttcgagacacacgcagccgagcaagccgccctgaacatcgccagatcctggctgttcctgcggagccaggagtacaagaaataccagacaaacaagacaaccggcaacaccgataagagagccttcgtcgagacctggcagtccttttaccggaagaagcttaaggaggtgtggaaacctgccgtgcggtctggcggatctggcggaggctcccaggaccccagcgccgagggcctgagcgaggaggtgcccgtggtgttcgaggagctgcccgtggtgttcgaggacgtggccgtgtacttcaccagagaggagtggggcatgctggacaagagacagaaggagctgtacagagacgtgatgagaatgaactacgagctgctggccagcctgggccccgccgccgccaagcccgacctgatcagcaagctggagagaagagccgccccctggggcggcccaagcagcggcgcccctcctcccagcggcggcagcccagccggctccccaacctctaccgaggagggcacctctgagtccgccacccccgagagcggccctggcacctccaccgagcccagcgagggcagcgcacccggcagccctgccggcagccccacctccacagaggagggaaccagcaccgagcccagcgaaggcagcgccccaggcaccagcaccgagcctagtgagcaggagattaaacggatcaacaagatcagaagaagacttgtgaaagacagcaacaccaagaaggccggcaagacaggccccatgaaaaccctgctggttagagtgatgacacccgatctgagagagcggctggaaaacctgagaaagaagcctgaaaatatcccccagcccatcagcaatacatctagagccaacctgaataagctgctgaccgattacaccgaaatgaagaaggcgatcctgcatgtgtactgggaagagttccagaaggaccctgtgggcctgatgagccgggtggcccagcctgccagcaagaagatcgatcagaacaagctgaaacctgagatggacgagaagggcaacctgaccaccgccggctttgcctgctctcagtgtggccagcccctgttcgtgtacaagctggagcaggtgtctgagaagggcaaggcttacaccaactacttcggacggtgcaatgtggccgagcacgaaaagctgatcctgctggcccagctgaagcccgagaaggatagcgacgaagccgtgacatatagcctgggaaagtttgggcagagggccctggatttctacagcattcatgtgaccaaggagtccacccaccccgtgaagcccctggcccagatcgccggaaacagatacgcctccggacctgtgggaaaggccctgagcgacgcatgtatgggcacaatcgcctccttcctgtctaagtaccaggacatcatcatcgaacaccagaaggtggtgaagggcaaccagaagagactggagagcctgcgggagctggccggcaaggaaaacctggaataccctagcgtgaccctgccacctcagcctcacaccaaggagggcgttgatgcctacaacgaagtgatcgcccgggtgcgaatgtgggtgaacctgaacctgtggcagaagctgaagctaagcagagatgatgccaagcctctgctgagactgaagggattcccttcctttcctctggtcgagagacaggccaacgaagtggactggtgggacatggtgtgtaacgtgaagaagctgatcaacgagaaaaaggaggatggcaaggtgttttggcagaatctggctggctacaagagacaggaagccctgagaccatacctgagcagcgaggaagatcggaagaagggaaagaaattcgctcggtaccagctgggcgacctgctgctgcacctggaaaagaagcacggcgaggactggggaaaggtgtacgacgaggcctgggagcggattgacaagaaagtggaaggcctgagcaagcacatcaagctggaagaggaacggagaagcgaggacgcccagagcaaggccgccctgaccgactggctgcgggctaaggccagcttcgtgatcgagggcctgaaggaggccgacaaggacgagttctgcagatgcgagctgaagctgcagaagtggtacggggacctgcggggaaagcccttcgccatcgaagccgagaacagcatcctggacatcagcggcttcagcaagcagtacaactgtgccttcatctggcagaaggacggcgtgaagaagctgaacctgtacctgatcatcaactacttcaagggcggcaagctgcggttcaagaagatcaaacctgaagccttcgaagccaacagattctacaccgtgatcaacaaaaagagcggcgagatcgtgcccatggaggtgaacttcaacttcgacgaccccaacctgatcatcctgcctctggcctttggcaagagacagggcagagaattcatctggaacgacctgctgtccctggaaaccggcagcctgaagctggccaacggaagagtgatcgagaagacactgtacaacagaagaacccggcaggatgagcctgccctgttcgtggccctgaccttcgagcggcgggaggtcctggactcctccaatatcaaaccaatgaacctgatcggcgtggcaagaggcgaaaacatccccgccgtgatcgccctgaccgaccccgagggctgcccactgagccggtttaaggatagcctgggaaacccaacccacatcctgagaatcggcgagagctataaggagaagcagcggaccatccaggccaagaaggaggtggagcagcggagagccggcggctacagccggaagtacgccagcaaagccaagaatctggcagacgatatggtgagaaacaccgctagagatctgctgtactacgccgtgacccaggatgccatgctgatcttcgccaacctgagccggggcttcggccggcagggcaagcggaccttcatggccgagagacagtacacacggatggaggactggctgaccgccaagctggcctacgagggcctgagcaagacctacctgtccaagacactggcccagtacacctccaagacatgcagcaactgtgggtttaccatcaccagcgccgactacgacagggtgctggagaagctgaagaagacagcaacaggctggatgaccacaattaacggcaaggagctgaaggtggagggccagattacctactacaacagatacaagagacagaacgtagtcaaggacctgtccgtcgagctggatagactgagcgaagaatctgtgaacaacgacatctcctcctggacaaagggcagaagcggagaagctctgagcctcctgaagaaaagattctcccatagacccgtgcaggagaagttcgtgtgcctgaactgcggcttcgagacacacgcagccgagcaagccgccctgaacatcgccagatcctggctgttcctgcggagccaggagtacaagaaataccagacaaacaagacaaccggcaacaccgataagagagccttcgtcgagacctggcagtccttttaccggaagaagcttaaggaggtgtggaaacctgccgtgcggtctggcggatctggcggaggctcctcaggaccccagcgccgagggcctgagcgaggaggtgcccgtggtgttcgaggagctgcccgtggtgttcgaggacgtggccgtgtacttcaccagagaggagtggggcatgctggacaagagacagaaggagctgtacagagacgtgatgagaatgaactacgagctgctggccagcctgggccccgccgccgccaagcccgacctgatcagcaagctggagagaagagccgccccctggggatctggctccggcagcggccccaagaaaaagagaaaagtctaagctgccttctgcggggcttgccttctggccatgcccttcttctctcccttgcacctgtacctcttggtctttgaataaagcctgagtaggaaggctagcaaaaaaaaaaaaaaaaaaaaaaaaaaaaaaaaaaaaaaaaaaaaaaaaaaaaaaaaaaaaaaaaaaaaaaaaaaaaaaaa

SEQ ID NO: 15559 - RNA, 9485 nt, synthetic construct
  source 1..9485: mol_type = other RNA
aggaaataagagagaaaagaagagtaagaagaaatataagagccaccatggcccctaagaagaagcgtaaagtgagccggatggaacgcctcgtctacgaggtgcggcagaagtgcagaaacatcgaggacatctgcatctcctgcggatctctgaacgtgaccctggagcacccactgttcatcggcggcatgtgccagaactgtaaaaactgttttctggagtgtgcctatcaatacgacgatgacggctaccagagctactgcaccatctgttgcggcggaagagaggtgctgatgtgtggaaataacaactgctgccggtgcttctgcgtggaatgcgtggacctgctggtgggccccggcgccgcccaggccgctattaaggaagatccttggaactgctacatgtgcggccacaagggcacatacggcctgctgagacggagagaggactggcctagcagactgcagatgttcttcgccaataaccacgaccaggagttcgacccccctaaggtgtaccctcccgtccccgccgagaagagaaagcccatccgggtcctgagcctgttcgatggcatcgccaccggtctgctggtgctgaaggacctgggcatccaggtggataggtacattgcctccgaggtgtgcgaggactccatcaccgtgggaatggtgcgtcatcagggcaagatcatgtacgtgggcgacgtgcggagcgtgacacagaagcatatccaggagtggggccctttcgacctggtgatcggcggcagcccttgcaatgacctgagcatcgtgaacccagcccggaagggcctgtacgagggaaccggcagactgttcttcgagttttacagactgctgcacgacgcccggcctaaggaaggcgacgaccggcccttcttttggctgttcgagaatgtggtggccatgggagtcagcgacaagcgggatattagccggttcctggagagcaaccccgtgatgatcgatgccaaggaagtgagcgccgcccaccgggccagatacttctggggcaatctgcctggcatgaacagacccctggccagcaccgtgaacgacaagctggagctgcaggagtgcctggagcacggccggatcgccaagttcagcaaggtgagaaccatcaccacccgaagcaacagcatcaaacaaggcaaggaccagcactttcctgtgttcatgaacgagaaggaggacatcctgtggtgtaccgagatggagagagtgttcgggttcccagtccactacacagatgtcagcaacatgtctagactggccagacagagactgctgggaagaagctggtccgtccctgtgatcagacacctgttcgcccctctgaaggagtacttcgcctgcgtgagcagcggcaacagcaacgccaacagccggggccccagcttctctagcggcctggtgccactgtccctgagagggagccacatgggccccatggagatctacaaaaccgtgagcgcctggaagcggcagcctgtgcgcgtgctgagcctgtttcggaatatcgataaagtcctgaaaagcctgggattcctggagagcggctctggctccggcggtggcaccctgaagtacgtggaggatgtgacaaacgtggtcagacgggatgtggagaagtggggccccttcgatctggtgtacggcagcacccaacccctgggcagctcttgtgaccggtgccctggctggtacatgtttcagttccaccggatcctgcagtacgccctgccgagacaggagtcccagcggccattcttttggattttcatggacaacttgctgctgaccgaggatgaccaggaaactaccactcggttcctgcagaccgaagccgtgaccctgcaggacgtgagaggccgggactaccagaacgccatgcgggtgtggtccaacatccctggactgaaaagcaagcacgcacctctgacccctaaagaagaggagtacctgcaggcccaggtgcggagcagaagcaagctggacgcccctaaggtggatctgctggtgaagaattgcctcctgcccctgagagagtacttcaagtatttcagccagaatagtctgcccctgggaggcagcggcggcggcgccctggtgacatttgaggacgtcgccgtgcggttcacccaggaggaatgggctctgctggatccttctcagaaaatcctgtaccgggacgtgatgagagagacataccggaatctgacctccgtgggcatcaactgggaatgttgggaccttgaagcctgcttcagaagcctgggaagaaacctgagagtgcaggtggtgaagagaaagtgcgagctgaccaacagcggcccctgcgccgagggcggcccaagcagcggcgcccctcctcccagcggcggcagcccagccggctccccaacctctaccgaggagggcacctctgagtccgccacccccgagagcggccctggcacctccaccgagcccagcgagggcagcgcacccggcagccctgccggcagccccacctccacagaggagggaaccagcaccgagcccagcgaaggcagcgccccaggcaccagcaccgagcctagtgagcaggagattaaacggatcaacaagatcagaagaagacttgtgaaagacagcaacaccaagaaggccggcaagacaggccccatgaaaaccctgctggttagagtgatgacacccgatctgagagagcggctggaaaacctgagaaagaagcctgaaaatatcccccagcccatcagcaatacatctagagccaacctgaataagctgctgaccgattacaccgaaatgaagaaggcgatcctgcatgtgtactgggaagagttccagaaggaccctgtgggcctgatgagccgggtggcccagcctgccagcaagaagatcgatcagaacaagctgaaacctgagatggacgagaagggcaacctgaccaccgccggctttgcctgctctcagtgtggccagcccctgttcgtgtacaagctggagcaggtgtctgagaagggcaaggcttacaccaactacttcggacggtgcaatgtggccgagcacgaaaagctgatcctgctggcccagctgaagcccgagaaggatagcgacgaagccgtgacatatagcctgggaaagtttgggcagagggccctggatttctacagcattcatgtgaccaaggagtccacccaccccgtgaagcccctggcccagatcgccggaaacagatacgcctccggacctgtgggaaaggccctgagcgacgcatgtatgggcacaatcgcctccttcctgtctaagtaccaggacatcatcatcgaacaccagaaggtggtgaagggcaaccagaagagactggagagcctgcgggagctggccggcaaggaaaacctggaataccctagcgtgaccctgccacctcagcctcacaccaaggagggcgttgatgcctacaacgaagtgatcgcccgggtgcgaatgtgggtgaacctgaacctgtggcagaagctgaagctaagcagagatgatgccaagcctctgctgagactgaagggattcccttcctttcctctggtcgagagacaggccaacgaagtggactggtgggacatggtgtgtaacgtgaagaagctgatcaacgagaaaaaggaggatggcaaggtgttttggcagaatctggctggctacaagagacaggaagccctgagaccatacctgagcagcgaggaagatcggaagaagggaaagaaattcgctcggtaccagctgggcgacctgctgctgcacctggaaaagaagcacggcgaggactggggaaaggtgtacgacgaggcctgggagcggattgacaagaaagtggaaggcctgagcaagcacatcaagctggaagaggaacggagaagcgaggacgcccagagcaaggccgccctgaccgactggctgcgggctaaggccagcttcgtgatcgagggcctgaaggaggccgacaaggacgagttctgcagatgcgagctgaagctgcagaagtggtacggggacctgcggggaaagcccttcgccatcgaagccgagaacagcatcctggacatcagcggcttcagcaagcagtacaactgtgccttcatctggcagaaggacggcgtgaagaagctgaacctgtacctgatcatcaactacttcaagggcggcaagctgcggttcaagaagatcaaacctgaagccttcgaagccaacagattctacaccgtgatcaacaaaaagagcggcgagatcgtgcccatggaggtgaacttcaacttcgacgaccccaacctgatcatcctgcctctggcctttggcaagagacagggcagagaattcatctggaacgacctgctgtccctggaaaccggcagcctgaagctggccaacggaagagtgatcgagaagacactgtacaacagaagaacccggcaggatgagcctgccctgttcgtggccctgaccttcgagcggcgggaggtcctggactcctccaatatcaaaccaatgaacctgatcggcgtggcaagaggcgaaaacatccccgccgtgatcgccctgaccgaccccgagggctgcccactgagccggtttaaggatagcctgggaaacccaacccacatcctgagaatcggcgagagctataaggagaagcagcggaccatccaggccaagaaggaggtggagcagcggagagccggcggctacagccggaagtacgccagcaaagccaagaatctggcagacgatatggtgagaaacaccgctagagatctgctgtactacgccgtgacccaggatgccatgctgatcttcgccaacctgagccggggcttcggccggcagggcaagcggaccttcatggccgagagacagtacacacggatggaggactggctgaccgccaagctggcctacgagggcctgagcaagacctacctgtccaagacactggcccagtacacctccaagacatgcagcaactgtgggtttaccatcaccagcgccgactacgacagggtgctggagaagctgaagaagacagcaacaggctggatgaccacaattaacggcaaggagctgaaggtggagggccagattacctactacaacagatacaagagacagaacgtagtcaaggacctgtccgtcgagctggatagactgagcgaagaatctgtgaacaacgacatctcctcctggacaaagggcagaagcggagaagctctgagcctcctgaagaaaagattctcccatagacccgtgcaggagaagttcgtgtgcctgaactgcggcttcgagacacacgcagccgagcaagccgccctgaacatcgccagatcctggctgttcctgcggagccaggagtacaagaaataccagacaaacaagacaaccggcaacaccgataagagagccttcgtcgagacctggcagtccttttaccggaagaagcttaaggaggtgtggaaacctgccgtgcggtctggcggatctggcggaggctccgtggtggagcccgtgagcttcgaggaggtggccgtgtacttcagcgaggaggagtgggccctgctggaccccggccagagggccctgtactgggccgtgatgcaggagaactacgaggccgtgagctggctgggcttcagcatccccaagcccgacctgatcacccagctggacaggggcgaggagccctgggtgcccgacctgcagcccagcaagaagctggagatcctgaggggcaccaggggcggcccaagcagcggcgcccctcctcccagcggcggcagcccagccggctccccaacctctaccgaggagggcacctctgagtccgccacccccgagagcggccctggcacctccaccgagcccagcgagggcagcgcacccggcagccctgccggcagccccacctccacagaggagggaaccagcaccgagcccagcgaaggcagcgccccaggcaccagcaccgagcctagtgagcaggagattaaacggatcaacaagatcagaagaagacttgtgaaagacagcaacaccaagaaggccggcaagacaggccccatgaaaaccctgctggttagagtgatgacacccgatctgagagagcggctggaaaacctgagaaagaagcctgaaaatatcccccagcccatcagcaatacatctagagccaacctgaataagctgctgaccgattacaccgaaatgaagaaggcgatcctgcatgtgtactgggaagagttccagaaggaccctgtgggcctgatgagccgggtggcccagcctgccagcaagaagatcgatcagaacaagctgaaacctgagatggacgagaagggcaacctgaccaccgccggctttgcctgctctcagtgtggccagcccctgttcgtgtacaagctggagcaggtgtctgagaagggcaaggcttacaccaactacttcggacggtgcaatgtggccgagcacgaaaagctgatcctgctggcccagctgaagcccgagaaggatagcgacgaagccgtgacatatagcctgggaaagtttgggcagagggccctggatttctacagcattcatgtgaccaaggagtccacccaccccgtgaagcccctggcccagatcgccggaaacagatacgcctccggacctgtgggaaaggccctgagcgacgcatgtatgggcacaatcgcctccttcctgtctaagtaccaggacatcatcatcgaacaccagaaggtggtgaagggcaaccagaagagactggagagcctgcgggagctggccggcaaggaaaacctggaataccctagcgtgaccctgccacctcagcctcacaccaaggagggcgttgatgcctacaacgaagtgatcgcccgggtgcgaatgtgggtgaacctgaacctgtggcagaagctgaagctaagcagagatgatgccaagcctctgctgagactgaagggattcccttcctttcctctggtcgagagacaggccaacgaagtggactggtgggacatggtgtgtaacgtgaagaagctgatcaacgagaaaaaggaggatggcaaggtgttttggcagaatctggctggctacaagagacaggaagccctgagaccatacctgagcagcgaggaagatcggaagaagggaaagaaattcgctcggtaccagctgggcgacctgctgctgcacctggaaaagaagcacggcgaggactggggaaaggtgtacgacgaggcctgggagcggattgacaagaaagtggaaggcctgagcaagcacatcaagctggaagaggaacggagaagcgaggacgcccagagcaaggccgccctgaccgactggctgcgggctaaggccagcttcgtgatcgagggcctgaaggaggccgacaaggacgagttctgcagatgcgagctgaagctgcagaagtggtacggggacctgcggggaaagcccttcgccatcgaagccgagaacagcatcctggacatcagcggcttcagcaagcagtacaactgtgccttcatctggcagaaggacggcgtgaagaagctgaacctgtacctgatcatcaactacttcaagggcggcaagctgcggttcaagaagatcaaacctgaagccttcgaagccaacagattctacaccgtgatcaacaaaaagagcggcgagatcgtgcccatggaggtgaacttcaacttcgacgaccccaacctgatcatcctgcctctggcctttggcaagagacagggcagagaattcatctggaacgacctgctgtccctggaaaccggcagcctgaagctggccaacggaagagtgatcgagaagacactgtacaacagaagaacccggcaggatgagcctgccctgttcgtggccctgaccttcgagcggcgggaggtcctggactcctccaatatcaaaccaatgaacctgatcggcgtggcaagaggcgaaaacatccccgccgtgatcgccctgaccgaccccgagggctgcccactgagccggtttaaggatagcctgggaaacccaacccacatcctgagaatcggcgagagctataaggagaagcagcggaccatccaggccaagaaggaggtggagcagcggagagccggcggctacagccggaagtacgccagcaaagccaagaatctggcagacgatatggtgagaaacaccgctagagatctgctgtactacgccgtgacccaggatgccatgctgatcttcgccaacctgagccggggcttcggccggcagggcaagcggaccttcatggccgagagacagtacacacggatggaggactggctgaccgccaagctggcctacgagggcctgagcaagacctacctgtccaagacactggcccagtacacctccaagacatgcagcaactgtgggtttaccatcaccagcgccgactacgacagggtgctggagaagctgaagaagacagcaacaggctggatgaccacaattaacggcaaggagctgaaggtggagggccagattacctactacaacagatacaagagacagaacgtagtcaaggacctgtccgtcgagctggatagactgagcgaagaatctgtgaacaacgacatctcctcctggacaaagggcagaagcggagaagctctgagcctcctgaagaaaagattctcccatagacccgtgcaggagaagttcgtgtgcctgaactgcggcttcgagacacacgcagccgagcaagccgccctgaacatcgccagatcctggctgttcctgcggagccaggagtacaagaaataccagacaaacaagacaaccggcaacaccgataagagagccttcgtcgagacctggcagtccttttaccggaagaagcttaaggaggtgtggaaacctgccgtgcggtctggcggatctggcggaggctcctgtggtggagcccgtgagcttcgaggaggtggccgtgtacttcagcgaggaggagtgggccctgctggaccccggccagagggccctgtactgggccgtgatgcaggagaactacgaggccgtgagctggctgggcttcagcatccccaagcccgacctgatcacccagctggacaggggcgaggagccctgggtgcccgacctgcagcccagcaagaagctggagatcctgaggggcaccaggggatctggctccggcagcggccccaagaaaaagagaaaagtctaagctgccttctgcggggcttgccttctggccatgcccttcttctctcccttgcacctgtacctcttggtctttgaataaagcctgagtaggaaggctagcaaaaaaaaaaaaaaaaaaaaaaaaaaaaaaaaaaaaaaaaaaaaaaaaaaaaaaaaaaaaaaaaaaaaaaaaaaaaaaaa

SEQ ID NO: 15560 - RNA, 9485 nt, synthetic construct
  source 1..9485: mol_type = other RNA
aggaaataagagagaaaagaagagtaagaagaaatataagagccaccatggcccctaagaagaagcgtaaagtgagccggatggaacgcctcgtctacgaggtgcggcagaagtgcagaaacatcgaggacatctgcatctcctgcggatctctgaacgtgaccctggagcacccactgttcatcggcggcatgtgccagaactgtaaaaactgttttctggagtgtgcctatcaatacgacgatgacggctaccagagctactgcaccatctgttgcggcggaagagaggtgctgatgtgtggaaataacaactgctgccggtgcttctgcgtggaatgcgtggacctgctggtgggccccggcgccgcccaggccgctattaaggaagatccttggaactgctacatgtgcggccacaagggcacatacggcctgctgagacggagagaggactggcctagcagactgcagatgttcttcgccaataaccacgaccaggagttcgacccccctaaggtgtaccctcccgtccccgccgagaagagaaagcccatccgggtcctgagcctgttcgatggcatcgccaccggtctgctggtgctgaaggacctgggcatccaggtggataggtacattgcctccgaggtgtgcgaggactccatcaccgtgggaatggtgcgtcatcagggcaagatcatgtacgtgggcgacgtgcggagcgtgacacagaagcatatccaggagtggggccctttcgacctggtgatcggcggcagcccttgcaatgacctgagcatcgtgaacccagcccggaagggcctgtacgagggaaccggcagactgttcttcgagttttacagactgctgcacgacgcccggcctaaggaaggcgacgaccggcccttcttttggctgttcgagaatgtggtggccatgggagtcagcgacaagcgggatattagccggttcctggagagcaaccccgtgatgatcgatgccaaggaagtgagcgccgcccaccgggccagatacttctggggcaatctgcctggcatgaacagacccctggccagcaccgtgaacgacaagctggagctgcaggagtgcctggagcacggccggatcgccaagttcagcaaggtgagaaccatcaccacccgaagcaacagcatcaaacaaggcaaggaccagcactttcctgtgttcatgaacgagaaggaggacatcctgtggtgtaccgagatggagagagtgttcgggttcccagtccactacacagatgtcagcaacatgtctagactggccagacagagactgctgggaagaagctggtccgtccctgtgatcagacacctgttcgcccctctgaaggagtacttcgcctgcgtgagcagcggcaacagcaacgccaacagccggggccccagcttctctagcggcctggtgccactgtccctgagagggagccacatgggccccatggagatctacaaaaccgtgagcgcctggaagcggcagcctgtgcgcgtgctgagcctgtttcggaatatcgataaagtcctgaaaagcctgggattcctggagagcggctctggctccggcggtggcaccctgaagtacgtggaggatgtgacaaacgtggtcagacgggatgtggagaagtggggccccttcgatctggtgtacggcagcacccaacccctgggcagctcttgtgaccggtgccctggctggtacatgtttcagttccaccggatcctgcagtacgccctgccgagacaggagtcccagcggccattcttttggattttcatggacaacttgctgctgaccgaggatgaccaggaaactaccactcggttcctgcagaccgaagccgtgaccctgcaggacgtgagaggccgggactaccagaacgccatgcgggtgtggtccaacatccctggactgaaaagcaagcacgcacctctgacccctaaagaagaggagtacctgcaggcccaggtgcggagcagaagcaagctggacgcccctaaggtggatctgctggtgaagaattgcctcctgcccctgagagagtacttcaagtatttcagccagaatagtctgcccctgggaggcagcggcggcggcgccctggtgacatttgaggacgtcgccgtgcggttcacccaggaggaatgggctctgctggatccttctcagaaaatcctgtaccgggacgtgatgagagagacataccggaatctgacctccgtgggcatcaactgggaatgttgggaccttgaagcctgcttcagaagcctgggaagaaacctgagagtgcaggtggtgaagagaaagtgcgagctgaccaacagcggcccctgcgccgagggcggcccaagcagcggcgcccctcctcccagcggcggcagcccagccggctccccaacctctaccgaggagggcacctctgagtccgccacccccgagagcggccctggcacctccaccgagcccagcgagggcagcgcacccggcagccctgccggcagccccacctccacagaggagggaaccagcaccgagcccagcgaaggcagcgccccaggcaccagcaccgagcctagtgagcaggagattaaacggatcaacaagatcagaagaagacttgtgaaagacagcaacaccaagaaggccggcaagacaggccccatgaaaaccctgctggttagagtgatgacacccgatctgagagagcggctggaaaacctgagaaagaagcctgaaaatatcccccagcccatcagcaatacatctagagccaacctgaataagctgctgaccgattacaccgaaatgaagaaggcgatcctgcatgtgtactgggaagagttccagaaggaccctgtgggcctgatgagccgggtggcccagcctgccagcaagaagatcgatcagaacaagctgaaacctgagatggacgagaagggcaacctgaccaccgccggctttgcctgctctcagtgtggccagcccctgttcgtgtacaagctggagcaggtgtctgagaagggcaaggcttacaccaactacttcggacggtgcaatgtggccgagcacgaaaagctgatcctgctggcccagctgaagcccgagaaggatagcgacgaagccgtgacatatagcctgggaaagtttgggcagagggccctggatttctacagcattcatgtgaccaaggagtccacccaccccgtgaagcccctggcccagatcgccggaaacagatacgcctccggacctgtgggaaaggccctgagcgacgcatgtatgggcacaatcgcctccttcctgtctaagtaccaggacatcatcatcgaacaccagaaggtggtgaagggcaaccagaagagactggagagcctgcgggagctggccggcaaggaaaacctggaataccctagcgtgaccctgccacctcagcctcacaccaaggagggcgttgatgcctacaacgaagtgatcgcccgggtgcgaatgtgggtgaacctgaacctgtggcagaagctgaagctaagcagagatgatgccaagcctctgctgagactgaagggattcccttcctttcctctggtcgagagacaggccaacgaagtggactggtgggacatggtgtgtaacgtgaagaagctgatcaacgagaaaaaggaggatggcaaggtgttttggcagaatctggctggctacaagagacaggaagccctgagaccatacctgagcagcgaggaagatcggaagaagggaaagaaattcgctcggtaccagctgggcgacctgctgctgcacctggaaaagaagcacggcgaggactggggaaaggtgtacgacgaggcctgggagcggattgacaagaaagtggaaggcctgagcaagcacatcaagctggaagaggaacggagaagcgaggacgcccagagcaaggccgccctgaccgactggctgcgggctaaggccagcttcgtgatcgagggcctgaaggaggccgacaaggacgagttctgcagatgcgagctgaagctgcagaagtggtacggggacctgcggggaaagcccttcgccatcgaagccgagaacagcatcctggacatcagcggcttcagcaagcagtacaactgtgccttcatctggcagaaggacggcgtgaagaagctgaacctgtacctgatcatcaactacttcaagggcggcaagctgcggttcaagaagatcaaacctgaagccttcgaagccaacagattctacaccgtgatcaacaaaaagagcggcgagatcgtgcccatggaggtgaacttcaacttcgacgaccccaacctgatcatcctgcctctggcctttggcaagagacagggcagagaattcatctggaacgacctgctgtccctggaaaccggcagcctgaagctggccaacggaagagtgatcgagaagacactgtacaacagaagaacccggcaggatgagcctgccctgttcgtggccctgaccttcgagcggcgggaggtcctggactcctccaatatcaaaccaatgaacctgatcggcgtggcaagaggcgaaaacatccccgccgtgatcgccctgaccgaccccgagggctgcccactgagccggtttaaggatagcctgggaaacccaacccacatcctgagaatcggcgagagctataaggagaagcagcggaccatccaggccaagaaggaggtggagcagcggagagccggcggctacagccggaagtacgccagcaaagccaagaatctggcagacgatatggtgagaaacaccgctagagatctgctgtactacgccgtgacccaggatgccatgctgatcttcgccaacctgagccggggcttcggccggcagggcaagcggaccttcatggccgagagacagtacacacggatggaggactggctgaccgccaagctggcctacgagggcctgagcaagacctacctgtccaagacactggcccagtacacctccaagacatgcagcaactgtgggtttaccatcaccagcgccgactacgacagggtgctggagaagctgaagaagacagcaacaggctggatgaccacaattaacggcaaggagctgaaggtggagggccagattacctactacaacagatacaagagacagaacgtagtcaaggacctgtccgtcgagctggatagactgagcgaagaatctgtgaacaacgacatctcctcctggacaaagggcagaagcggagaagctctgagcctcctgaagaaaagattctcccatagacccgtgcaggagaagttcgtgtgcctgaactgcggcttcgagacacacgcagccgagcaagccgccctgaacatcgccagatcctggctgttcctgcggagccaggagtacaagaaataccagacaaacaagacaaccggcaacaccgataagagagccttcgtcgagacctggcagtccttttaccggaagaagcttaaggaggtgtggaaacctgccgtgcggtctggcggatctggcggaggctccgcccaggtgcccgtgaccttcgaggaggtggccgtgtacttcacccagggccagggcgccctgctgggccccgcccagagggccctgtacagggacgtgatgagggagaactacgagatggtgaccagcctgggcttccccgtgcccaagcccgacctggtggccaggctggagaggggcgaggagccctgggtgagcgactgcctggccagcgaggagggcggcaccaggaggggcaggggcggcggcccaagcagcggcgcccctcctcccagcggcggcagcccagccggctccccaacctctaccgaggagggcacctctgagtccgccacccccgagagcggccctggcacctccaccgagcccagcgagggcagcgcacccggcagccctgccggcagccccacctccacagaggagggaaccagcaccgagcccagcgaaggcagcgccccaggcaccagcaccgagcctagtgagcaggagattaaacggatcaacaagatcagaagaagacttgtgaaagacagcaacaccaagaaggccggcaagacaggccccatgaaaaccctgctggttagagtgatgacacccgatctgagagagcggctggaaaacctgagaaagaagcctgaaaatatcccccagcccatcagcaatacatctagagccaacctgaataagctgctgaccgattacaccgaaatgaagaaggcgatcctgcatgtgtactgggaagagttccagaaggaccctgtgggcctgatgagccgggtggcccagcctgccagcaagaagatcgatcagaacaagctgaaacctgagatggacgagaagggcaacctgaccaccgccggctttgcctgctctcagtgtggccagcccctgttcgtgtacaagctggagcaggtgtctgagaagggcaaggcttacaccaactacttcggacggtgcaatgtggccgagcacgaaaagctgatcctgctggcccagctgaagcccgagaaggatagcgacgaagccgtgacatatagcctgggaaagtttgggcagagggccctggatttctacagcattcatgtgaccaaggagtccacccaccccgtgaagcccctggcccagatcgccggaaacagatacgcctccggacctgtgggaaaggccctgagcgacgcatgtatgggcacaatcgcctccttcctgtctaagtaccaggacatcatcatcgaacaccagaaggtggtgaagggcaaccagaagagactggagagcctgcgggagctggccggcaaggaaaacctggaataccctagcgtgaccctgccacctcagcctcacaccaaggagggcgttgatgcctacaacgaagtgatcgcccgggtgcgaatgtgggtgaacctgaacctgtggcagaagctgaagctaagcagagatgatgccaagcctctgctgagactgaagggattcccttcctttcctctggtcgagagacaggccaacgaagtggactggtgggacatggtgtgtaacgtgaagaagctgatcaacgagaaaaaggaggatggcaaggtgttttggcagaatctggctggctacaagagacaggaagccctgagaccatacctgagcagcgaggaagatcggaagaagggaaagaaattcgctcggtaccagctgggcgacctgctgctgcacctggaaaagaagcacggcgaggactggggaaaggtgtacgacgaggcctgggagcggattgacaagaaagtggaaggcctgagcaagcacatcaagctggaagaggaacggagaagcgaggacgcccagagcaaggccgccctgaccgactggctgcgggctaaggccagcttcgtgatcgagggcctgaaggaggccgacaaggacgagttctgcagatgcgagctgaagctgcagaagtggtacggggacctgcggggaaagcccttcgccatcgaagccgagaacagcatcctggacatcagcggcttcagcaagcagtacaactgtgccttcatctggcagaaggacggcgtgaagaagctgaacctgtacctgatcatcaactacttcaagggcggcaagctgcggttcaagaagatcaaacctgaagccttcgaagccaacagattctacaccgtgatcaacaaaaagagcggcgagatcgtgcccatggaggtgaacttcaacttcgacgaccccaacctgatcatcctgcctctggcctttggcaagagacagggcagagaattcatctggaacgacctgctgtccctggaaaccggcagcctgaagctggccaacggaagagtgatcgagaagacactgtacaacagaagaacccggcaggatgagcctgccctgttcgtggccctgaccttcgagcggcgggaggtcctggactcctccaatatcaaaccaatgaacctgatcggcgtggcaagaggcgaaaacatccccgccgtgatcgccctgaccgaccccgagggctgcccactgagccggtttaaggatagcctgggaaacccaacccacatcctgagaatcggcgagagctataaggagaagcagcggaccatccaggccaagaaggaggtggagcagcggagagccggcggctacagccggaagtacgccagcaaagccaagaatctggcagacgatatggtgagaaacaccgctagagatctgctgtactacgccgtgacccaggatgccatgctgatcttcgccaacctgagccggggcttcggccggcagggcaagcggaccttcatggccgagagacagtacacacggatggaggactggctgaccgccaagctggcctacgagggcctgagcaagacctacctgtccaagacactggcccagtacacctccaagacatgcagcaactgtgggtttaccatcaccagcgccgactacgacagggtgctggagaagctgaagaagacagcaacaggctggatgaccacaattaacggcaaggagctgaaggtggagggccagattacctactacaacagatacaagagacagaacgtagtcaaggacctgtccgtcgagctggatagactgagcgaagaatctgtgaacaacgacatctcctcctggacaaagggcagaagcggagaagctctgagcctcctgaagaaaagattctcccatagacccgtgcaggagaagttcgtgtgcctgaactgcggcttcgagacacacgcagccgagcaagccgccctgaacatcgccagatcctggctgttcctgcggagccaggagtacaagaaataccagacaaacaagacaaccggcaacaccgataagagagccttcgtcgagacctggcagtccttttaccggaagaagcttaaggaggtgtggaaacctgccgtgcggtctggcggatctggcggaggctcctgcccaggtgcccgtgaccttcgaggaggtggccgtgtacttcacccagggccagggcgccctgctgggccccgcccagagggccctgtacagggacgtgatgagggagaactacgagatggtgaccagcctgggcttccccgtgcccaagcccgacctggtggccaggctggagaggggcgaggagccctgggtgagcgactgcctggccagcgaggagggcggcaccaggaggggcaggggcggatctggctccggcagcggccccaagaaaaagagaaaagtctaagctgccttctgcggggcttgccttctggccatgcccttcttctctcccttgcacctgtacctcttggtctttgaataaagcctgagtaggaaggctagcaaaaaaaaaaaaaaaaaaaaaaaaaaaaaaaaaaaaaaaaaaaaaaaaaaaaaaaaaaaaaaaaaaaaaaaaaaaaaaaa

SEQ ID NO: 15561 - RNA, 9485 nt, synthetic construct
  source 1..9485: mol_type = other RNA
aggaaataagagagaaaagaagagtaagaagaaatataagagccaccatggcccctaagaagaagcgtaaagtgagccggatggaacgcctcgtctacgaggtgcggcagaagtgcagaaacatcgaggacatctgcatctcctgcggatctctgaacgtgaccctggagcacccactgttcatcggcggcatgtgccagaactgtaaaaactgttttctggagtgtgcctatcaatacgacgatgacggctaccagagctactgcaccatctgttgcggcggaagagaggtgctgatgtgtggaaataacaactgctgccggtgcttctgcgtggaatgcgtggacctgctggtgggccccggcgccgcccaggccgctattaaggaagatccttggaactgctacatgtgcggccacaagggcacatacggcctgctgagacggagagaggactggcctagcagactgcagatgttcttcgccaataaccacgaccaggagttcgacccccctaaggtgtaccctcccgtccccgccgagaagagaaagcccatccgggtcctgagcctgttcgatggcatcgccaccggtctgctggtgctgaaggacctgggcatccaggtggataggtacattgcctccgaggtgtgcgaggactccatcaccgtgggaatggtgcgtcatcagggcaagatcatgtacgtgggcgacgtgcggagcgtgacacagaagcatatccaggagtggggccctttcgacctggtgatcggcggcagcccttgcaatgacctgagcatcgtgaacccagcccggaagggcctgtacgagggaaccggcagactgttcttcgagttttacagactgctgcacgacgcccggcctaaggaaggcgacgaccggcccttcttttggctgttcgagaatgtggtggccatgggagtcagcgacaagcgggatattagccggttcctggagagcaaccccgtgatgatcgatgccaaggaagtgagcgccgcccaccgggccagatacttctggggcaatctgcctggcatgaacagacccctggccagcaccgtgaacgacaagctggagctgcaggagtgcctggagcacggccggatcgccaagttcagcaaggtgagaaccatcaccacccgaagcaacagcatcaaacaaggcaaggaccagcactttcctgtgttcatgaacgagaaggaggacatcctgtggtgtaccgagatggagagagtgttcgggttcccagtccactacacagatgtcagcaacatgtctagactggccagacagagactgctgggaagaagctggtccgtccctgtgatcagacacctgttcgcccctctgaaggagtacttcgcctgcgtgagcagcggcaacagcaacgccaacagccggggccccagcttctctagcggcctggtgccactgtccctgagagggagccacatgggccccatggagatctacaaaaccgtgagcgcctggaagcggcagcctgtgcgcgtgctgagcctgtttcggaatatcgataaagtcctgaaaagcctgggattcctggagagcggctctggctccggcggtggcaccctgaagtacgtggaggatgtgacaaacgtggtcagacgggatgtggagaagtggggccccttcgatctggtgtacggcagcacccaacccctgggcagctcttgtgaccggtgccctggctggtacatgtttcagttccaccggatcctgcagtacgccctgccgagacaggagtcccagcggccattcttttggattttcatggacaacttgctgctgaccgaggatgaccaggaaactaccactcggttcctgcagaccgaagccgtgaccctgcaggacgtgagaggccgggactaccagaacgccatgcgggtgtggtccaacatccctggactgaaaagcaagcacgcacctctgacccctaaagaagaggagtacctgcaggcccaggtgcggagcagaagcaagctggacgcccctaaggtggatctgctggtgaagaattgcctcctgcccctgagagagtacttcaagtatttcagccagaatagtctgcccctgggaggcagcggcggcggcgccctggtgacatttgaggacgtcgccgtgcggttcacccaggaggaatgggctctgctggatccttctcagaaaatcctgtaccgggacgtgatgagagagacataccggaatctgacctccgtgggcatcaactgggaatgttgggaccttgaagcctgcttcagaagcctgggaagaaacctgagagtgcaggtggtgaagagaaagtgcgagctgaccaacagcggcccctgcgccgagggcggcccaagcagcggcgcccctcctcccagcggcggcagcccagccggctccccaacctctaccgaggagggcacctctgagtccgccacccccgagagcggccctggcacctccaccgagcccagcgagggcagcgcacccggcagccctgccggcagccccacctccacagaggagggaaccagcaccgagcccagcgaaggcagcgccccaggcaccagcaccgagcctagtgagcaggagattaaacggatcaacaagatcagaagaagacttgtgaaagacagcaacaccaagaaggccggcaagacaggccccatgaaaaccctgctggttagagtgatgacacccgatctgagagagcggctggaaaacctgagaaagaagcctgaaaatatcccccagcccatcagcaatacatctagagccaacctgaataagctgctgaccgattacaccgaaatgaagaaggcgatcctgcatgtgtactgggaagagttccagaaggaccctgtgggcctgatgagccgggtggcccagcctgccagcaagaagatcgatcagaacaagctgaaacctgagatggacgagaagggcaacctgaccaccgccggctttgcctgctctcagtgtggccagcccctgttcgtgtacaagctggagcaggtgtctgagaagggcaaggcttacaccaactacttcggacggtgcaatgtggccgagcacgaaaagctgatcctgctggcccagctgaagcccgagaaggatagcgacgaagccgtgacatatagcctgggaaagtttgggcagagggccctggatttctacagcattcatgtgaccaaggagtccacccaccccgtgaagcccctggcccagatcgccggaaacagatacgcctccggacctgtgggaaaggccctgagcgacgcatgtatgggcacaatcgcctccttcctgtctaagtaccaggacatcatcatcgaacaccagaaggtggtgaagggcaaccagaagagactggagagcctgcgggagctggccggcaaggaaaacctggaataccctagcgtgaccctgccacctcagcctcacaccaaggagggcgttgatgcctacaacgaagtgatcgcccgggtgcgaatgtgggtgaacctgaacctgtggcagaagctgaagctaagcagagatgatgccaagcctctgctgagactgaagggattcccttcctttcctctggtcgagagacaggccaacgaagtggactggtgggacatggtgtgtaacgtgaagaagctgatcaacgagaaaaaggaggatggcaaggtgttttggcagaatctggctggctacaagagacaggaagccctgagaccatacctgagcagcgaggaagatcggaagaagggaaagaaattcgctcggtaccagctgggcgacctgctgctgcacctggaaaagaagcacggcgaggactggggaaaggtgtacgacgaggcctgggagcggattgacaagaaagtggaaggcctgagcaagcacatcaagctggaagaggaacggagaagcgaggacgcccagagcaaggccgccctgaccgactggctgcgggctaaggccagcttcgtgatcgagggcctgaaggaggccgacaaggacgagttctgcagatgcgagctgaagctgcagaagtggtacggggacctgcggggaaagcccttcgccatcgaagccgagaacagcatcctggacatcagcggcttcagcaagcagtacaactgtgccttcatctggcagaaggacggcgtgaagaagctgaacctgtacctgatcatcaactacttcaagggcggcaagctgcggttcaagaagatcaaacctgaagccttcgaagccaacagattctacaccgtgatcaacaaaaagagcggcgagatcgtgcccatggaggtgaacttcaacttcgacgaccccaacctgatcatcctgcctctggcctttggcaagagacagggcagagaattcatctggaacgacctgctgtccctggaaaccggcagcctgaagctggccaacggaagagtgatcgagaagacactgtacaacagaagaacccggcaggatgagcctgccctgttcgtggccctgaccttcgagcggcgggaggtcctggactcctccaatatcaaaccaatgaacctgatcggcgtggcaagaggcgaaaacatccccgccgtgatcgccctgaccgaccccgagggctgcccactgagccggtttaaggatagcctgggaaacccaacccacatcctgagaatcggcgagagctataaggagaagcagcggaccatccaggccaagaaggaggtggagcagcggagagccggcggctacagccggaagtacgccagcaaagccaagaatctggcagacgatatggtgagaaacaccgctagagatctgctgtactacgccgtgacccaggatgccatgctgatcttcgccaacctgagccggggcttcggccggcagggcaagcggaccttcatggccgagagacagtacacacggatggaggactggctgaccgccaagctggcctacgagggcctgagcaagacctacctgtccaagacactggcccagtacacctccaagacatgcagcaactgtgggtttaccatcaccagcgccgactacgacagggtgctggagaagctgaagaagacagcaacaggctggatgaccacaattaacggcaaggagctgaaggtggagggccagattacctactacaacagatacaagagacagaacgtagtcaaggacctgtccgtcgagctggatagactgagcgaagaatctgtgaacaacgacatctcctcctggacaaagggcagaagcggagaagctctgagcctcctgaagaaaagattctcccatagacccgtgcaggagaagttcgtgtgcctgaactgcggcttcgagacacacgcagccgagcaagccgccctgaacatcgccagatcctggctgttcctgcggagccaggagtacaagaaataccagacaaacaagacaaccggcaacaccgataagagagccttcgtcgagacctggcagtccttttaccggaagaagcttaaggaggtgtggaaacctgccgtgcggtctggcggatctggcggaggctccttccagatgcccgtgaccttcgaggaggtggccgtgtacttcacccagggccagggcgccctgctggaccccgcccagagggccctgtacagggacgtgatgcaggacaactacgagatggtgaccagcctgggcttccccatccccaagcccgagctgatcgccaggctggagaggggcgaggagccctgggtgcccgacctgcaggcctgcgaggagaggaggctgcccaggtgcaccaggggcggcccaagcagcggcgcccctcctcccagcggcggcagcccagccggctccccaacctctaccgaggagggcacctctgagtccgccacccccgagagcggccctggcacctccaccgagcccagcgagggcagcgcacccggcagccctgccggcagccccacctccacagaggagggaaccagcaccgagcccagcgaaggcagcgccccaggcaccagcaccgagcctagtgagcaggagattaaacggatcaacaagatcagaagaagacttgtgaaagacagcaacaccaagaaggccggcaagacaggccccatgaaaaccctgctggttagagtgatgacacccgatctgagagagcggctggaaaacctgagaaagaagcctgaaaatatcccccagcccatcagcaatacatctagagccaacctgaataagctgctgaccgattacaccgaaatgaagaaggcgatcctgcatgtgtactgggaagagttccagaaggaccctgtgggcctgatgagccgggtggcccagcctgccagcaagaagatcgatcagaacaagctgaaacctgagatggacgagaagggcaacctgaccaccgccggctttgcctgctctcagtgtggccagcccctgttcgtgtacaagctggagcaggtgtctgagaagggcaaggcttacaccaactacttcggacggtgcaatgtggccgagcacgaaaagctgatcctgctggcccagctgaagcccgagaaggatagcgacgaagccgtgacatatagcctgggaaagtttgggcagagggccctggatttctacagcattcatgtgaccaaggagtccacccaccccgtgaagcccctggcccagatcgccggaaacagatacgcctccggacctgtgggaaaggccctgagcgacgcatgtatgggcacaatcgcctccttcctgtctaagtaccaggacatcatcatcgaacaccagaaggtggtgaagggcaaccagaagagactggagagcctgcgggagctggccggcaaggaaaacctggaataccctagcgtgaccctgccacctcagcctcacaccaaggagggcgttgatgcctacaacgaagtgatcgcccgggtgcgaatgtgggtgaacctgaacctgtggcagaagctgaagctaagcagagatgatgccaagcctctgctgagactgaagggattcccttcctttcctctggtcgagagacaggccaacgaagtggactggtgggacatggtgtgtaacgtgaagaagctgatcaacgagaaaaaggaggatggcaaggtgttttggcagaatctggctggctacaagagacaggaagccctgagaccatacctgagcagcgaggaagatcggaagaagggaaagaaattcgctcggtaccagctgggcgacctgctgctgcacctggaaaagaagcacggcgaggactggggaaaggtgtacgacgaggcctgggagcggattgacaagaaagtggaaggcctgagcaagcacatcaagctggaagaggaacggagaagcgaggacgcccagagcaaggccgccctgaccgactggctgcgggctaaggccagcttcgtgatcgagggcctgaaggaggccgacaaggacgagttctgcagatgcgagctgaagctgcagaagtggtacggggacctgcggggaaagcccttcgccatcgaagccgagaacagcatcctggacatcagcggcttcagcaagcagtacaactgtgccttcatctggcagaaggacggcgtgaagaagctgaacctgtacctgatcatcaactacttcaagggcggcaagctgcggttcaagaagatcaaacctgaagccttcgaagccaacagattctacaccgtgatcaacaaaaagagcggcgagatcgtgcccatggaggtgaacttcaacttcgacgaccccaacctgatcatcctgcctctggcctttggcaagagacagggcagagaattcatctggaacgacctgctgtccctggaaaccggcagcctgaagctggccaacggaagagtgatcgagaagacactgtacaacagaagaacccggcaggatgagcctgccctgttcgtggccctgaccttcgagcggcgggaggtcctggactcctccaatatcaaaccaatgaacctgatcggcgtggcaagaggcgaaaacatccccgccgtgatcgccctgaccgaccccgagggctgcccactgagccggtttaaggatagcctgggaaacccaacccacatcctgagaatcggcgagagctataaggagaagcagcggaccatccaggccaagaaggaggtggagcagcggagagccggcggctacagccggaagtacgccagcaaagccaagaatctggcagacgatatggtgagaaacaccgctagagatctgctgtactacgccgtgacccaggatgccatgctgatcttcgccaacctgagccggggcttcggccggcagggcaagcggaccttcatggccgagagacagtacacacggatggaggactggctgaccgccaagctggcctacgagggcctgagcaagacctacctgtccaagacactggcccagtacacctccaagacatgcagcaactgtgggtttaccatcaccagcgccgactacgacagggtgctggagaagctgaagaagacagcaacaggctggatgaccacaattaacggcaaggagctgaaggtggagggccagattacctactacaacagatacaagagacagaacgtagtcaaggacctgtccgtcgagctggatagactgagcgaagaatctgtgaacaacgacatctcctcctggacaaagggcagaagcggagaagctctgagcctcctgaagaaaagattctcccatagacccgtgcaggagaagttcgtgtgcctgaactgcggcttcgagacacacgcagccgagcaagccgccctgaacatcgccagatcctggctgttcctgcggagccaggagtacaagaaataccagacaaacaagacaaccggcaacaccgataagagagccttcgtcgagacctggcagtccttttaccggaagaagcttaaggaggtgtggaaacctgccgtgcggtctggcggatctggcggaggctcctttccagatgcccgtgaccttcgaggaggtggccgtgtacttcacccagggccagggcgccctgctggaccccgcccagagggccctgtacagggacgtgatgcaggacaactacgagatggtgaccagcctgggcttccccatccccaagcccgagctgatcgccaggctggagaggggcgaggagccctgggtgcccgacctgcaggcctgcgaggagaggaggctgcccaggtgcaccaggggatctggctccggcagcggccccaagaaaaagagaaaagtctaagctgccttctgcggggcttgccttctggccatgcccttcttctctcccttgcacctgtacctcttggtctttgaataaagcctgagtaggaaggctagcaaaaaaaaaaaaaaaaaaaaaaaaaaaaaaaaaaaaaaaaaaaaaaaaaaaaaaaaaaaaaaaaaaaaaaaaaaaaaaaa

SEQ ID NO: 15562 - RNA, 9485 nt, synthetic construct
  source 1..9485: mol_type = other RNA
aggaaataagagagaaaagaagagtaagaagaaatataagagccaccatggcccctaagaagaagcgtaaagtgagccggatggaacgcctcgtctacgaggtgcggcagaagtgcagaaacatcgaggacatctgcatctcctgcggatctctgaacgtgaccctggagcacccactgttcatcggcggcatgtgccagaactgtaaaaactgttttctggagtgtgcctatcaatacgacgatgacggctaccagagctactgcaccatctgttgcggcggaagagaggtgctgatgtgtggaaataacaactgctgccggtgcttctgcgtggaatgcgtggacctgctggtgggccccggcgccgcccaggccgctattaaggaagatccttggaactgctacatgtgcggccacaagggcacatacggcctgctgagacggagagaggactggcctagcagactgcagatgttcttcgccaataaccacgaccaggagttcgacccccctaaggtgtaccctcccgtccccgccgagaagagaaagcccatccgggtcctgagcctgttcgatggcatcgccaccggtctgctggtgctgaaggacctgggcatccaggtggataggtacattgcctccgaggtgtgcgaggactccatcaccgtgggaatggtgcgtcatcagggcaagatcatgtacgtgggcgacgtgcggagcgtgacacagaagcatatccaggagtggggccctttcgacctggtgatcggcggcagcccttgcaatgacctgagcatcgtgaacccagcccggaagggcctgtacgagggaaccggcagactgttcttcgagttttacagactgctgcacgacgcccggcctaaggaaggcgacgaccggcccttcttttggctgttcgagaatgtggtggccatgggagtcagcgacaagcgggatattagccggttcctggagagcaaccccgtgatgatcgatgccaaggaagtgagcgccgcccaccgggccagatacttctggggcaatctgcctggcatgaacagacccctggccagcaccgtgaacgacaagctggagctgcaggagtgcctggagcacggccggatcgccaagttcagcaaggtgagaaccatcaccacccgaagcaacagcatcaaacaaggcaaggaccagcactttcctgtgttcatgaacgagaaggaggacatcctgtggtgtaccgagatggagagagtgttcgggttcccagtccactacacagatgtcagcaacatgtctagactggccagacagagactgctgggaagaagctggtccgtccctgtgatcagacacctgttcgcccctctgaaggagtacttcgcctgcgtgagcagcggcaacagcaacgccaacagccggggccccagcttctctagcggcctggtgccactgtccctgagagggagccacatgggccccatggagatctacaaaaccgtgagcgcctggaagcggcagcctgtgcgcgtgctgagcctgtttcggaatatcgataaagtcctgaaaagcctgggattcctggagagcggctctggctccggcggtggcaccctgaagtacgtggaggatgtgacaaacgtggtcagacgggatgtggagaagtggggccccttcgatctggtgtacggcagcacccaacccctgggcagctcttgtgaccggtgccctggctggtacatgtttcagttccaccggatcctgcagtacgccctgccgagacaggagtcccagcggccattcttttggattttcatggacaacttgctgctgaccgaggatgaccaggaaactaccactcggttcctgcagaccgaagccgtgaccctgcaggacgtgagaggccgggactaccagaacgccatgcgggtgtggtccaacatccctggactgaaaagcaagcacgcacctctgacccctaaagaagaggagtacctgcaggcccaggtgcggagcagaagcaagctggacgcccctaaggtggatctgctggtgaagaattgcctcctgcccctgagagagtacttcaagtatttcagccagaatagtctgcccctgggaggcagcggcggcggcgccctggtgacatttgaggacgtcgccgtgcggttcacccaggaggaatgggctctgctggatccttctcagaaaatcctgtaccgggacgtgatgagagagacataccggaatctgacctccgtgggcatcaactgggaatgttgggaccttgaagcctgcttcagaagcctgggaagaaacctgagagtgcaggtggtgaagagaaagtgcgagctgaccaacagcggcccctgcgccgagggcggcccaagcagcggcgcccctcctcccagcggcggcagcccagccggctccccaacctctaccgaggagggcacctctgagtccgccacccccgagagcggccctggcacctccaccgagcccagcgagggcagcgcacccggcagccctgccggcagccccacctccacagaggagggaaccagcaccgagcccagcgaaggcagcgccccaggcaccagcaccgagcctagtgagcaggagattaaacggatcaacaagatcagaagaagacttgtgaaagacagcaacaccaagaaggccggcaagacaggccccatgaaaaccctgctggttagagtgatgacacccgatctgagagagcggctggaaaacctgagaaagaagcctgaaaatatcccccagcccatcagcaatacatctagagccaacctgaataagctgctgaccgattacaccgaaatgaagaaggcgatcctgcatgtgtactgggaagagttccagaaggaccctgtgggcctgatgagccgggtggcccagcctgccagcaagaagatcgatcagaacaagctgaaacctgagatggacgagaagggcaacctgaccaccgccggctttgcctgctctcagtgtggccagcccctgttcgtgtacaagctggagcaggtgtctgagaagggcaaggcttacaccaactacttcggacggtgcaatgtggccgagcacgaaaagctgatcctgctggcccagctgaagcccgagaaggatagcgacgaagccgtgacatatagcctgggaaagtttgggcagagggccctggatttctacagcattcatgtgaccaaggagtccacccaccccgtgaagcccctggcccagatcgccggaaacagatacgcctccggacctgtgggaaaggccctgagcgacgcatgtatgggcacaatcgcctccttcctgtctaagtaccaggacatcatcatcgaacaccagaaggtggtgaagggcaaccagaagagactggagagcctgcgggagctggccggcaaggaaaacctggaataccctagcgtgaccctgccacctcagcctcacaccaaggagggcgttgatgcctacaacgaagtgatcgcccgggtgcgaatgtgggtgaacctgaacctgtggcagaagctgaagctaagcagagatgatgccaagcctctgctgagactgaagggattcccttcctttcctctggtcgagagacaggccaacgaagtggactggtgggacatggtgtgtaacgtgaagaagctgatcaacgagaaaaaggaggatggcaaggtgttttggcagaatctggctggctacaagagacaggaagccctgagaccatacctgagcagcgaggaagatcggaagaagggaaagaaattcgctcggtaccagctgggcgacctgctgctgcacctggaaaagaagcacggcgaggactggggaaaggtgtacgacgaggcctgggagcggattgacaagaaagtggaaggcctgagcaagcacatcaagctggaagaggaacggagaagcgaggacgcccagagcaaggccgccctgaccgactggctgcgggctaaggccagcttcgtgatcgagggcctgaaggaggccgacaaggacgagttctgcagatgcgagctgaagctgcagaagtggtacggggacctgcggggaaagcccttcgccatcgaagccgagaacagcatcctggacatcagcggcttcagcaagcagtacaactgtgccttcatctggcagaaggacggcgtgaagaagctgaacctgtacctgatcatcaactacttcaagggcggcaagctgcggttcaagaagatcaaacctgaagccttcgaagccaacagattctacaccgtgatcaacaaaaagagcggcgagatcgtgcccatggaggtgaacttcaacttcgacgaccccaacctgatcatcctgcctctggcctttggcaagagacagggcagagaattcatctggaacgacctgctgtccctggaaaccggcagcctgaagctggccaacggaagagtgatcgagaagacactgtacaacagaagaacccggcaggatgagcctgccctgttcgtggccctgaccttcgagcggcgggaggtcctggactcctccaatatcaaaccaatgaacctgatcggcgtggcaagaggcgaaaacatccccgccgtgatcgccctgaccgaccccgagggctgcccactgagccggtttaaggatagcctgggaaacccaacccacatcctgagaatcggcgagagctataaggagaagcagcggaccatccaggccaagaaggaggtggagcagcggagagccggcggctacagccggaagtacgccagcaaagccaagaatctggcagacgatatggtgagaaacaccgctagagatctgctgtactacgccgtgacccaggatgccatgctgatcttcgccaacctgagccggggcttcggccggcagggcaagcggaccttcatggccgagagacagtacacacggatggaggactggctgaccgccaagctggcctacgagggcctgagcaagacctacctgtccaagacactggcccagtacacctccaagacatgcagcaactgtgggtttaccatcaccagcgccgactacgacagggtgctggagaagctgaagaagacagcaacaggctggatgaccacaattaacggcaaggagctgaaggtggagggccagattacctactacaacagatacaagagacagaacgtagtcaaggacctgtccgtcgagctggatagactgagcgaagaatctgtgaacaacgacatctcctcctggacaaagggcagaagcggagaagctctgagcctcctgaagaaaagattctcccatagacccgtgcaggagaagttcgtgtgcctgaactgcggcttcgagacacacgcagccgagcaagccgccctgaacatcgccagatcctggctgttcctgcggagccaggagtacaagaaataccagacaaacaagacaaccggcaacaccgataagagagccttcgtcgagacctggcagtccttttaccggaagaagcttaaggaggtgtggaaacctgccgtgcggtctggcggatctggcggaggctcctgcggcatgttccaggtgagcgtggccttcgaggacgtggccgtgaccttcacccaggaggagtgggccctgctggaccccagccagaagaccctgtacagggacgtgatgcaggagaacttcaggaacctggccagcgtgggcaagaagtggaaggcccagaacatctacgtggagtacaagaacctgaggaggaacctgaggaacctgaggggcaagaggctgttcgagagcaaggaggacggcggcccaagcagcggcgcccctcctcccagcggcggcagcccagccggctccccaacctctaccgaggagggcacctctgagtccgccacccccgagagcggccctggcacctccaccgagcccagcgagggcagcgcacccggcagccctgccggcagccccacctccacagaggagggaaccagcaccgagcccagcgaaggcagcgccccaggcaccagcaccgagcctagtgagcaggagattaaacggatcaacaagatcagaagaagacttgtgaaagacagcaacaccaagaaggccggcaagacaggccccatgaaaaccctgctggttagagtgatgacacccgatctgagagagcggctggaaaacctgagaaagaagcctgaaaatatcccccagcccatcagcaatacatctagagccaacctgaataagctgctgaccgattacaccgaaatgaagaaggcgatcctgcatgtgtactgggaagagttccagaaggaccctgtgggcctgatgagccgggtggcccagcctgccagcaagaagatcgatcagaacaagctgaaacctgagatggacgagaagggcaacctgaccaccgccggctttgcctgctctcagtgtggccagcccctgttcgtgtacaagctggagcaggtgtctgagaagggcaaggcttacaccaactacttcggacggtgcaatgtggccgagcacgaaaagctgatcctgctggcccagctgaagcccgagaaggatagcgacgaagccgtgacatatagcctgggaaagtttgggcagagggccctggatttctacagcattcatgtgaccaaggagtccacccaccccgtgaagcccctggcccagatcgccggaaacagatacgcctccggacctgtgggaaaggccctgagcgacgcatgtatgggcacaatcgcctccttcctgtctaagtaccaggacatcatcatcgaacaccagaaggtggtgaagggcaaccagaagagactggagagcctgcgggagctggccggcaaggaaaacctggaataccctagcgtgaccctgccacctcagcctcacaccaaggagggcgttgatgcctacaacgaagtgatcgcccgggtgcgaatgtgggtgaacctgaacctgtggcagaagctgaagctaagcagagatgatgccaagcctctgctgagactgaagggattcccttcctttcctctggtcgagagacaggccaacgaagtggactggtgggacatggtgtgtaacgtgaagaagctgatcaacgagaaaaaggaggatggcaaggtgttttggcagaatctggctggctacaagagacaggaagccctgagaccatacctgagcagcgaggaagatcggaagaagggaaagaaattcgctcggtaccagctgggcgacctgctgctgcacctggaaaagaagcacggcgaggactggggaaaggtgtacgacgaggcctgggagcggattgacaagaaagtggaaggcctgagcaagcacatcaagctggaagaggaacggagaagcgaggacgcccagagcaaggccgccctgaccgactggctgcgggctaaggccagcttcgtgatcgagggcctgaaggaggccgacaaggacgagttctgcagatgcgagctgaagctgcagaagtggtacggggacctgcggggaaagcccttcgccatcgaagccgagaacagcatcctggacatcagcggcttcagcaagcagtacaactgtgccttcatctggcagaaggacggcgtgaagaagctgaacctgtacctgatcatcaactacttcaagggcggcaagctgcggttcaagaagatcaaacctgaagccttcgaagccaacagattctacaccgtgatcaacaaaaagagcggcgagatcgtgcccatggaggtgaacttcaacttcgacgaccccaacctgatcatcctgcctctggcctttggcaagagacagggcagagaattcatctggaacgacctgctgtccctggaaaccggcagcctgaagctggccaacggaagagtgatcgagaagacactgtacaacagaagaacccggcaggatgagcctgccctgttcgtggccctgaccttcgagcggcgggaggtcctggactcctccaatatcaaaccaatgaacctgatcggcgtggcaagaggcgaaaacatccccgccgtgatcgccctgaccgaccccgagggctgcccactgagccggtttaaggatagcctgggaaacccaacccacatcctgagaatcggcgagagctataaggagaagcagcggaccatccaggccaagaaggaggtggagcagcggagagccggcggctacagccggaagtacgccagcaaagccaagaatctggcagacgatatggtgagaaacaccgctagagatctgctgtactacgccgtgacccaggatgccatgctgatcttcgccaacctgagccggggcttcggccggcagggcaagcggaccttcatggccgagagacagtacacacggatggaggactggctgaccgccaagctggcctacgagggcctgagcaagacctacctgtccaagacactggcccagtacacctccaagacatgcagcaactgtgggtttaccatcaccagcgccgactacgacagggtgctggagaagctgaagaagacagcaacaggctggatgaccacaattaacggcaaggagctgaaggtggagggccagattacctactacaacagatacaagagacagaacgtagtcaaggacctgtccgtcgagctggatagactgagcgaagaatctgtgaacaacgacatctcctcctggacaaagggcagaagcggagaagctctgagcctcctgaagaaaagattctcccatagacccgtgcaggagaagttcgtgtgcctgaactgcggcttcgagacacacgcagccgagcaagccgccctgaacatcgccagatcctggctgttcctgcggagccaggagtacaagaaataccagacaaacaagacaaccggcaacaccgataagagagccttcgtcgagacctggcagtccttttaccggaagaagcttaaggaggtgtggaaacctgccgtgcggtctggcggatctggcggaggctccttgcggcatgttccaggtgagcgtggccttcgaggacgtggccgtgaccttcacccaggaggagtgggccctgctggaccccagccagaagaccctgtacagggacgtgatgcaggagaacttcaggaacctggccagcgtgggcaagaagtggaaggcccagaacatctacgtggagtacaagaacctgaggaggaacctgaggaacctgaggggcaagaggctgttcgagagcaaggaggacggatctggctccggcagcggccccaagaaaaagagaaaagtctaagctgccttctgcggggcttgccttctggccatgcccttcttctctcccttgcacctgtacctcttggtctttgaataaagcctgagtaggaaggctagcaaaaaaaaaaaaaaaaaaaaaaaaaaaaaaaaaaaaaaaaaaaaaaaaaaaaaaaaaaaaaaaaaaaaaaaaaaaaaaaa

SEQ ID NO: 15563 - RNA, 9485 nt, synthetic construct
  source 1..9485: mol_type = other RNA
aggaaataagagagaaaagaagagtaagaagaaatataagagccaccatggcccctaagaagaagcgtaaagtgagccggatggaacgcctcgtctacgaggtgcggcagaagtgcagaaacatcgaggacatctgcatctcctgcggatctctgaacgtgaccctggagcacccactgttcatcggcggcatgtgccagaactgtaaaaactgttttctggagtgtgcctatcaatacgacgatgacggctaccagagctactgcaccatctgttgcggcggaagagaggtgctgatgtgtggaaataacaactgctgccggtgcttctgcgtggaatgcgtggacctgctggtgggccccggcgccgcccaggccgctattaaggaagatccttggaactgctacatgtgcggccacaagggcacatacggcctgctgagacggagagaggactggcctagcagactgcagatgttcttcgccaataaccacgaccaggagttcgacccccctaaggtgtaccctcccgtccccgccgagaagagaaagcccatccgggtcctgagcctgttcgatggcatcgccaccggtctgctggtgctgaaggacctgggcatccaggtggataggtacattgcctccgaggtgtgcgaggactccatcaccgtgggaatggtgcgtcatcagggcaagatcatgtacgtgggcgacgtgcggagcgtgacacagaagcatatccaggagtggggccctttcgacctggtgatcggcggcagcccttgcaatgacctgagcatcgtgaacccagcccggaagggcctgtacgagggaaccggcagactgttcttcgagttttacagactgctgcacgacgcccggcctaaggaaggcgacgaccggcccttcttttggctgttcgagaatgtggtggccatgggagtcagcgacaagcgggatattagccggttcctggagagcaaccccgtgatgatcgatgccaaggaagtgagcgccgcccaccgggccagatacttctggggcaatctgcctggcatgaacagacccctggccagcaccgtgaacgacaagctggagctgcaggagtgcctggagcacggccggatcgccaagttcagcaaggtgagaaccatcaccacccgaagcaacagcatcaaacaaggcaaggaccagcactttcctgtgttcatgaacgagaaggaggacatcctgtggtgtaccgagatggagagagtgttcgggttcccagtccactacacagatgtcagcaacatgtctagactggccagacagagactgctgggaagaagctggtccgtccctgtgatcagacacctgttcgcccctctgaaggagtacttcgcctgcgtgagcagcggcaacagcaacgccaacagccggggccccagcttctctagcggcctggtgccactgtccctgagagggagccacatgggccccatggagatctacaaaaccgtgagcgcctggaagcggcagcctgtgcgcgtgctgagcctgtttcggaatatcgataaagtcctgaaaagcctgggattcctggagagcggctctggctccggcggtggcaccctgaagtacgtggaggatgtgacaaacgtggtcagacgggatgtggagaagtggggccccttcgatctggtgtacggcagcacccaacccctgggcagctcttgtgaccggtgccctggctggtacatgtttcagttccaccggatcctgcagtacgccctgccgagacaggagtcccagcggccattcttttggattttcatggacaacttgctgctgaccgaggatgaccaggaaactaccactcggttcctgcagaccgaagccgtgaccctgcaggacgtgagaggccgggactaccagaacgccatgcgggtgtggtccaacatccctggactgaaaagcaagcacgcacctctgacccctaaagaagaggagtacctgcaggcccaggtgcggagcagaagcaagctggacgcccctaaggtggatctgctggtgaagaattgcctcctgcccctgagagagtacttcaagtatttcagccagaatagtctgcccctgggaggcagcggcggcggcgccctggtgacatttgaggacgtcgccgtgcggttcacccaggaggaatgggctctgctggatccttctcagaaaatcctgtaccgggacgtgatgagagagacataccggaatctgacctccgtgggcatcaactgggaatgttgggaccttgaagcctgcttcagaagcctgggaagaaacctgagagtgcaggtggtgaagagaaagtgcgagctgaccaacagcggcccctgcgccgagggcggcccaagcagcggcgcccctcctcccagcggcggcagcccagccggctccccaacctctaccgaggagggcacctctgagtccgccacccccgagagcggccctggcacctccaccgagcccagcgagggcagcgcacccggcagccctgccggcagccccacctccacagaggagggaaccagcaccgagcccagcgaaggcagcgccccaggcaccagcaccgagcctagtgagcaggagattaaacggatcaacaagatcagaagaagacttgtgaaagacagcaacaccaagaaggccggcaagacaggccccatgaaaaccctgctggttagagtgatgacacccgatctgagagagcggctggaaaacctgagaaagaagcctgaaaatatcccccagcccatcagcaatacatctagagccaacctgaataagctgctgaccgattacaccgaaatgaagaaggcgatcctgcatgtgtactgggaagagttccagaaggaccctgtgggcctgatgagccgggtggcccagcctgccagcaagaagatcgatcagaacaagctgaaacctgagatggacgagaagggcaacctgaccaccgccggctttgcctgctctcagtgtggccagcccctgttcgtgtacaagctggagcaggtgtctgagaagggcaaggcttacaccaactacttcggacggtgcaatgtggccgagcacgaaaagctgatcctgctggcccagctgaagcccgagaaggatagcgacgaagccgtgacatatagcctgggaaagtttgggcagagggccctggatttctacagcattcatgtgaccaaggagtccacccaccccgtgaagcccctggcccagatcgccggaaacagatacgcctccggacctgtgggaaaggccctgagcgacgcatgtatgggcacaatcgcctccttcctgtctaagtaccaggacatcatcatcgaacaccagaaggtggtgaagggcaaccagaagagactggagagcctgcgggagctggccggcaaggaaaacctggaataccctagcgtgaccctgccacctcagcctcacaccaaggagggcgttgatgcctacaacgaagtgatcgcccgggtgcgaatgtgggtgaacctgaacctgtggcagaagctgaagctaagcagagatgatgccaagcctctgctgagactgaagggattcccttcctttcctctggtcgagagacaggccaacgaagtggactggtgggacatggtgtgtaacgtgaagaagctgatcaacgagaaaaaggaggatggcaaggtgttttggcagaatctggctggctacaagagacaggaagccctgagaccatacctgagcagcgaggaagatcggaagaagggaaagaaattcgctcggtaccagctgggcgacctgctgctgcacctggaaaagaagcacggcgaggactggggaaaggtgtacgacgaggcctgggagcggattgacaagaaagtggaaggcctgagcaagcacatcaagctggaagaggaacggagaagcgaggacgcccagagcaaggccgccctgaccgactggctgcgggctaaggccagcttcgtgatcgagggcctgaaggaggccgacaaggacgagttctgcagatgcgagctgaagctgcagaagtggtacggggacctgcggggaaagcccttcgccatcgaagccgagaacagcatcctggacatcagcggcttcagcaagcagtacaactgtgccttcatctggcagaaggacggcgtgaagaagctgaacctgtacctgatcatcaactacttcaagggcggcaagctgcggttcaagaagatcaaacctgaagccttcgaagccaacagattctacaccgtgatcaacaaaaagagcggcgagatcgtgcccatggaggtgaacttcaacttcgacgaccccaacctgatcatcctgcctctggcctttggcaagagacagggcagagaattcatctggaacgacctgctgtccctggaaaccggcagcctgaagctggccaacggaagagtgatcgagaagacactgtacaacagaagaacccggcaggatgagcctgccctgttcgtggccctgaccttcgagcggcgggaggtcctggactcctccaatatcaaaccaatgaacctgatcggcgtggcaagaggcgaaaacatccccgccgtgatcgccctgaccgaccccgagggctgcccactgagccggtttaaggatagcctgggaaacccaacccacatcctgagaatcggcgagagctataaggagaagcagcggaccatccaggccaagaaggaggtggagcagcggagagccggcggctacagccggaagtacgccagcaaagccaagaatctggcagacgatatggtgagaaacaccgctagagatctgctgtactacgccgtgacccaggatgccatgctgatcttcgccaacctgagccggggcttcggccggcagggcaagcggaccttcatggccgagagacagtacacacggatggaggactggctgaccgccaagctggcctacgagggcctgagcaagacctacctgtccaagacactggcccagtacacctccaagacatgcagcaactgtgggtttaccatcaccagcgccgactacgacagggtgctggagaagctgaagaagacagcaacaggctggatgaccacaattaacggcaaggagctgaaggtggagggccagattacctactacaacagatacaagagacagaacgtagtcaaggacctgtccgtcgagctggatagactgagcgaagaatctgtgaacaacgacatctcctcctggacaaagggcagaagcggagaagctctgagcctcctgaagaaaagattctcccatagacccgtgcaggagaagttcgtgtgcctgaactgcggcttcgagacacacgcagccgagcaagccgccctgaacatcgccagatcctggctgttcctgcggagccaggagtacaagaaataccagacaaacaagacaaccggcaacaccgataagagagccttcgtcgagacctggcagtccttttaccggaagaagcttaaggaggtgtggaaacctgccgtgcggtctggcggatctggcggaggctccatggccttcgaggacgtggccgtgtacttcagccaggaggagtggggcctgctggacaccgcccagagggccctgtacaggcacgtgatgctggagaacttcaccctggtgaccagcctgggcctgagcaccagcaggccccacgtggtgatccagctggagaggggcgaggagccctgggtgcccagcggcaaggacatgaccctggccaggaacacctacaggaggctgaacgccggcagcggcggcccaagcagcggcgcccctcctcccagcggcggcagcccagccggctccccaacctctaccgaggagggcacctctgagtccgccacccccgagagcggccctggcacctccaccgagcccagcgagggcagcgcacccggcagccctgccggcagccccacctccacagaggagggaaccagcaccgagcccagcgaaggcagcgccccaggcaccagcaccgagcctagtgagcaggagattaaacggatcaacaagatcagaagaagacttgtgaaagacagcaacaccaagaaggccggcaagacaggccccatgaaaaccctgctggttagagtgatgacacccgatctgagagagcggctggaaaacctgagaaagaagcctgaaaatatcccccagcccatcagcaatacatctagagccaacctgaataagctgctgaccgattacaccgaaatgaagaaggcgatcctgcatgtgtactgggaagagttccagaaggaccctgtgggcctgatgagccgggtggcccagcctgccagcaagaagatcgatcagaacaagctgaaacctgagatggacgagaagggcaacctgaccaccgccggctttgcctgctctcagtgtggccagcccctgttcgtgtacaagctggagcaggtgtctgagaagggcaaggcttacaccaactacttcggacggtgcaatgtggccgagcacgaaaagctgatcctgctggcccagctgaagcccgagaaggatagcgacgaagccgtgacatatagcctgggaaagtttgggcagagggccctggatttctacagcattcatgtgaccaaggagtccacccaccccgtgaagcccctggcccagatcgccggaaacagatacgcctccggacctgtgggaaaggccctgagcgacgcatgtatgggcacaatcgcctccttcctgtctaagtaccaggacatcatcatcgaacaccagaaggtggtgaagggcaaccagaagagactggagagcctgcgggagctggccggcaaggaaaacctggaataccctagcgtgaccctgccacctcagcctcacaccaaggagggcgttgatgcctacaacgaagtgatcgcccgggtgcgaatgtgggtgaacctgaacctgtggcagaagctgaagctaagcagagatgatgccaagcctctgctgagactgaagggattcccttcctttcctctggtcgagagacaggccaacgaagtggactggtgggacatggtgtgtaacgtgaagaagctgatcaacgagaaaaaggaggatggcaaggtgttttggcagaatctggctggctacaagagacaggaagccctgagaccatacctgagcagcgaggaagatcggaagaagggaaagaaattcgctcggtaccagctgggcgacctgctgctgcacctggaaaagaagcacggcgaggactggggaaaggtgtacgacgaggcctgggagcggattgacaagaaagtggaaggcctgagcaagcacatcaagctggaagaggaacggagaagcgaggacgcccagagcaaggccgccctgaccgactggctgcgggctaaggccagcttcgtgatcgagggcctgaaggaggccgacaaggacgagttctgcagatgcgagctgaagctgcagaagtggtacggggacctgcggggaaagcccttcgccatcgaagccgagaacagcatcctggacatcagcggcttcagcaagcagtacaactgtgccttcatctggcagaaggacggcgtgaagaagctgaacctgtacctgatcatcaactacttcaagggcggcaagctgcggttcaagaagatcaaacctgaagccttcgaagccaacagattctacaccgtgatcaacaaaaagagcggcgagatcgtgcccatggaggtgaacttcaacttcgacgaccccaacctgatcatcctgcctctggcctttggcaagagacagggcagagaattcatctggaacgacctgctgtccctggaaaccggcagcctgaagctggccaacggaagagtgatcgagaagacactgtacaacagaagaacccggcaggatgagcctgccctgttcgtggccctgaccttcgagcggcgggaggtcctggactcctccaatatcaaaccaatgaacctgatcggcgtggcaagaggcgaaaacatccccgccgtgatcgccctgaccgaccccgagggctgcccactgagccggtttaaggatagcctgggaaacccaacccacatcctgagaatcggcgagagctataaggagaagcagcggaccatccaggccaagaaggaggtggagcagcggagagccggcggctacagccggaagtacgccagcaaagccaagaatctggcagacgatatggtgagaaacaccgctagagatctgctgtactacgccgtgacccaggatgccatgctgatcttcgccaacctgagccggggcttcggccggcagggcaagcggaccttcatggccgagagacagtacacacggatggaggactggctgaccgccaagctggcctacgagggcctgagcaagacctacctgtccaagacactggcccagtacacctccaagacatgcagcaactgtgggtttaccatcaccagcgccgactacgacagggtgctggagaagctgaagaagacagcaacaggctggatgaccacaattaacggcaaggagctgaaggtggagggccagattacctactacaacagatacaagagacagaacgtagtcaaggacctgtccgtcgagctggatagactgagcgaagaatctgtgaacaacgacatctcctcctggacaaagggcagaagcggagaagctctgagcctcctgaagaaaagattctcccatagacccgtgcaggagaagttcgtgtgcctgaactgcggcttcgagacacacgcagccgagcaagccgccctgaacatcgccagatcctggctgttcctgcggagccaggagtacaagaaataccagacaaacaagacaaccggcaacaccgataagagagccttcgtcgagacctggcagtccttttaccggaagaagcttaaggaggtgtggaaacctgccgtgcggtctggcggatctggcggaggctcctatggccttcgaggacgtggccgtgtacttcagccaggaggagtggggcctgctggacaccgcccagagggccctgtacaggcacgtgatgctggagaacttcaccctggtgaccagcctgggcctgagcaccagcaggccccacgtggtgatccagctggagaggggcgaggagccctgggtgcccagcggcaaggacatgaccctggccaggaacacctacaggaggctgaacgccggcagcggatctggctccggcagcggccccaagaaaaagagaaaagtctaagctgccttctgcggggcttgccttctggccatgcccttcttctctcccttgcacctgtacctcttggtctttgaataaagcctgagtaggaaggctagcaaaaaaaaaaaaaaaaaaaaaaaaaaaaaaaaaaaaaaaaaaaaaaaaaaaaaaaaaaaaaaaaaaaaaaaaaaaaaaaa

SEQ ID NO: 15564 - RNA, 9485 nt, synthetic construct
  source 1..9485: mol_type = other RNA
aggaaataagagagaaaagaagagtaagaagaaatataagagccaccatggcccctaagaagaagcgtaaagtgagccggatggaacgcctcgtctacgaggtgcggcagaagtgcagaaacatcgaggacatctgcatctcctgcggatctctgaacgtgaccctggagcacccactgttcatcggcggcatgtgccagaactgtaaaaactgttttctggagtgtgcctatcaatacgacgatgacggctaccagagctactgcaccatctgttgcggcggaagagaggtgctgatgtgtggaaataacaactgctgccggtgcttctgcgtggaatgcgtggacctgctggtgggccccggcgccgcccaggccgctattaaggaagatccttggaactgctacatgtgcggccacaagggcacatacggcctgctgagacggagagaggactggcctagcagactgcagatgttcttcgccaataaccacgaccaggagttcgacccccctaaggtgtaccctcccgtccccgccgagaagagaaagcccatccgggtcctgagcctgttcgatggcatcgccaccggtctgctggtgctgaaggacctgggcatccaggtggataggtacattgcctccgaggtgtgcgaggactccatcaccgtgggaatggtgcgtcatcagggcaagatcatgtacgtgggcgacgtgcggagcgtgacacagaagcatatccaggagtggggccctttcgacctggtgatcggcggcagcccttgcaatgacctgagcatcgtgaacccagcccggaagggcctgtacgagggaaccggcagactgttcttcgagttttacagactgctgcacgacgcccggcctaaggaaggcgacgaccggcccttcttttggctgttcgagaatgtggtggccatgggagtcagcgacaagcgggatattagccggttcctggagagcaaccccgtgatgatcgatgccaaggaagtgagcgccgcccaccgggccagatacttctggggcaatctgcctggcatgaacagacccctggccagcaccgtgaacgacaagctggagctgcaggagtgcctggagcacggccggatcgccaagttcagcaaggtgagaaccatcaccacccgaagcaacagcatcaaacaaggcaaggaccagcactttcctgtgttcatgaacgagaaggaggacatcctgtggtgtaccgagatggagagagtgttcgggttcccagtccactacacagatgtcagcaacatgtctagactggccagacagagactgctgggaagaagctggtccgtccctgtgatcagacacctgttcgcccctctgaaggagtacttcgcctgcgtgagcagcggcaacagcaacgccaacagccggggccccagcttctctagcggcctggtgccactgtccctgagagggagccacatgggccccatggagatctacaaaaccgtgagcgcctggaagcggcagcctgtgcgcgtgctgagcctgtttcggaatatcgataaagtcctgaaaagcctgggattcctggagagcggctctggctccggcggtggcaccctgaagtacgtggaggatgtgacaaacgtggtcagacgggatgtggagaagtggggccccttcgatctggtgtacggcagcacccaacccctgggcagctcttgtgaccggtgccctggctggtacatgtttcagttccaccggatcctgcagtacgccctgccgagacaggagtcccagcggccattcttttggattttcatggacaacttgctgctgaccgaggatgaccaggaaactaccactcggttcctgcagaccgaagccgtgaccctgcaggacgtgagaggccgggactaccagaacgccatgcgggtgtggtccaacatccctggactgaaaagcaagcacgcacctctgacccctaaagaagaggagtacctgcaggcccaggtgcggagcagaagcaagctggacgcccctaaggtggatctgctggtgaagaattgcctcctgcccctgagagagtacttcaagtatttcagccagaatagtctgcccctgggaggcagcggcggcggcgccctggtgacatttgaggacgtcgccgtgcggttcacccaggaggaatgggctctgctggatccttctcagaaaatcctgtaccgggacgtgatgagagagacataccggaatctgacctccgtgggcatcaactgggaatgttgggaccttgaagcctgcttcagaagcctgggaagaaacctgagagtgcaggtggtgaagagaaagtgcgagctgaccaacagcggcccctgcgccgagggcggcccaagcagcggcgcccctcctcccagcggcggcagcccagccggctccccaacctctaccgaggagggcacctctgagtccgccacccccgagagcggccctggcacctccaccgagcccagcgagggcagcgcacccggcagccctgccggcagccccacctccacagaggagggaaccagcaccgagcccagcgaaggcagcgccccaggcaccagcaccgagcctagtgagcaggagattaaacggatcaacaagatcagaagaagacttgtgaaagacagcaacaccaagaaggccggcaagacaggccccatgaaaaccctgctggttagagtgatgacacccgatctgagagagcggctggaaaacctgagaaagaagcctgaaaatatcccccagcccatcagcaatacatctagagccaacctgaataagctgctgaccgattacaccgaaatgaagaaggcgatcctgcatgtgtactgggaagagttccagaaggaccctgtgggcctgatgagccgggtggcccagcctgccagcaagaagatcgatcagaacaagctgaaacctgagatggacgagaagggcaacctgaccaccgccggctttgcctgctctcagtgtggccagcccctgttcgtgtacaagctggagcaggtgtctgagaagggcaaggcttacaccaactacttcggacggtgcaatgtggccgagcacgaaaagctgatcctgctggcccagctgaagcccgagaaggatagcgacgaagccgtgacatatagcctgggaaagtttgggcagagggccctggatttctacagcattcatgtgaccaaggagtccacccaccccgtgaagcccctggcccagatcgccggaaacagatacgcctccggacctgtgggaaaggccctgagcgacgcatgtatgggcacaatcgcctccttcctgtctaagtaccaggacatcatcatcgaacaccagaaggtggtgaagggcaaccagaagagactggagagcctgcgggagctggccggcaaggaaaacctggaataccctagcgtgaccctgccacctcagcctcacaccaaggagggcgttgatgcctacaacgaagtgatcgcccgggtgcgaatgtgggtgaacctgaacctgtggcagaagctgaagctaagcagagatgatgccaagcctctgctgagactgaagggattcccttcctttcctctggtcgagagacaggccaacgaagtggactggtgggacatggtgtgtaacgtgaagaagctgatcaacgagaaaaaggaggatggcaaggtgttttggcagaatctggctggctacaagagacaggaagccctgagaccatacctgagcagcgaggaagatcggaagaagggaaagaaattcgctcggtaccagctgggcgacctgctgctgcacctggaaaagaagcacggcgaggactggggaaaggtgtacgacgaggcctgggagcggattgacaagaaagtggaaggcctgagcaagcacatcaagctggaagaggaacggagaagcgaggacgcccagagcaaggccgccctgaccgactggctgcgggctaaggccagcttcgtgatcgagggcctgaaggaggccgacaaggacgagttctgcagatgcgagctgaagctgcagaagtggtacggggacctgcggggaaagcccttcgccatcgaagccgagaacagcatcctggacatcagcggcttcagcaagcagtacaactgtgccttcatctggcagaaggacggcgtgaagaagctgaacctgtacctgatcatcaactacttcaagggcggcaagctgcggttcaagaagatcaaacctgaagccttcgaagccaacagattctacaccgtgatcaacaaaaagagcggcgagatcgtgcccatggaggtgaacttcaacttcgacgaccccaacctgatcatcctgcctctggcctttggcaagagacagggcagagaattcatctggaacgacctgctgtccctggaaaccggcagcctgaagctggccaacggaagagtgatcgagaagacactgtacaacagaagaacccggcaggatgagcctgccctgttcgtggccctgaccttcgagcggcgggaggtcctggactcctccaatatcaaaccaatgaacctgatcggcgtggcaagaggcgaaaacatccccgccgtgatcgccctgaccgaccccgagggctgcccactgagccggtttaaggatagcctgggaaacccaacccacatcctgagaatcggcgagagctataaggagaagcagcggaccatccaggccaagaaggaggtggagcagcggagagccggcggctacagccggaagtacgccagcaaagccaagaatctggcagacgatatggtgagaaacaccgctagagatctgctgtactacgccgtgacccaggatgccatgctgatcttcgccaacctgagccggggcttcggccggcagggcaagcggaccttcatggccgagagacagtacacacggatggaggactggctgaccgccaagctggcctacgagggcctgagcaagacctacctgtccaagacactggcccagtacacctccaagacatgcagcaactgtgggtttaccatcaccagcgccgactacgacagggtgctggagaagctgaagaagacagcaacaggctggatgaccacaattaacggcaaggagctgaaggtggagggccagattacctactacaacagatacaagagacagaacgtagtcaaggacctgtccgtcgagctggatagactgagcgaagaatctgtgaacaacgacatctcctcctggacaaagggcagaagcggagaagctctgagcctcctgaagaaaagattctcccatagacccgtgcaggagaagttcgtgtgcctgaactgcggcttcgagacacacgcagccgagcaagccgccctgaacatcgccagatcctggctgttcctgcggagccaggagtacaagaaataccagacaaacaagacaaccggcaacaccgataagagagccttcgtcgagacctggcagtccttttaccggaagaagcttaaggaggtgtggaaacctgccgtgcggtctggcggatctggcggaggctccaggagcgaggccctgagcttcgccgacgtgagcgtgagcttcagcagggaggagtggggctgcctgaggcccgcccagaaggccctgtacagggacgtgatgagggagacctgcggcctgctgggcgccctgggcctgagcggccccaagcccgccttcatcagctggctggagggcgagatggaggcctggagccccgaggcccacgagcccgagagggagagcagggccgccgacgccaggggcggcccaagcagcggcgcccctcctcccagcggcggcagcccagccggctccccaacctctaccgaggagggcacctctgagtccgccacccccgagagcggccctggcacctccaccgagcccagcgagggcagcgcacccggcagccctgccggcagccccacctccacagaggagggaaccagcaccgagcccagcgaaggcagcgccccaggcaccagcaccgagcctagtgagcaggagattaaacggatcaacaagatcagaagaagacttgtgaaagacagcaacaccaagaaggccggcaagacaggccccatgaaaaccctgctggttagagtgatgacacccgatctgagagagcggctggaaaacctgagaaagaagcctgaaaatatcccccagcccatcagcaatacatctagagccaacctgaataagctgctgaccgattacaccgaaatgaagaaggcgatcctgcatgtgtactgggaagagttccagaaggaccctgtgggcctgatgagccgggtggcccagcctgccagcaagaagatcgatcagaacaagctgaaacctgagatggacgagaagggcaacctgaccaccgccggctttgcctgctctcagtgtggccagcccctgttcgtgtacaagctggagcaggtgtctgagaagggcaaggcttacaccaactacttcggacggtgcaatgtggccgagcacgaaaagctgatcctgctggcccagctgaagcccgagaaggatagcgacgaagccgtgacatatagcctgggaaagtttgggcagagggccctggatttctacagcattcatgtgaccaaggagtccacccaccccgtgaagcccctggcccagatcgccggaaacagatacgcctccggacctgtgggaaaggccctgagcgacgcatgtatgggcacaatcgcctccttcctgtctaagtaccaggacatcatcatcgaacaccagaaggtggtgaagggcaaccagaagagactggagagcctgcgggagctggccggcaaggaaaacctggaataccctagcgtgaccctgccacctcagcctcacaccaaggagggcgttgatgcctacaacgaagtgatcgcccgggtgcgaatgtgggtgaacctgaacctgtggcagaagctgaagctaagcagagatgatgccaagcctctgctgagactgaagggattcccttcctttcctctggtcgagagacaggccaacgaagtggactggtgggacatggtgtgtaacgtgaagaagctgatcaacgagaaaaaggaggatggcaaggtgttttggcagaatctggctggctacaagagacaggaagccctgagaccatacctgagcagcgaggaagatcggaagaagggaaagaaattcgctcggtaccagctgggcgacctgctgctgcacctggaaaagaagcacggcgaggactggggaaaggtgtacgacgaggcctgggagcggattgacaagaaagtggaaggcctgagcaagcacatcaagctggaagaggaacggagaagcgaggacgcccagagcaaggccgccctgaccgactggctgcgggctaaggccagcttcgtgatcgagggcctgaaggaggccgacaaggacgagttctgcagatgcgagctgaagctgcagaagtggtacggggacctgcggggaaagcccttcgccatcgaagccgagaacagcatcctggacatcagcggcttcagcaagcagtacaactgtgccttcatctggcagaaggacggcgtgaagaagctgaacctgtacctgatcatcaactacttcaagggcggcaagctgcggttcaagaagatcaaacctgaagccttcgaagccaacagattctacaccgtgatcaacaaaaagagcggcgagatcgtgcccatggaggtgaacttcaacttcgacgaccccaacctgatcatcctgcctctggcctttggcaagagacagggcagagaattcatctggaacgacctgctgtccctggaaaccggcagcctgaagctggccaacggaagagtgatcgagaagacactgtacaacagaagaacccggcaggatgagcctgccctgttcgtggccctgaccttcgagcggcgggaggtcctggactcctccaatatcaaaccaatgaacctgatcggcgtggcaagaggcgaaaacatccccgccgtgatcgccctgaccgaccccgagggctgcccactgagccggtttaaggatagcctgggaaacccaacccacatcctgagaatcggcgagagctataaggagaagcagcggaccatccaggccaagaaggaggtggagcagcggagagccggcggctacagccggaagtacgccagcaaagccaagaatctggcagacgatatggtgagaaacaccgctagagatctgctgtactacgccgtgacccaggatgccatgctgatcttcgccaacctgagccggggcttcggccggcagggcaagcggaccttcatggccgagagacagtacacacggatggaggactggctgaccgccaagctggcctacgagggcctgagcaagacctacctgtccaagacactggcccagtacacctccaagacatgcagcaactgtgggtttaccatcaccagcgccgactacgacagggtgctggagaagctgaagaagacagcaacaggctggatgaccacaattaacggcaaggagctgaaggtggagggccagattacctactacaacagatacaagagacagaacgtagtcaaggacctgtccgtcgagctggatagactgagcgaagaatctgtgaacaacgacatctcctcctggacaaagggcagaagcggagaagctctgagcctcctgaagaaaagattctcccatagacccgtgcaggagaagttcgtgtgcctgaactgcggcttcgagacacacgcagccgagcaagccgccctgaacatcgccagatcctggctgttcctgcggagccaggagtacaagaaataccagacaaacaagacaaccggcaacaccgataagagagccttcgtcgagacctggcagtccttttaccggaagaagcttaaggaggtgtggaaacctgccgtgcggtctggcggatctggcggaggctcctaggagcgaggccctgagcttcgccgacgtgagcgtgagcttcagcagggaggagtggggctgcctgaggcccgcccagaaggccctgtacagggacgtgatgagggagacctgcggcctgctgggcgccctgggcctgagcggccccaagcccgccttcatcagctggctggagggcgagatggaggcctggagccccgaggcccacgagcccgagagggagagcagggccgccgacgccaggggatctggctccggcagcggccccaagaaaaagagaaaagtctaagctgccttctgcggggcttgccttctggccatgcccttcttctctcccttgcacctgtacctcttggtctttgaataaagcctgagtaggaaggctagcaaaaaaaaaaaaaaaaaaaaaaaaaaaaaaaaaaaaaaaaaaaaaaaaaaaaaaaaaaaaaaaaaaaaaaaaaaaaaaaa

SEQ ID NO: 15565 - RNA, 9521 nt, synthetic construct
  source 1..9521: mol_type = other RNA
aggaaataagagagaaaagaagagtaagaagaaatataagagccaccatggcccctaagaagaagcgtaaagtgagccggatggaacgcctcgtctacgaggtgcggcagaagtgcagaaacatcgaggacatctgcatctcctgcggatctctgaacgtgaccctggagcacccactgttcatcggcggcatgtgccagaactgtaaaaactgttttctggagtgtgcctatcaatacgacgatgacggctaccagagctactgcaccatctgttgcggcggaagagaggtgctgatgtgtggaaataacaactgctgccggtgcttctgcgtggaatgcgtggacctgctggtgggccccggcgccgcccaggccgctattaaggaagatccttggaactgctacatgtgcggccacaagggcacatacggcctgctgagacggagagaggactggcctagcagactgcagatgttcttcgccaataaccacgaccaggagttcgacccccctaaggtgtaccctcccgtccccgccgagaagagaaagcccatccgggtcctgagcctgttcgatggcatcgccaccggtctgctggtgctgaaggacctgggcatccaggtggataggtacattgcctccgaggtgtgcgaggactccatcaccgtgggaatggtgcgtcatcagggcaagatcatgtacgtgggcgacgtgcggagcgtgacacagaagcatatccaggagtggggccctttcgacctggtgatcggcggcagcccttgcaatgacctgagcatcgtgaacccagcccggaagggcctgtacgagggaaccggcagactgttcttcgagttttacagactgctgcacgacgcccggcctaaggaaggcgacgaccggcccttcttttggctgttcgagaatgtggtggccatgggagtcagcgacaagcgggatattagccggttcctggagagcaaccccgtgatgatcgatgccaaggaagtgagcgccgcccaccgggccagatacttctggggcaatctgcctggcatgaacagacccctggccagcaccgtgaacgacaagctggagctgcaggagtgcctggagcacggccggatcgccaagttcagcaaggtgagaaccatcaccacccgaagcaacagcatcaaacaaggcaaggaccagcactttcctgtgttcatgaacgagaaggaggacatcctgtggtgtaccgagatggagagagtgttcgggttcccagtccactacacagatgtcagcaacatgtctagactggccagacagagactgctgggaagaagctggtccgtccctgtgatcagacacctgttcgcccctctgaaggagtacttcgcctgcgtgagcagcggcaacagcaacgccaacagccggggccccagcttctctagcggcctggtgccactgtccctgagagggagccacatgggccccatggagatctacaaaaccgtgagcgcctggaagcggcagcctgtgcgcgtgctgagcctgtttcggaatatcgataaagtcctgaaaagcctgggattcctggagagcggctctggctccggcggtggcaccctgaagtacgtggaggatgtgacaaacgtggtcagacgggatgtggagaagtggggccccttcgatctggtgtacggcagcacccaacccctgggcagctcttgtgaccggtgccctggctggtacatgtttcagttccaccggatcctgcagtacgccctgccgagacaggagtcccagcggccattcttttggattttcatggacaacttgctgctgaccgaggatgaccaggaaactaccactcggttcctgcagaccgaagccgtgaccctgcaggacgtgagaggccgggactaccagaacgccatgcgggtgtggtccaacatccctggactgaaaagcaagcacgcacctctgacccctaaagaagaggagtacctgcaggcccaggtgcggagcagaagcaagctggacgcccctaaggtggatctgctggtgaagaattgcctcctgcccctgagagagtacttcaagtatttcagccagaatagtctgcccctgggaggcagcggcggcggcgccctggtgacatttgaggacgtcgccgtgcggttcacccaggaggaatgggctctgctggatccttctcagaaaatcctgtaccgggacgtgatgagagagacataccggaatctgacctccgtgggcatcaactgggaatgttgggaccttgaagcctgcttcagaagcctgggaagaaacctgagagtgcaggtggtgaagagaaagtgcgagctgaccaacagcggcccctgcgccgagggcggcccaagcagcggcgcccctcctcccagcggcggcagcccagccggctccccaacctctaccgaggagggcacctctgagtccgccacccccgagagcggccctggcacctccaccgagcccagcgagggcagcgcacccggcagccctgccggcagccccacctccacagaggagggaaccagcaccgagcccagcgaaggcagcgccccaggcaccagcaccgagcctagtgagcaggagattaaacggatcaacaagatcagaagaagacttgtgaaagacagcaacaccaagaaggccggcaagacaggccccatgaaaaccctgctggttagagtgatgacacccgatctgagagagcggctggaaaacctgagaaagaagcctgaaaatatcccccagcccatcagcaatacatctagagccaacctgaataagctgctgaccgattacaccgaaatgaagaaggcgatcctgcatgtgtactgggaagagttccagaaggaccctgtgggcctgatgagccgggtggcccagcctgccagcaagaagatcgatcagaacaagctgaaacctgagatggacgagaagggcaacctgaccaccgccggctttgcctgctctcagtgtggccagcccctgttcgtgtacaagctggagcaggtgtctgagaagggcaaggcttacaccaactacttcggacggtgcaatgtggccgagcacgaaaagctgatcctgctggcccagctgaagcccgagaaggatagcgacgaagccgtgacatatagcctgggaaagtttgggcagagggccctggatttctacagcattcatgtgaccaaggagtccacccaccccgtgaagcccctggcccagatcgccggaaacagatacgcctccggacctgtgggaaaggccctgagcgacgcatgtatgggcacaatcgcctccttcctgtctaagtaccaggacatcatcatcgaacaccagaaggtggtgaagggcaaccagaagagactggagagcctgcgggagctggccggcaaggaaaacctggaataccctagcgtgaccctgccacctcagcctcacaccaaggagggcgttgatgcctacaacgaagtgatcgcccgggtgcgaatgtgggtgaacctgaacctgtggcagaagctgaagctaagcagagatgatgccaagcctctgctgagactgaagggattcccttcctttcctctggtcgagagacaggccaacgaagtggactggtgggacatggtgtgtaacgtgaagaagctgatcaacgagaaaaaggaggatggcaaggtgttttggcagaatctggctggctacaagagacaggaagccctgagaccatacctgagcagcgaggaagatcggaagaagggaaagaaattcgctcggtaccagctgggcgacctgctgctgcacctggaaaagaagcacggcgaggactggggaaaggtgtacgacgaggcctgggagcggattgacaagaaagtggaaggcctgagcaagcacatcaagctggaagaggaacggagaagcgaggacgcccagagcaaggccgccctgaccgactggctgcgggctaaggccagcttcgtgatcgagggcctgaaggaggccgacaaggacgagttctgcagatgcgagctgaagctgcagaagtggtacggggacctgcggggaaagcccttcgccatcgaagccgagaacagcatcctggacatcagcggcttcagcaagcagtacaactgtgccttcatctggcagaaggacggcgtgaagaagctgaacctgtacctgatcatcaactacttcaagggcggcaagctgcggttcaagaagatcaaacctgaagccttcgaagccaacagattctacaccgtgatcaacaaaaagagcggcgagatcgtgcccatggaggtgaacttcaacttcgacgaccccaacctgatcatcctgcctctggcctttggcaagagacagggcagagaattcatctggaacgacctgctgtccctggaaaccggcagcctgaagctggccaacggaagagtgatcgagaagacactgtacaacagaagaacccggcaggatgagcctgccctgttcgtggccctgaccttcgagcggcgggaggtcctggactcctccaatatcaaaccaatgaacctgatcggcgtggcaagaggcgaaaacatccccgccgtgatcgccctgaccgaccccgagggctgcccactgagccggtttaaggatagcctgggaaacccaacccacatcctgagaatcggcgagagctataaggagaagcagcggaccatccaggccaagaaggaggtggagcagcggagagccggcggctacagccggaagtacgccagcaaagccaagaatctggcagacgatatggtgagaaacaccgctagagatctgctgtactacgccgtgacccaggatgccatgctgatcttcgccaacctgagccggggcttcggccggcagggcaagcggaccttcatggccgagagacagtacacacggatggaggactggctgaccgccaagctggcctacgagggcctgagcaagacctacctgtccaagacactggcccagtacacctccaagacatgcagcaactgtgggtttaccatcaccagcgccgactacgacagggtgctggagaagctgaagaagacagcaacaggctggatgaccacaattaacggcaaggagctgaaggtggagggccagattacctactacaacagatacaagagacagaacgtagtcaaggacctgtccgtcgagctggatagactgagcgaagaatctgtgaacaacgacatctcctcctggacaaagggcagaagcggagaagctctgagcctcctgaagaaaagattctcccatagacccgtgcaggagaagttcgtgtgcctgaactgcggcttcgagacacacgcagccgagcaagccgccctgaacatcgccagatcctggctgttcctgcggagccaggagtacaagaaataccagacaaacaagacaaccggcaacaccgataagagagccttcgtcgagacctggcagtccttttaccggaagaagcttaaggaggtgtggaaacctgccgtgcggtctggcggatctggcggaggctccgtgaccttcgaggacgtggccgtgaacttcaccctggaggagtgggccctgctggaccccagccagaagaagctgtacagggacgtgatgagggagaccctgaggaacctggccagcgtgggcgagaagtgggaggaccacgacatcgaggaccagtacaagaaccagggcaggaagctgaggagccacgtgctggagaggctgtgcgagagcaaggagggcagccagtgcggcgagaacttcagcctgatccccaacctgggcggcccaagcagcggcgcccctcctcccagcggcggcagcccagccggctccccaacctctaccgaggagggcacctctgagtccgccacccccgagagcggccctggcacctccaccgagcccagcgagggcagcgcacccggcagccctgccggcagccccacctccacagaggagggaaccagcaccgagcccagcgaaggcagcgccccaggcaccagcaccgagcctagtgagcaggagattaaacggatcaacaagatcagaagaagacttgtgaaagacagcaacaccaagaaggccggcaagacaggccccatgaaaaccctgctggttagagtgatgacacccgatctgagagagcggctggaaaacctgagaaagaagcctgaaaatatcccccagcccatcagcaatacatctagagccaacctgaataagctgctgaccgattacaccgaaatgaagaaggcgatcctgcatgtgtactgggaagagttccagaaggaccctgtgggcctgatgagccgggtggcccagcctgccagcaagaagatcgatcagaacaagctgaaacctgagatggacgagaagggcaacctgaccaccgccggctttgcctgctctcagtgtggccagcccctgttcgtgtacaagctggagcaggtgtctgagaagggcaaggcttacaccaactacttcggacggtgcaatgtggccgagcacgaaaagctgatcctgctggcccagctgaagcccgagaaggatagcgacgaagccgtgacatatagcctgggaaagtttgggcagagggccctggatttctacagcattcatgtgaccaaggagtccacccaccccgtgaagcccctggcccagatcgccggaaacagatacgcctccggacctgtgggaaaggccctgagcgacgcatgtatgggcacaatcgcctccttcctgtctaagtaccaggacatcatcatcgaacaccagaaggtggtgaagggcaaccagaagagactggagagcctgcgggagctggccggcaaggaaaacctggaataccctagcgtgaccctgccacctcagcctcacaccaaggagggcgttgatgcctacaacgaagtgatcgcccgggtgcgaatgtgggtgaacctgaacctgtggcagaagctgaagctaagcagagatgatgccaagcctctgctgagactgaagggattcccttcctttcctctggtcgagagacaggccaacgaagtggactggtgggacatggtgtgtaacgtgaagaagctgatcaacgagaaaaaggaggatggcaaggtgttttggcagaatctggctggctacaagagacaggaagccctgagaccatacctgagcagcgaggaagatcggaagaagggaaagaaattcgctcggtaccagctgggcgacctgctgctgcacctggaaaagaagcacggcgaggactggggaaaggtgtacgacgaggcctgggagcggattgacaagaaagtggaaggcctgagcaagcacatcaagctggaagaggaacggagaagcgaggacgcccagagcaaggccgccctgaccgactggctgcgggctaaggccagcttcgtgatcgagggcctgaaggaggccgacaaggacgagttctgcagatgcgagctgaagctgcagaagtggtacggggacctgcggggaaagcccttcgccatcgaagccgagaacagcatcctggacatcagcggcttcagcaagcagtacaactgtgccttcatctggcagaaggacggcgtgaagaagctgaacctgtacctgatcatcaactacttcaagggcggcaagctgcggttcaagaagatcaaacctgaagccttcgaagccaacagattctacaccgtgatcaacaaaaagagcggcgagatcgtgcccatggaggtgaacttcaacttcgacgaccccaacctgatcatcctgcctctggcctttggcaagagacagggcagagaattcatctggaacgacctgctgtccctggaaaccggcagcctgaagctggccaacggaagagtgatcgagaagacactgtacaacagaagaacccggcaggatgagcctgccctgttcgtggccctgaccttcgagcggcgggaggtcctggactcctccaatatcaaaccaatgaacctgatcggcgtggcaagaggcgaaaacatccccgccgtgatcgccctgaccgaccccgagggctgcccactgagccggtttaaggatagcctgggaaacccaacccacatcctgagaatcggcgagagctataaggagaagcagcggaccatccaggccaagaaggaggtggagcagcggagagccggcggctacagccggaagtacgccagcaaagccaagaatctggcagacgatatggtgagaaacaccgctagagatctgctgtactacgccgtgacccaggatgccatgctgatcttcgccaacctgagccggggcttcggccggcagggcaagcggaccttcatggccgagagacagtacacacggatggaggactggctgaccgccaagctggcctacgagggcctgagcaagacctacctgtccaagacactggcccagtacacctccaagacatgcagcaactgtgggtttaccatcaccagcgccgactacgacagggtgctggagaagctgaagaagacagcaacaggctggatgaccacaattaacggcaaggagctgaaggtggagggccagattacctactacaacagatacaagagacagaacgtagtcaaggacctgtccgtcgagctggatagactgagcgaagaatctgtgaacaacgacatctcctcctggacaaagggcagaagcggagaagctctgagcctcctgaagaaaagattctcccatagacccgtgcaggagaagttcgtgtgcctgaactgcggcttcgagacacacgcagccgagcaagccgccctgaacatcgccagatcctggctgttcctgcggagccaggagtacaagaaataccagacaaacaagacaaccggcaacaccgataagagagccttcgtcgagacctggcagtccttttaccggaagaagcttaaggaggtgtggaaacctgccgtgcggtctggcggatctggcggaggctcctgtgaccttcgaggacgtggccgtgaacttcaccctggaggagtgggccctgctggaccccagccagaagaagctgtacagggacgtgatgagggagaccctgaggaacctggccagcgtgggcgagaagtgggaggaccacgacatcgaggaccagtacaagaaccagggcaggaagctgaggagccacgtgctggagaggctgtgcgagagcaaggagggcagccagtgcggcgagaacttcagcctgatccccaacctgggatctggctccggcagcggccccaagaaaaagagaaaagtctaagctgccttctgcggggcttgccttctggccatgcccttcttctctcccttgcacctgtacctcttggtctttgaataaagcctgagtaggaaggctagcaaaaaaaaaaaaaaaaaaaaaaaaaaaaaaaaaaaaaaaaaaaaaaaaaaaaaaaaaaaaaaaaaaaaaaaaaaaaaaaa

SEQ ID NO: 15566 - RNA, 9485 nt, synthetic construct
  source 1..9485: mol_type = other RNA
aggaaataagagagaaaagaagagtaagaagaaatataagagccaccatggcccctaagaagaagcgtaaagtgagccggatggaacgcctcgtctacgaggtgcggcagaagtgcagaaacatcgaggacatctgcatctcctgcggatctctgaacgtgaccctggagcacccactgttcatcggcggcatgtgccagaactgtaaaaactgttttctggagtgtgcctatcaatacgacgatgacggctaccagagctactgcaccatctgttgcggcggaagagaggtgctgatgtgtggaaataacaactgctgccggtgcttctgcgtggaatgcgtggacctgctggtgggccccggcgccgcccaggccgctattaaggaagatccttggaactgctacatgtgcggccacaagggcacatacggcctgctgagacggagagaggactggcctagcagactgcagatgttcttcgccaataaccacgaccaggagttcgacccccctaaggtgtaccctcccgtccccgccgagaagagaaagcccatccgggtcctgagcctgttcgatggcatcgccaccggtctgctggtgctgaaggacctgggcatccaggtggataggtacattgcctccgaggtgtgcgaggactccatcaccgtgggaatggtgcgtcatcagggcaagatcatgtacgtgggcgacgtgcggagcgtgacacagaagcatatccaggagtggggccctttcgacctggtgatcggcggcagcccttgcaatgacctgagcatcgtgaacccagcccggaagggcctgtacgagggaaccggcagactgttcttcgagttttacagactgctgcacgacgcccggcctaaggaaggcgacgaccggcccttcttttggctgttcgagaatgtggtggccatgggagtcagcgacaagcgggatattagccggttcctggagagcaaccccgtgatgatcgatgccaaggaagtgagcgccgcccaccgggccagatacttctggggcaatctgcctggcatgaacagacccctggccagcaccgtgaacgacaagctggagctgcaggagtgcctggagcacggccggatcgccaagttcagcaaggtgagaaccatcaccacccgaagcaacagcatcaaacaaggcaaggaccagcactttcctgtgttcatgaacgagaaggaggacatcctgtggtgtaccgagatggagagagtgttcgggttcccagtccactacacagatgtcagcaacatgtctagactggccagacagagactgctgggaagaagctggtccgtccctgtgatcagacacctgttcgcccctctgaaggagtacttcgcctgcgtgagcagcggcaacagcaacgccaacagccggggccccagcttctctagcggcctggtgccactgtccctgagagggagccacatgggccccatggagatctacaaaaccgtgagcgcctggaagcggcagcctgtgcgcgtgctgagcctgtttcggaatatcgataaagtcctgaaaagcctgggattcctggagagcggctctggctccggcggtggcaccctgaagtacgtggaggatgtgacaaacgtggtcagacgggatgtggagaagtggggccccttcgatctggtgtacggcagcacccaacccctgggcagctcttgtgaccggtgccctggctggtacatgtttcagttccaccggatcctgcagtacgccctgccgagacaggagtcccagcggccattcttttggattttcatggacaacttgctgctgaccgaggatgaccaggaaactaccactcggttcctgcagaccgaagccgtgaccctgcaggacgtgagaggccgggactaccagaacgccatgcgggtgtggtccaacatccctggactgaaaagcaagcacgcacctctgacccctaaagaagaggagtacctgcaggcccaggtgcggagcagaagcaagctggacgcccctaaggtggatctgctggtgaagaattgcctcctgcccctgagagagtacttcaagtatttcagccagaatagtctgcccctgggaggcagcggcggcggcgccctggtgacatttgaggacgtcgccgtgcggttcacccaggaggaatgggctctgctggatccttctcagaaaatcctgtaccgggacgtgatgagagagacataccggaatctgacctccgtgggcatcaactgggaatgttgggaccttgaagcctgcttcagaagcctgggaagaaacctgagagtgcaggtggtgaagagaaagtgcgagctgaccaacagcggcccctgcgccgagggcggcccaagcagcggcgcccctcctcccagcggcggcagcccagccggctccccaacctctaccgaggagggcacctctgagtccgccacccccgagagcggccctggcacctccaccgagcccagcgagggcagcgcacccggcagccctgccggcagccccacctccacagaggagggaaccagcaccgagcccagcgaaggcagcgccccaggcaccagcaccgagcctagtgagcaggagattaaacggatcaacaagatcagaagaagacttgtgaaagacagcaacaccaagaaggccggcaagacaggccccatgaaaaccctgctggttagagtgatgacacccgatctgagagagcggctggaaaacctgagaaagaagcctgaaaatatcccccagcccatcagcaatacatctagagccaacctgaataagctgctgaccgattacaccgaaatgaagaaggcgatcctgcatgtgtactgggaagagttccagaaggaccctgtgggcctgatgagccgggtggcccagcctgccagcaagaagatcgatcagaacaagctgaaacctgagatggacgagaagggcaacctgaccaccgccggctttgcctgctctcagtgtggccagcccctgttcgtgtacaagctggagcaggtgtctgagaagggcaaggcttacaccaactacttcggacggtgcaatgtggccgagcacgaaaagctgatcctgctggcccagctgaagcccgagaaggatagcgacgaagccgtgacatatagcctgggaaagtttgggcagagggccctggatttctacagcattcatgtgaccaaggagtccacccaccccgtgaagcccctggcccagatcgccggaaacagatacgcctccggacctgtgggaaaggccctgagcgacgcatgtatgggcacaatcgcctccttcctgtctaagtaccaggacatcatcatcgaacaccagaaggtggtgaagggcaaccagaagagactggagagcctgcgggagctggccggcaaggaaaacctggaataccctagcgtgaccctgccacctcagcctcacaccaaggagggcgttgatgcctacaacgaagtgatcgcccgggtgcgaatgtgggtgaacctgaacctgtggcagaagctgaagctaagcagagatgatgccaagcctctgctgagactgaagggattcccttcctttcctctggtcgagagacaggccaacgaagtggactggtgggacatggtgtgtaacgtgaagaagctgatcaacgagaaaaaggaggatggcaaggtgttttggcagaatctggctggctacaagagacaggaagccctgagaccatacctgagcagcgaggaagatcggaagaagggaaagaaattcgctcggtaccagctgggcgacctgctgctgcacctggaaaagaagcacggcgaggactggggaaaggtgtacgacgaggcctgggagcggattgacaagaaagtggaaggcctgagcaagcacatcaagctggaagaggaacggagaagcgaggacgcccagagcaaggccgccctgaccgactggctgcgggctaaggccagcttcgtgatcgagggcctgaaggaggccgacaaggacgagttctgcagatgcgagctgaagctgcagaagtggtacggggacctgcggggaaagcccttcgccatcgaagccgagaacagcatcctggacatcagcggcttcagcaagcagtacaactgtgccttcatctggcagaaggacggcgtgaagaagctgaacctgtacctgatcatcaactacttcaagggcggcaagctgcggttcaagaagatcaaacctgaagccttcgaagccaacagattctacaccgtgatcaacaaaaagagcggcgagatcgtgcccatggaggtgaacttcaacttcgacgaccccaacctgatcatcctgcctctggcctttggcaagagacagggcagagaattcatctggaacgacctgctgtccctggaaaccggcagcctgaagctggccaacggaagagtgatcgagaagacactgtacaacagaagaacccggcaggatgagcctgccctgttcgtggccctgaccttcgagcggcgggaggtcctggactcctccaatatcaaaccaatgaacctgatcggcgtggcaagaggcgaaaacatccccgccgtgatcgccctgaccgaccccgagggctgcccactgagccggtttaaggatagcctgggaaacccaacccacatcctgagaatcggcgagagctataaggagaagcagcggaccatccaggccaagaaggaggtggagcagcggagagccggcggctacagccggaagtacgccagcaaagccaagaatctggcagacgatatggtgagaaacaccgctagagatctgctgtactacgccgtgacccaggatgccatgctgatcttcgccaacctgagccggggcttcggccggcagggcaagcggaccttcatggccgagagacagtacacacggatggaggactggctgaccgccaagctggcctacgagggcctgagcaagacctacctgtccaagacactggcccagtacacctccaagacatgcagcaactgtgggtttaccatcaccagcgccgactacgacagggtgctggagaagctgaagaagacagcaacaggctggatgaccacaattaacggcaaggagctgaaggtggagggccagattacctactacaacagatacaagagacagaacgtagtcaaggacctgtccgtcgagctggatagactgagcgaagaatctgtgaacaacgacatctcctcctggacaaagggcagaagcggagaagctctgagcctcctgaagaaaagattctcccatagacccgtgcaggagaagttcgtgtgcctgaactgcggcttcgagacacacgcagccgagcaagccgccctgaacatcgccagatcctggctgttcctgcggagccaggagtacaagaaataccagacaaacaagacaaccggcaacaccgataagagagccttcgtcgagacctggcagtccttttaccggaagaagcttaaggaggtgtggaaacctgccgtgcggtctggcggatctggcggaggctccaagcccgagctggtgagcttcgaggacgtggccgtgtacttcagcccccacgagtggggctgcctgaggcccgcccagagggccctgtacagggaggtgatgagggagacctacggcctgctgggcgccctgggcttccccggccccaagcccgccctgatcagctggatggagcaggagagcgaggcctggagccccgccgcccaggaccccgccgagggcgagagcctgggcggcgccctgggcggcccaagcagcggcgcccctcctcccagcggcggcagcccagccggctccccaacctctaccgaggagggcacctctgagtccgccacccccgagagcggccctggcacctccaccgagcccagcgagggcagcgcacccggcagccctgccggcagccccacctccacagaggagggaaccagcaccgagcccagcgaaggcagcgccccaggcaccagcaccgagcctagtgagcaggagattaaacggatcaacaagatcagaagaagacttgtgaaagacagcaacaccaagaaggccggcaagacaggccccatgaaaaccctgctggttagagtgatgacacccgatctgagagagcggctggaaaacctgagaaagaagcctgaaaatatcccccagcccatcagcaatacatctagagccaacctgaataagctgctgaccgattacaccgaaatgaagaaggcgatcctgcatgtgtactgggaagagttccagaaggaccctgtgggcctgatgagccgggtggcccagcctgccagcaagaagatcgatcagaacaagctgaaacctgagatggacgagaagggcaacctgaccaccgccggctttgcctgctctcagtgtggccagcccctgttcgtgtacaagctggagcaggtgtctgagaagggcaaggcttacaccaactacttcggacggtgcaatgtggccgagcacgaaaagctgatcctgctggcccagctgaagcccgagaaggatagcgacgaagccgtgacatatagcctgggaaagtttgggcagagggccctggatttctacagcattcatgtgaccaaggagtccacccaccccgtgaagcccctggcccagatcgccggaaacagatacgcctccggacctgtgggaaaggccctgagcgacgcatgtatgggcacaatcgcctccttcctgtctaagtaccaggacatcatcatcgaacaccagaaggtggtgaagggcaaccagaagagactggagagcctgcgggagctggccggcaaggaaaacctggaataccctagcgtgaccctgccacctcagcctcacaccaaggagggcgttgatgcctacaacgaagtgatcgcccgggtgcgaatgtgggtgaacctgaacctgtggcagaagctgaagctaagcagagatgatgccaagcctctgctgagactgaagggattcccttcctttcctctggtcgagagacaggccaacgaagtggactggtgggacatggtgtgtaacgtgaagaagctgatcaacgagaaaaaggaggatggcaaggtgttttggcagaatctggctggctacaagagacaggaagccctgagaccatacctgagcagcgaggaagatcggaagaagggaaagaaattcgctcggtaccagctgggcgacctgctgctgcacctggaaaagaagcacggcgaggactggggaaaggtgtacgacgaggcctgggagcggattgacaagaaagtggaaggcctgagcaagcacatcaagctggaagaggaacggagaagcgaggacgcccagagcaaggccgccctgaccgactggctgcgggctaaggccagcttcgtgatcgagggcctgaaggaggccgacaaggacgagttctgcagatgcgagctgaagctgcagaagtggtacggggacctgcggggaaagcccttcgccatcgaagccgagaacagcatcctggacatcagcggcttcagcaagcagtacaactgtgccttcatctggcagaaggacggcgtgaagaagctgaacctgtacctgatcatcaactacttcaagggcggcaagctgcggttcaagaagatcaaacctgaagccttcgaagccaacagattctacaccgtgatcaacaaaaagagcggcgagatcgtgcccatggaggtgaacttcaacttcgacgaccccaacctgatcatcctgcctctggcctttggcaagagacagggcagagaattcatctggaacgacctgctgtccctggaaaccggcagcctgaagctggccaacggaagagtgatcgagaagacactgtacaacagaagaacccggcaggatgagcctgccctgttcgtggccctgaccttcgagcggcgggaggtcctggactcctccaatatcaaaccaatgaacctgatcggcgtggcaagaggcgaaaacatccccgccgtgatcgccctgaccgaccccgagggctgcccactgagccggtttaaggatagcctgggaaacccaacccacatcctgagaatcggcgagagctataaggagaagcagcggaccatccaggccaagaaggaggtggagcagcggagagccggcggctacagccggaagtacgccagcaaagccaagaatctggcagacgatatggtgagaaacaccgctagagatctgctgtactacgccgtgacccaggatgccatgctgatcttcgccaacctgagccggggcttcggccggcagggcaagcggaccttcatggccgagagacagtacacacggatggaggactggctgaccgccaagctggcctacgagggcctgagcaagacctacctgtccaagacactggcccagtacacctccaagacatgcagcaactgtgggtttaccatcaccagcgccgactacgacagggtgctggagaagctgaagaagacagcaacaggctggatgaccacaattaacggcaaggagctgaaggtggagggccagattacctactacaacagatacaagagacagaacgtagtcaaggacctgtccgtcgagctggatagactgagcgaagaatctgtgaacaacgacatctcctcctggacaaagggcagaagcggagaagctctgagcctcctgaagaaaagattctcccatagacccgtgcaggagaagttcgtgtgcctgaactgcggcttcgagacacacgcagccgagcaagccgccctgaacatcgccagatcctggctgttcctgcggagccaggagtacaagaaataccagacaaacaagacaaccggcaacaccgataagagagccttcgtcgagacctggcagtccttttaccggaagaagcttaaggaggtgtggaaacctgccgtgcggtctggcggatctggcggaggctcctaagcccgagctggtgagcttcgaggacgtggccgtgtacttcagcccccacgagtggggctgcctgaggcccgcccagagggccctgtacagggaggtgatgagggagacctacggcctgctgggcgccctgggcttccccggccccaagcccgccctgatcagctggatggagcaggagagcgaggcctggagccccgccgcccaggaccccgccgagggcgagagcctgggcggcgccctgggatctggctccggcagcggccccaagaaaaagagaaaagtctaagctgccttctgcggggcttgccttctggccatgcccttcttctctcccttgcacctgtacctcttggtctttgaataaagcctgagtaggaaggctagcaaaaaaaaaaaaaaaaaaaaaaaaaaaaaaaaaaaaaaaaaaaaaaaaaaaaaaaaaaaaaaaaaaaaaaaaaaaaaaaa

SEQ ID NO: 15567 - RNA, 9485 nt, synthetic construct
  source 1..9485: mol_type = other RNA
aggaaataagagagaaaagaagagtaagaagaaatataagagccaccatggcccctaagaagaagcgtaaagtgagccggatggaacgcctcgtctacgaggtgcggcagaagtgcagaaacatcgaggacatctgcatctcctgcggatctctgaacgtgaccctggagcacccactgttcatcggcggcatgtgccagaactgtaaaaactgttttctggagtgtgcctatcaatacgacgatgacggctaccagagctactgcaccatctgttgcggcggaagagaggtgctgatgtgtggaaataacaactgctgccggtgcttctgcgtggaatgcgtggacctgctggtgggccccggcgccgcccaggccgctattaaggaagatccttggaactgctacatgtgcggccacaagggcacatacggcctgctgagacggagagaggactggcctagcagactgcagatgttcttcgccaataaccacgaccaggagttcgacccccctaaggtgtaccctcccgtccccgccgagaagagaaagcccatccgggtcctgagcctgttcgatggcatcgccaccggtctgctggtgctgaaggacctgggcatccaggtggataggtacattgcctccgaggtgtgcgaggactccatcaccgtgggaatggtgcgtcatcagggcaagatcatgtacgtgggcgacgtgcggagcgtgacacagaagcatatccaggagtggggccctttcgacctggtgatcggcggcagcccttgcaatgacctgagcatcgtgaacccagcccggaagggcctgtacgagggaaccggcagactgttcttcgagttttacagactgctgcacgacgcccggcctaaggaaggcgacgaccggcccttcttttggctgttcgagaatgtggtggccatgggagtcagcgacaagcgggatattagccggttcctggagagcaaccccgtgatgatcgatgccaaggaagtgagcgccgcccaccgggccagatacttctggggcaatctgcctggcatgaacagacccctggccagcaccgtgaacgacaagctggagctgcaggagtgcctggagcacggccggatcgccaagttcagcaaggtgagaaccatcaccacccgaagcaacagcatcaaacaaggcaaggaccagcactttcctgtgttcatgaacgagaaggaggacatcctgtggtgtaccgagatggagagagtgttcgggttcccagtccactacacagatgtcagcaacatgtctagactggccagacagagactgctgggaagaagctggtccgtccctgtgatcagacacctgttcgcccctctgaaggagtacttcgcctgcgtgagcagcggcaacagcaacgccaacagccggggccccagcttctctagcggcctggtgccactgtccctgagagggagccacatgggccccatggagatctacaaaaccgtgagcgcctggaagcggcagcctgtgcgcgtgctgagcctgtttcggaatatcgataaagtcctgaaaagcctgggattcctggagagcggctctggctccggcggtggcaccctgaagtacgtggaggatgtgacaaacgtggtcagacgggatgtggagaagtggggccccttcgatctggtgtacggcagcacccaacccctgggcagctcttgtgaccggtgccctggctggtacatgtttcagttccaccggatcctgcagtacgccctgccgagacaggagtcccagcggccattcttttggattttcatggacaacttgctgctgaccgaggatgaccaggaaactaccactcggttcctgcagaccgaagccgtgaccctgcaggacgtgagaggccgggactaccagaacgccatgcgggtgtggtccaacatccctggactgaaaagcaagcacgcacctctgacccctaaagaagaggagtacctgcaggcccaggtgcggagcagaagcaagctggacgcccctaaggtggatctgctggtgaagaattgcctcctgcccctgagagagtacttcaagtatttcagccagaatagtctgcccctgggaggcagcggcggcggcgccctggtgacatttgaggacgtcgccgtgcggttcacccaggaggaatgggctctgctggatccttctcagaaaatcctgtaccgggacgtgatgagagagacataccggaatctgacctccgtgggcatcaactgggaatgttgggaccttgaagcctgcttcagaagcctgggaagaaacctgagagtgcaggtggtgaagagaaagtgcgagctgaccaacagcggcccctgcgccgagggcggcccaagcagcggcgcccctcctcccagcggcggcagcccagccggctccccaacctctaccgaggagggcacctctgagtccgccacccccgagagcggccctggcacctccaccgagcccagcgagggcagcgcacccggcagccctgccggcagccccacctccacagaggagggaaccagcaccgagcccagcgaaggcagcgccccaggcaccagcaccgagcctagtgagcaggagattaaacggatcaacaagatcagaagaagacttgtgaaagacagcaacaccaagaaggccggcaagacaggccccatgaaaaccctgctggttagagtgatgacacccgatctgagagagcggctggaaaacctgagaaagaagcctgaaaatatcccccagcccatcagcaatacatctagagccaacctgaataagctgctgaccgattacaccgaaatgaagaaggcgatcctgcatgtgtactgggaagagttccagaaggaccctgtgggcctgatgagccgggtggcccagcctgccagcaagaagatcgatcagaacaagctgaaacctgagatggacgagaagggcaacctgaccaccgccggctttgcctgctctcagtgtggccagcccctgttcgtgtacaagctggagcaggtgtctgagaagggcaaggcttacaccaactacttcggacggtgcaatgtggccgagcacgaaaagctgatcctgctggcccagctgaagcccgagaaggatagcgacgaagccgtgacatatagcctgggaaagtttgggcagagggccctggatttctacagcattcatgtgaccaaggagtccacccaccccgtgaagcccctggcccagatcgccggaaacagatacgcctccggacctgtgggaaaggccctgagcgacgcatgtatgggcacaatcgcctccttcctgtctaagtaccaggacatcatcatcgaacaccagaaggtggtgaagggcaaccagaagagactggagagcctgcgggagctggccggcaaggaaaacctggaataccctagcgtgaccctgccacctcagcctcacaccaaggagggcgttgatgcctacaacgaagtgatcgcccgggtgcgaatgtgggtgaacctgaacctgtggcagaagctgaagctaagcagagatgatgccaagcctctgctgagactgaagggattcccttcctttcctctggtcgagagacaggccaacgaagtggactggtgggacatggtgtgtaacgtgaagaagctgatcaacgagaaaaaggaggatggcaaggtgttttggcagaatctggctggctacaagagacaggaagccctgagaccatacctgagcagcgaggaagatcggaagaagggaaagaaattcgctcggtaccagctgggcgacctgctgctgcacctggaaaagaagcacggcgaggactggggaaaggtgtacgacgaggcctgggagcggattgacaagaaagtggaaggcctgagcaagcacatcaagctggaagaggaacggagaagcgaggacgcccagagcaaggccgccctgaccgactggctgcgggctaaggccagcttcgtgatcgagggcctgaaggaggccgacaaggacgagttctgcagatgcgagctgaagctgcagaagtggtacggggacctgcggggaaagcccttcgccatcgaagccgagaacagcatcctggacatcagcggcttcagcaagcagtacaactgtgccttcatctggcagaaggacggcgtgaagaagctgaacctgtacctgatcatcaactacttcaagggcggcaagctgcggttcaagaagatcaaacctgaagccttcgaagccaacagattctacaccgtgatcaacaaaaagagcggcgagatcgtgcccatggaggtgaacttcaacttcgacgaccccaacctgatcatcctgcctctggcctttggcaagagacagggcagagaattcatctggaacgacctgctgtccctggaaaccggcagcctgaagctggccaacggaagagtgatcgagaagacactgtacaacagaagaacccggcaggatgagcctgccctgttcgtggccctgaccttcgagcggcgggaggtcctggactcctccaatatcaaaccaatgaacctgatcggcgtggcaagaggcgaaaacatccccgccgtgatcgccctgaccgaccccgagggctgcccactgagccggtttaaggatagcctgggaaacccaacccacatcctgagaatcggcgagagctataaggagaagcagcggaccatccaggccaagaaggaggtggagcagcggagagccggcggctacagccggaagtacgccagcaaagccaagaatctggcagacgatatggtgagaaacaccgctagagatctgctgtactacgccgtgacccaggatgccatgctgatcttcgccaacctgagccggggcttcggccggcagggcaagcggaccttcatggccgagagacagtacacacggatggaggactggctgaccgccaagctggcctacgagggcctgagcaagacctacctgtccaagacactggcccagtacacctccaagacatgcagcaactgtgggtttaccatcaccagcgccgactacgacagggtgctggagaagctgaagaagacagcaacaggctggatgaccacaattaacggcaaggagctgaaggtggagggccagattacctactacaacagatacaagagacagaacgtagtcaaggacctgtccgtcgagctggatagactgagcgaagaatctgtgaacaacgacatctcctcctggacaaagggcagaagcggagaagctctgagcctcctgaagaaaagattctcccatagacccgtgcaggagaagttcgtgtgcctgaactgcggcttcgagacacacgcagccgagcaagccgccctgaacatcgccagatcctggctgttcctgcggagccaggagtacaagaaataccagacaaacaagacaaccggcaacaccgataagagagccttcgtcgagacctggcagtccttttaccggaagaagcttaaggaggtgtggaaacctgccgtgcggtctggcggatctggcggaggctccgcccccgcccccgtgagcttcagggacgtggccgtggacttcaccaggcaggagtggcagctgctggcccccgcccagagggccctgtacagggaggtgatgctggagaactacaggaacgtggccagcctgggccaccccgtgagcaagcccaacgtgatcttccagctggagcagagcgaggccccctggatgcccgagggcgaggccgccaggagcctgccccccgactgggaggccaggggcggcccaagcagcggcgcccctcctcccagcggcggcagcccagccggctccccaacctctaccgaggagggcacctctgagtccgccacccccgagagcggccctggcacctccaccgagcccagcgagggcagcgcacccggcagccctgccggcagccccacctccacagaggagggaaccagcaccgagcccagcgaaggcagcgccccaggcaccagcaccgagcctagtgagcaggagattaaacggatcaacaagatcagaagaagacttgtgaaagacagcaacaccaagaaggccggcaagacaggccccatgaaaaccctgctggttagagtgatgacacccgatctgagagagcggctggaaaacctgagaaagaagcctgaaaatatcccccagcccatcagcaatacatctagagccaacctgaataagctgctgaccgattacaccgaaatgaagaaggcgatcctgcatgtgtactgggaagagttccagaaggaccctgtgggcctgatgagccgggtggcccagcctgccagcaagaagatcgatcagaacaagctgaaacctgagatggacgagaagggcaacctgaccaccgccggctttgcctgctctcagtgtggccagcccctgttcgtgtacaagctggagcaggtgtctgagaagggcaaggcttacaccaactacttcggacggtgcaatgtggccgagcacgaaaagctgatcctgctggcccagctgaagcccgagaaggatagcgacgaagccgtgacatatagcctgggaaagtttgggcagagggccctggatttctacagcattcatgtgaccaaggagtccacccaccccgtgaagcccctggcccagatcgccggaaacagatacgcctccggacctgtgggaaaggccctgagcgacgcatgtatgggcacaatcgcctccttcctgtctaagtaccaggacatcatcatcgaacaccagaaggtggtgaagggcaaccagaagagactggagagcctgcgggagctggccggcaaggaaaacctggaataccctagcgtgaccctgccacctcagcctcacaccaaggagggcgttgatgcctacaacgaagtgatcgcccgggtgcgaatgtgggtgaacctgaacctgtggcagaagctgaagctaagcagagatgatgccaagcctctgctgagactgaagggattcccttcctttcctctggtcgagagacaggccaacgaagtggactggtgggacatggtgtgtaacgtgaagaagctgatcaacgagaaaaaggaggatggcaaggtgttttggcagaatctggctggctacaagagacaggaagccctgagaccatacctgagcagcgaggaagatcggaagaagggaaagaaattcgctcggtaccagctgggcgacctgctgctgcacctggaaaagaagcacggcgaggactggggaaaggtgtacgacgaggcctgggagcggattgacaagaaagtggaaggcctgagcaagcacatcaagctggaagaggaacggagaagcgaggacgcccagagcaaggccgccctgaccgactggctgcgggctaaggccagcttcgtgatcgagggcctgaaggaggccgacaaggacgagttctgcagatgcgagctgaagctgcagaagtggtacggggacctgcggggaaagcccttcgccatcgaagccgagaacagcatcctggacatcagcggcttcagcaagcagtacaactgtgccttcatctggcagaaggacggcgtgaagaagctgaacctgtacctgatcatcaactacttcaagggcggcaagctgcggttcaagaagatcaaacctgaagccttcgaagccaacagattctacaccgtgatcaacaaaaagagcggcgagatcgtgcccatggaggtgaacttcaacttcgacgaccccaacctgatcatcctgcctctggcctttggcaagagacagggcagagaattcatctggaacgacctgctgtccctggaaaccggcagcctgaagctggccaacggaagagtgatcgagaagacactgtacaacagaagaacccggcaggatgagcctgccctgttcgtggccctgaccttcgagcggcgggaggtcctggactcctccaatatcaaaccaatgaacctgatcggcgtggcaagaggcgaaaacatccccgccgtgatcgccctgaccgaccccgagggctgcccactgagccggtttaaggatagcctgggaaacccaacccacatcctgagaatcggcgagagctataaggagaagcagcggaccatccaggccaagaaggaggtggagcagcggagagccggcggctacagccggaagtacgccagcaaagccaagaatctggcagacgatatggtgagaaacaccgctagagatctgctgtactacgccgtgacccaggatgccatgctgatcttcgccaacctgagccggggcttcggccggcagggcaagcggaccttcatggccgagagacagtacacacggatggaggactggctgaccgccaagctggcctacgagggcctgagcaagacctacctgtccaagacactggcccagtacacctccaagacatgcagcaactgtgggtttaccatcaccagcgccgactacgacagggtgctggagaagctgaagaagacagcaacaggctggatgaccacaattaacggcaaggagctgaaggtggagggccagattacctactacaacagatacaagagacagaacgtagtcaaggacctgtccgtcgagctggatagactgagcgaagaatctgtgaacaacgacatctcctcctggacaaagggcagaagcggagaagctctgagcctcctgaagaaaagattctcccatagacccgtgcaggagaagttcgtgtgcctgaactgcggcttcgagacacacgcagccgagcaagccgccctgaacatcgccagatcctggctgttcctgcggagccaggagtacaagaaataccagacaaacaagacaaccggcaacaccgataagagagccttcgtcgagacctggcagtccttttaccggaagaagcttaaggaggtgtggaaacctgccgtgcggtctggcggatctggcggaggctcctgcccccgcccccgtgagcttcagggacgtggccgtggacttcaccaggcaggagtggcagctgctggcccccgcccagagggccctgtacagggaggtgatgctggagaactacaggaacgtggccagcctgggccaccccgtgagcaagcccaacgtgatcttccagctggagcagagcgaggccccctggatgcccgagggcgaggccgccaggagcctgccccccgactgggaggccaggggatctggctccggcagcggccccaagaaaaagagaaaagtctaagctgccttctgcggggcttgccttctggccatgcccttcttctctcccttgcacctgtacctcttggtctttgaataaagcctgagtaggaaggctagcaaaaaaaaaaaaaaaaaaaaaaaaaaaaaaaaaaaaaaaaaaaaaaaaaaaaaaaaaaaaaaaaaaaaaaaaaaaaaaaa

SEQ ID NO: 15568 - RNA, 9485 nt, synthetic construct
  source 1..9485: mol_type = other RNA
aggaaataagagagaaaagaagagtaagaagaaatataagagccaccatggcccctaagaagaagcgtaaagtgagccggatggaacgcctcgtctacgaggtgcggcagaagtgcagaaacatcgaggacatctgcatctcctgcggatctctgaacgtgaccctggagcacccactgttcatcggcggcatgtgccagaactgtaaaaactgttttctggagtgtgcctatcaatacgacgatgacggctaccagagctactgcaccatctgttgcggcggaagagaggtgctgatgtgtggaaataacaactgctgccggtgcttctgcgtggaatgcgtggacctgctggtgggccccggcgccgcccaggccgctattaaggaagatccttggaactgctacatgtgcggccacaagggcacatacggcctgctgagacggagagaggactggcctagcagactgcagatgttcttcgccaataaccacgaccaggagttcgacccccctaaggtgtaccctcccgtccccgccgagaagagaaagcccatccgggtcctgagcctgttcgatggcatcgccaccggtctgctggtgctgaaggacctgggcatccaggtggataggtacattgcctccgaggtgtgcgaggactccatcaccgtgggaatggtgcgtcatcagggcaagatcatgtacgtgggcgacgtgcggagcgtgacacagaagcatatccaggagtggggccctttcgacctggtgatcggcggcagcccttgcaatgacctgagcatcgtgaacccagcccggaagggcctgtacgagggaaccggcagactgttcttcgagttttacagactgctgcacgacgcccggcctaaggaaggcgacgaccggcccttcttttggctgttcgagaatgtggtggccatgggagtcagcgacaagcgggatattagccggttcctggagagcaaccccgtgatgatcgatgccaaggaagtgagcgccgcccaccgggccagatacttctggggcaatctgcctggcatgaacagacccctggccagcaccgtgaacgacaagctggagctgcaggagtgcctggagcacggccggatcgccaagttcagcaaggtgagaaccatcaccacccgaagcaacagcatcaaacaaggcaaggaccagcactttcctgtgttcatgaacgagaaggaggacatcctgtggtgtaccgagatggagagagtgttcgggttcccagtccactacacagatgtcagcaacatgtctagactggccagacagagactgctgggaagaagctggtccgtccctgtgatcagacacctgttcgcccctctgaaggagtacttcgcctgcgtgagcagcggcaacagcaacgccaacagccggggccccagcttctctagcggcctggtgccactgtccctgagagggagccacatgggccccatggagatctacaaaaccgtgagcgcctggaagcggcagcctgtgcgcgtgctgagcctgtttcggaatatcgataaagtcctgaaaagcctgggattcctggagagcggctctggctccggcggtggcaccctgaagtacgtggaggatgtgacaaacgtggtcagacgggatgtggagaagtggggccccttcgatctggtgtacggcagcacccaacccctgggcagctcttgtgaccggtgccctggctggtacatgtttcagttccaccggatcctgcagtacgccctgccgagacaggagtcccagcggccattcttttggattttcatggacaacttgctgctgaccgaggatgaccaggaaactaccactcggttcctgcagaccgaagccgtgaccctgcaggacgtgagaggccgggactaccagaacgccatgcgggtgtggtccaacatccctggactgaaaagcaagcacgcacctctgacccctaaagaagaggagtacctgcaggcccaggtgcggagcagaagcaagctggacgcccctaaggtggatctgctggtgaagaattgcctcctgcccctgagagagtacttcaagtatttcagccagaatagtctgcccctgggaggcagcggcggcggcgccctggtgacatttgaggacgtcgccgtgcggttcacccaggaggaatgggctctgctggatccttctcagaaaatcctgtaccgggacgtgatgagagagacataccggaatctgacctccgtgggcatcaactgggaatgttgggaccttgaagcctgcttcagaagcctgggaagaaacctgagagtgcaggtggtgaagagaaagtgcgagctgaccaacagcggcccctgcgccgagggcggcccaagcagcggcgcccctcctcccagcggcggcagcccagccggctccccaacctctaccgaggagggcacctctgagtccgccacccccgagagcggccctggcacctccaccgagcccagcgagggcagcgcacccggcagccctgccggcagccccacctccacagaggagggaaccagcaccgagcccagcgaaggcagcgccccaggcaccagcaccgagcctagtgagcaggagattaaacggatcaacaagatcagaagaagacttgtgaaagacagcaacaccaagaaggccggcaagacaggccccatgaaaaccctgctggttagagtgatgacacccgatctgagagagcggctggaaaacctgagaaagaagcctgaaaatatcccccagcccatcagcaatacatctagagccaacctgaataagctgctgaccgattacaccgaaatgaagaaggcgatcctgcatgtgtactgggaagagttccagaaggaccctgtgggcctgatgagccgggtggcccagcctgccagcaagaagatcgatcagaacaagctgaaacctgagatggacgagaagggcaacctgaccaccgccggctttgcctgctctcagtgtggccagcccctgttcgtgtacaagctggagcaggtgtctgagaagggcaaggcttacaccaactacttcggacggtgcaatgtggccgagcacgaaaagctgatcctgctggcccagctgaagcccgagaaggatagcgacgaagccgtgacatatagcctgggaaagtttgggcagagggccctggatttctacagcattcatgtgaccaaggagtccacccaccccgtgaagcccctggcccagatcgccggaaacagatacgcctccggacctgtgggaaaggccctgagcgacgcatgtatgggcacaatcgcctccttcctgtctaagtaccaggacatcatcatcgaacaccagaaggtggtgaagggcaaccagaagagactggagagcctgcgggagctggccggcaaggaaaacctggaataccctagcgtgaccctgccacctcagcctcacaccaaggagggcgttgatgcctacaacgaagtgatcgcccgggtgcgaatgtgggtgaacctgaacctgtggcagaagctgaagctaagcagagatgatgccaagcctctgctgagactgaagggattcccttcctttcctctggtcgagagacaggccaacgaagtggactggtgggacatggtgtgtaacgtgaagaagctgatcaacgagaaaaaggaggatggcaaggtgttttggcagaatctggctggctacaagagacaggaagccctgagaccatacctgagcagcgaggaagatcggaagaagggaaagaaattcgctcggtaccagctgggcgacctgctgctgcacctggaaaagaagcacggcgaggactggggaaaggtgtacgacgaggcctgggagcggattgacaagaaagtggaaggcctgagcaagcacatcaagctggaagaggaacggagaagcgaggacgcccagagcaaggccgccctgaccgactggctgcgggctaaggccagcttcgtgatcgagggcctgaaggaggccgacaaggacgagttctgcagatgcgagctgaagctgcagaagtggtacggggacctgcggggaaagcccttcgccatcgaagccgagaacagcatcctggacatcagcggcttcagcaagcagtacaactgtgccttcatctggcagaaggacggcgtgaagaagctgaacctgtacctgatcatcaactacttcaagggcggcaagctgcggttcaagaagatcaaacctgaagccttcgaagccaacagattctacaccgtgatcaacaaaaagagcggcgagatcgtgcccatggaggtgaacttcaacttcgacgaccccaacctgatcatcctgcctctggcctttggcaagagacagggcagagaattcatctggaacgacctgctgtccctggaaaccggcagcctgaagctggccaacggaagagtgatcgagaagacactgtacaacagaagaacccggcaggatgagcctgccctgttcgtggccctgaccttcgagcggcgggaggtcctggactcctccaatatcaaaccaatgaacctgatcggcgtggcaagaggcgaaaacatccccgccgtgatcgccctgaccgaccccgagggctgcccactgagccggtttaaggatagcctgggaaacccaacccacatcctgagaatcggcgagagctataaggagaagcagcggaccatccaggccaagaaggaggtggagcagcggagagccggcggctacagccggaagtacgccagcaaagccaagaatctggcagacgatatggtgagaaacaccgctagagatctgctgtactacgccgtgacccaggatgccatgctgatcttcgccaacctgagccggggcttcggccggcagggcaagcggaccttcatggccgagagacagtacacacggatggaggactggctgaccgccaagctggcctacgagggcctgagcaagacctacctgtccaagacactggcccagtacacctccaagacatgcagcaactgtgggtttaccatcaccagcgccgactacgacagggtgctggagaagctgaagaagacagcaacaggctggatgaccacaattaacggcaaggagctgaaggtggagggccagattacctactacaacagatacaagagacagaacgtagtcaaggacctgtccgtcgagctggatagactgagcgaagaatctgtgaacaacgacatctcctcctggacaaagggcagaagcggagaagctctgagcctcctgaagaaaagattctcccatagacccgtgcaggagaagttcgtgtgcctgaactgcggcttcgagacacacgcagccgagcaagccgccctgaacatcgccagatcctggctgttcctgcggagccaggagtacaagaaataccagacaaacaagacaaccggcaacaccgataagagagccttcgtcgagacctggcagtccttttaccggaagaagcttaaggaggtgtggaaacctgccgtgcggtctggcggatctggcggaggctccagcgtgatgttcaacgacatcagcatcgtgttcagccaggaggagtgggagtacctggacctggagcagaaggacctgtacaaggacgtgatgctggagaactacggcaacctggtgagcctgggctgcttcatcgccaagcccgacgtgatcagcctgctggagcagggcaaggagccctggaaggtgatcaggaagggcaggaggggctaccccgacctggagaccaggtacgagaccaagggcggcccaagcagcggcgcccctcctcccagcggcggcagcccagccggctccccaacctctaccgaggagggcacctctgagtccgccacccccgagagcggccctggcacctccaccgagcccagcgagggcagcgcacccggcagccctgccggcagccccacctccacagaggagggaaccagcaccgagcccagcgaaggcagcgccccaggcaccagcaccgagcctagtgagcaggagattaaacggatcaacaagatcagaagaagacttgtgaaagacagcaacaccaagaaggccggcaagacaggccccatgaaaaccctgctggttagagtgatgacacccgatctgagagagcggctggaaaacctgagaaagaagcctgaaaatatcccccagcccatcagcaatacatctagagccaacctgaataagctgctgaccgattacaccgaaatgaagaaggcgatcctgcatgtgtactgggaagagttccagaaggaccctgtgggcctgatgagccgggtggcccagcctgccagcaagaagatcgatcagaacaagctgaaacctgagatggacgagaagggcaacctgaccaccgccggctttgcctgctctcagtgtggccagcccctgttcgtgtacaagctggagcaggtgtctgagaagggcaaggcttacaccaactacttcggacggtgcaatgtggccgagcacgaaaagctgatcctgctggcccagctgaagcccgagaaggatagcgacgaagccgtgacatatagcctgggaaagtttgggcagagggccctggatttctacagcattcatgtgaccaaggagtccacccaccccgtgaagcccctggcccagatcgccggaaacagatacgcctccggacctgtgggaaaggccctgagcgacgcatgtatgggcacaatcgcctccttcctgtctaagtaccaggacatcatcatcgaacaccagaaggtggtgaagggcaaccagaagagactggagagcctgcgggagctggccggcaaggaaaacctggaataccctagcgtgaccctgccacctcagcctcacaccaaggagggcgttgatgcctacaacgaagtgatcgcccgggtgcgaatgtgggtgaacctgaacctgtggcagaagctgaagctaagcagagatgatgccaagcctctgctgagactgaagggattcccttcctttcctctggtcgagagacaggccaacgaagtggactggtgggacatggtgtgtaacgtgaagaagctgatcaacgagaaaaaggaggatggcaaggtgttttggcagaatctggctggctacaagagacaggaagccctgagaccatacctgagcagcgaggaagatcggaagaagggaaagaaattcgctcggtaccagctgggcgacctgctgctgcacctggaaaagaagcacggcgaggactggggaaaggtgtacgacgaggcctgggagcggattgacaagaaagtggaaggcctgagcaagcacatcaagctggaagaggaacggagaagcgaggacgcccagagcaaggccgccctgaccgactggctgcgggctaaggccagcttcgtgatcgagggcctgaaggaggccgacaaggacgagttctgcagatgcgagctgaagctgcagaagtggtacggggacctgcggggaaagcccttcgccatcgaagccgagaacagcatcctggacatcagcggcttcagcaagcagtacaactgtgccttcatctggcagaaggacggcgtgaagaagctgaacctgtacctgatcatcaactacttcaagggcggcaagctgcggttcaagaagatcaaacctgaagccttcgaagccaacagattctacaccgtgatcaacaaaaagagcggcgagatcgtgcccatggaggtgaacttcaacttcgacgaccccaacctgatcatcctgcctctggcctttggcaagagacagggcagagaattcatctggaacgacctgctgtccctggaaaccggcagcctgaagctggccaacggaagagtgatcgagaagacactgtacaacagaagaacccggcaggatgagcctgccctgttcgtggccctgaccttcgagcggcgggaggtcctggactcctccaatatcaaaccaatgaacctgatcggcgtggcaagaggcgaaaacatccccgccgtgatcgccctgaccgaccccgagggctgcccactgagccggtttaaggatagcctgggaaacccaacccacatcctgagaatcggcgagagctataaggagaagcagcggaccatccaggccaagaaggaggtggagcagcggagagccggcggctacagccggaagtacgccagcaaagccaagaatctggcagacgatatggtgagaaacaccgctagagatctgctgtactacgccgtgacccaggatgccatgctgatcttcgccaacctgagccggggcttcggccggcagggcaagcggaccttcatggccgagagacagtacacacggatggaggactggctgaccgccaagctggcctacgagggcctgagcaagacctacctgtccaagacactggcccagtacacctccaagacatgcagcaactgtgggtttaccatcaccagcgccgactacgacagggtgctggagaagctgaagaagacagcaacaggctggatgaccacaattaacggcaaggagctgaaggtggagggccagattacctactacaacagatacaagagacagaacgtagtcaaggacctgtccgtcgagctggatagactgagcgaagaatctgtgaacaacgacatctcctcctggacaaagggcagaagcggagaagctctgagcctcctgaagaaaagattctcccatagacccgtgcaggagaagttcgtgtgcctgaactgcggcttcgagacacacgcagccgagcaagccgccctgaacatcgccagatcctggctgttcctgcggagccaggagtacaagaaataccagacaaacaagacaaccggcaacaccgataagagagccttcgtcgagacctggcagtccttttaccggaagaagcttaaggaggtgtggaaacctgccgtgcggtctggcggatctggcggaggctcctagcgtgatgttcaacgacatcagcatcgtgttcagccaggaggagtgggagtacctggacctggagcagaaggacctgtacaaggacgtgatgctggagaactacggcaacctggtgagcctgggctgcttcatcgccaagcccgacgtgatcagcctgctggagcagggcaaggagccctggaaggtgatcaggaagggcaggaggggctaccccgacctggagaccaggtacgagaccaagggatctggctccggcagcggccccaagaaaaagagaaaagtctaagctgccttctgcggggcttgccttctggccatgcccttcttctctcccttgcacctgtacctcttggtctttgaataaagcctgagtaggaaggctagcaaaaaaaaaaaaaaaaaaaaaaaaaaaaaaaaaaaaaaaaaaaaaaaaaaaaaaaaaaaaaaaaaaaaaaaaaaaaaaaa

SEQ ID NO: 15569 - RNA, 9485 nt, synthetic construct
  source 1..9485: mol_type = other RNA
aggaaataagagagaaaagaagagtaagaagaaatataagagccaccatggcccctaagaagaagcgtaaagtgagccggatggaacgcctcgtctacgaggtgcggcagaagtgcagaaacatcgaggacatctgcatctcctgcggatctctgaacgtgaccctggagcacccactgttcatcggcggcatgtgccagaactgtaaaaactgttttctggagtgtgcctatcaatacgacgatgacggctaccagagctactgcaccatctgttgcggcggaagagaggtgctgatgtgtggaaataacaactgctgccggtgcttctgcgtggaatgcgtggacctgctggtgggccccggcgccgcccaggccgctattaaggaagatccttggaactgctacatgtgcggccacaagggcacatacggcctgctgagacggagagaggactggcctagcagactgcagatgttcttcgccaataaccacgaccaggagttcgacccccctaaggtgtaccctcccgtccccgccgagaagagaaagcccatccgggtcctgagcctgttcgatggcatcgccaccggtctgctggtgctgaaggacctgggcatccaggtggataggtacattgcctccgaggtgtgcgaggactccatcaccgtgggaatggtgcgtcatcagggcaagatcatgtacgtgggcgacgtgcggagcgtgacacagaagcatatccaggagtggggccctttcgacctggtgatcggcggcagcccttgcaatgacctgagcatcgtgaacccagcccggaagggcctgtacgagggaaccggcagactgttcttcgagttttacagactgctgcacgacgcccggcctaaggaaggcgacgaccggcccttcttttggctgttcgagaatgtggtggccatgggagtcagcgacaagcgggatattagccggttcctggagagcaaccccgtgatgatcgatgccaaggaagtgagcgccgcccaccgggccagatacttctggggcaatctgcctggcatgaacagacccctggccagcaccgtgaacgacaagctggagctgcaggagtgcctggagcacggccggatcgccaagttcagcaaggtgagaaccatcaccacccgaagcaacagcatcaaacaaggcaaggaccagcactttcctgtgttcatgaacgagaaggaggacatcctgtggtgtaccgagatggagagagtgttcgggttcccagtccactacacagatgtcagcaacatgtctagactggccagacagagactgctgggaagaagctggtccgtccctgtgatcagacacctgttcgcccctctgaaggagtacttcgcctgcgtgagcagcggcaacagcaacgccaacagccggggccccagcttctctagcggcctggtgccactgtccctgagagggagccacatgggccccatggagatctacaaaaccgtgagcgcctggaagcggcagcctgtgcgcgtgctgagcctgtttcggaatatcgataaagtcctgaaaagcctgggattcctggagagcggctctggctccggcggtggcaccctgaagtacgtggaggatgtgacaaacgtggtcagacgggatgtggagaagtggggccccttcgatctggtgtacggcagcacccaacccctgggcagctcttgtgaccggtgccctggctggtacatgtttcagttccaccggatcctgcagtacgccctgccgagacaggagtcccagcggccattcttttggattttcatggacaacttgctgctgaccgaggatgaccaggaaactaccactcggttcctgcagaccgaagccgtgaccctgcaggacgtgagaggccgggactaccagaacgccatgcgggtgtggtccaacatccctggactgaaaagcaagcacgcacctctgacccctaaagaagaggagtacctgcaggcccaggtgcggagcagaagcaagctggacgcccctaaggtggatctgctggtgaagaattgcctcctgcccctgagagagtacttcaagtatttcagccagaatagtctgcccctgggaggcagcggcggcggcgccctggtgacatttgaggacgtcgccgtgcggttcacccaggaggaatgggctctgctggatccttctcagaaaatcctgtaccgggacgtgatgagagagacataccggaatctgacctccgtgggcatcaactgggaatgttgggaccttgaagcctgcttcagaagcctgggaagaaacctgagagtgcaggtggtgaagagaaagtgcgagctgaccaacagcggcccctgcgccgagggcggcccaagcagcggcgcccctcctcccagcggcggcagcccagccggctccccaacctctaccgaggagggcacctctgagtccgccacccccgagagcggccctggcacctccaccgagcccagcgagggcagcgcacccggcagccctgccggcagccccacctccacagaggagggaaccagcaccgagcccagcgaaggcagcgccccaggcaccagcaccgagcctagtgagcaggagattaaacggatcaacaagatcagaagaagacttgtgaaagacagcaacaccaagaaggccggcaagacaggccccatgaaaaccctgctggttagagtgatgacacccgatctgagagagcggctggaaaacctgagaaagaagcctgaaaatatcccccagcccatcagcaatacatctagagccaacctgaataagctgctgaccgattacaccgaaatgaagaaggcgatcctgcatgtgtactgggaagagttccagaaggaccctgtgggcctgatgagccgggtggcccagcctgccagcaagaagatcgatcagaacaagctgaaacctgagatggacgagaagggcaacctgaccaccgccggctttgcctgctctcagtgtggccagcccctgttcgtgtacaagctggagcaggtgtctgagaagggcaaggcttacaccaactacttcggacggtgcaatgtggccgagcacgaaaagctgatcctgctggcccagctgaagcccgagaaggatagcgacgaagccgtgacatatagcctgggaaagtttgggcagagggccctggatttctacagcattcatgtgaccaaggagtccacccaccccgtgaagcccctggcccagatcgccggaaacagatacgcctccggacctgtgggaaaggccctgagcgacgcatgtatgggcacaatcgcctccttcctgtctaagtaccaggacatcatcatcgaacaccagaaggtggtgaagggcaaccagaagagactggagagcctgcgggagctggccggcaaggaaaacctggaataccctagcgtgaccctgccacctcagcctcacaccaaggagggcgttgatgcctacaacgaagtgatcgcccgggtgcgaatgtgggtgaacctgaacctgtggcagaagctgaagctaagcagagatgatgccaagcctctgctgagactgaagggattcccttcctttcctctggtcgagagacaggccaacgaagtggactggtgggacatggtgtgtaacgtgaagaagctgatcaacgagaaaaaggaggatggcaaggtgttttggcagaatctggctggctacaagagacaggaagccctgagaccatacctgagcagcgaggaagatcggaagaagggaaagaaattcgctcggtaccagctgggcgacctgctgctgcacctggaaaagaagcacggcgaggactggggaaaggtgtacgacgaggcctgggagcggattgacaagaaagtggaaggcctgagcaagcacatcaagctggaagaggaacggagaagcgaggacgcccagagcaaggccgccctgaccgactggctgcgggctaaggccagcttcgtgatcgagggcctgaaggaggccgacaaggacgagttctgcagatgcgagctgaagctgcagaagtggtacggggacctgcggggaaagcccttcgccatcgaagccgagaacagcatcctggacatcagcggcttcagcaagcagtacaactgtgccttcatctggcagaaggacggcgtgaagaagctgaacctgtacctgatcatcaactacttcaagggcggcaagctgcggttcaagaagatcaaacctgaagccttcgaagccaacagattctacaccgtgatcaacaaaaagagcggcgagatcgtgcccatggaggtgaacttcaacttcgacgaccccaacctgatcatcctgcctctggcctttggcaagagacagggcagagaattcatctggaacgacctgctgtccctggaaaccggcagcctgaagctggccaacggaagagtgatcgagaagacactgtacaacagaagaacccggcaggatgagcctgccctgttcgtggccctgaccttcgagcggcgggaggtcctggactcctccaatatcaaaccaatgaacctgatcggcgtggcaagaggcgaaaacatccccgccgtgatcgccctgaccgaccccgagggctgcccactgagccggtttaaggatagcctgggaaacccaacccacatcctgagaatcggcgagagctataaggagaagcagcggaccatccaggccaagaaggaggtggagcagcggagagccggcggctacagccggaagtacgccagcaaagccaagaatctggcagacgatatggtgagaaacaccgctagagatctgctgtactacgccgtgacccaggatgccatgctgatcttcgccaacctgagccggggcttcggccggcagggcaagcggaccttcatggccgagagacagtacacacggatggaggactggctgaccgccaagctggcctacgagggcctgagcaagacctacctgtccaagacactggcccagtacacctccaagacatgcagcaactgtgggtttaccatcaccagcgccgactacgacagggtgctggagaagctgaagaagacagcaacaggctggatgaccacaattaacggcaaggagctgaaggtggagggccagattacctactacaacagatacaagagacagaacgtagtcaaggacctgtccgtcgagctggatagactgagcgaagaatctgtgaacaacgacatctcctcctggacaaagggcagaagcggagaagctctgagcctcctgaagaaaagattctcccatagacccgtgcaggagaagttcgtgtgcctgaactgcggcttcgagacacacgcagccgagcaagccgccctgaacatcgccagatcctggctgttcctgcggagccaggagtacaagaaataccagacaaacaagacaaccggcaacaccgataagagagccttcgtcgagacctggcagtccttttaccggaagaagcttaaggaggtgtggaaacctgccgtgcggtctggcggatctggcggaggctccatgatcaactaccagacccccgtgagcttcagggacgtggtggtgggcttcacccaggaggagtggcacaggctgaaccccacccagagggccctgtacagggacgtgatgctggagacctacagcaacctggtgagcgtgggctacgagggcaccaagcccgacgtgatcctgaggctggagcaggaggaggccccctggatcggcgaggccgcctgcctgggctgccactgctggggcaagggcggcccaagcagcggcgcccctcctcccagcggcggcagcccagccggctccccaacctctaccgaggagggcacctctgagtccgccacccccgagagcggccctggcacctccaccgagcccagcgagggcagcgcacccggcagccctgccggcagccccacctccacagaggagggaaccagcaccgagcccagcgaaggcagcgccccaggcaccagcaccgagcctagtgagcaggagattaaacggatcaacaagatcagaagaagacttgtgaaagacagcaacaccaagaaggccggcaagacaggccccatgaaaaccctgctggttagagtgatgacacccgatctgagagagcggctggaaaacctgagaaagaagcctgaaaatatcccccagcccatcagcaatacatctagagccaacctgaataagctgctgaccgattacaccgaaatgaagaaggcgatcctgcatgtgtactgggaagagttccagaaggaccctgtgggcctgatgagccgggtggcccagcctgccagcaagaagatcgatcagaacaagctgaaacctgagatggacgagaagggcaacctgaccaccgccggctttgcctgctctcagtgtggccagcccctgttcgtgtacaagctggagcaggtgtctgagaagggcaaggcttacaccaactacttcggacggtgcaatgtggccgagcacgaaaagctgatcctgctggcccagctgaagcccgagaaggatagcgacgaagccgtgacatatagcctgggaaagtttgggcagagggccctggatttctacagcattcatgtgaccaaggagtccacccaccccgtgaagcccctggcccagatcgccggaaacagatacgcctccggacctgtgggaaaggccctgagcgacgcatgtatgggcacaatcgcctccttcctgtctaagtaccaggacatcatcatcgaacaccagaaggtggtgaagggcaaccagaagagactggagagcctgcgggagctggccggcaaggaaaacctggaataccctagcgtgaccctgccacctcagcctcacaccaaggagggcgttgatgcctacaacgaagtgatcgcccgggtgcgaatgtgggtgaacctgaacctgtggcagaagctgaagctaagcagagatgatgccaagcctctgctgagactgaagggattcccttcctttcctctggtcgagagacaggccaacgaagtggactggtgggacatggtgtgtaacgtgaagaagctgatcaacgagaaaaaggaggatggcaaggtgttttggcagaatctggctggctacaagagacaggaagccctgagaccatacctgagcagcgaggaagatcggaagaagggaaagaaattcgctcggtaccagctgggcgacctgctgctgcacctggaaaagaagcacggcgaggactggggaaaggtgtacgacgaggcctgggagcggattgacaagaaagtggaaggcctgagcaagcacatcaagctggaagaggaacggagaagcgaggacgcccagagcaaggccgccctgaccgactggctgcgggctaaggccagcttcgtgatcgagggcctgaaggaggccgacaaggacgagttctgcagatgcgagctgaagctgcagaagtggtacggggacctgcggggaaagcccttcgccatcgaagccgagaacagcatcctggacatcagcggcttcagcaagcagtacaactgtgccttcatctggcagaaggacggcgtgaagaagctgaacctgtacctgatcatcaactacttcaagggcggcaagctgcggttcaagaagatcaaacctgaagccttcgaagccaacagattctacaccgtgatcaacaaaaagagcggcgagatcgtgcccatggaggtgaacttcaacttcgacgaccccaacctgatcatcctgcctctggcctttggcaagagacagggcagagaattcatctggaacgacctgctgtccctggaaaccggcagcctgaagctggccaacggaagagtgatcgagaagacactgtacaacagaagaacccggcaggatgagcctgccctgttcgtggccctgaccttcgagcggcgggaggtcctggactcctccaatatcaaaccaatgaacctgatcggcgtggcaagaggcgaaaacatccccgccgtgatcgccctgaccgaccccgagggctgcccactgagccggtttaaggatagcctgggaaacccaacccacatcctgagaatcggcgagagctataaggagaagcagcggaccatccaggccaagaaggaggtggagcagcggagagccggcggctacagccggaagtacgccagcaaagccaagaatctggcagacgatatggtgagaaacaccgctagagatctgctgtactacgccgtgacccaggatgccatgctgatcttcgccaacctgagccggggcttcggccggcagggcaagcggaccttcatggccgagagacagtacacacggatggaggactggctgaccgccaagctggcctacgagggcctgagcaagacctacctgtccaagacactggcccagtacacctccaagacatgcagcaactgtgggtttaccatcaccagcgccgactacgacagggtgctggagaagctgaagaagacagcaacaggctggatgaccacaattaacggcaaggagctgaaggtggagggccagattacctactacaacagatacaagagacagaacgtagtcaaggacctgtccgtcgagctggatagactgagcgaagaatctgtgaacaacgacatctcctcctggacaaagggcagaagcggagaagctctgagcctcctgaagaaaagattctcccatagacccgtgcaggagaagttcgtgtgcctgaactgcggcttcgagacacacgcagccgagcaagccgccctgaacatcgccagatcctggctgttcctgcggagccaggagtacaagaaataccagacaaacaagacaaccggcaacaccgataagagagccttcgtcgagacctggcagtccttttaccggaagaagcttaaggaggtgtggaaacctgccgtgcggtctggcggatctggcggaggctcctatgatcaactaccagacccccgtgagcttcagggacgtggtggtgggcttcacccaggaggagtggcacaggctgaaccccacccagagggccctgtacagggacgtgatgctggagacctacagcaacctggtgagcgtgggctacgagggcaccaagcccgacgtgatcctgaggctggagcaggaggaggccccctggatcggcgaggccgcctgcctgggctgccactgctggggcaagggatctggctccggcagcggccccaagaaaaagagaaaagtctaagctgccttctgcggggcttgccttctggccatgcccttcttctctcccttgcacctgtacctcttggtctttgaataaagcctgagtaggaaggctagcaaaaaaaaaaaaaaaaaaaaaaaaaaaaaaaaaaaaaaaaaaaaaaaaaaaaaaaaaaaaaaaaaaaaaaaaaaaaaaaa

SEQ ID NO: 15570 - RNA, 9485 nt, synthetic construct
  source 1..9485: mol_type = other RNA
aggaaataagagagaaaagaagagtaagaagaaatataagagccaccatggcccctaagaagaagcgtaaagtgagccggatggaacgcctcgtctacgaggtgcggcagaagtgcagaaacatcgaggacatctgcatctcctgcggatctctgaacgtgaccctggagcacccactgttcatcggcggcatgtgccagaactgtaaaaactgttttctggagtgtgcctatcaatacgacgatgacggctaccagagctactgcaccatctgttgcggcggaagagaggtgctgatgtgtggaaataacaactgctgccggtgcttctgcgtggaatgcgtggacctgctggtgggccccggcgccgcccaggccgctattaaggaagatccttggaactgctacatgtgcggccacaagggcacatacggcctgctgagacggagagaggactggcctagcagactgcagatgttcttcgccaataaccacgaccaggagttcgacccccctaaggtgtaccctcccgtccccgccgagaagagaaagcccatccgggtcctgagcctgttcgatggcatcgccaccggtctgctggtgctgaaggacctgggcatccaggtggataggtacattgcctccgaggtgtgcgaggactccatcaccgtgggaatggtgcgtcatcagggcaagatcatgtacgtgggcgacgtgcggagcgtgacacagaagcatatccaggagtggggccctttcgacctggtgatcggcggcagcccttgcaatgacctgagcatcgtgaacccagcccggaagggcctgtacgagggaaccggcagactgttcttcgagttttacagactgctgcacgacgcccggcctaaggaaggcgacgaccggcccttcttttggctgttcgagaatgtggtggccatgggagtcagcgacaagcgggatattagccggttcctggagagcaaccccgtgatgatcgatgccaaggaagtgagcgccgcccaccgggccagatacttctggggcaatctgcctggcatgaacagacccctggccagcaccgtgaacgacaagctggagctgcaggagtgcctggagcacggccggatcgccaagttcagcaaggtgagaaccatcaccacccgaagcaacagcatcaaacaaggcaaggaccagcactttcctgtgttcatgaacgagaaggaggacatcctgtggtgtaccgagatggagagagtgttcgggttcccagtccactacacagatgtcagcaacatgtctagactggccagacagagactgctgggaagaagctggtccgtccctgtgatcagacacctgttcgcccctctgaaggagtacttcgcctgcgtgagcagcggcaacagcaacgccaacagccggggccccagcttctctagcggcctggtgccactgtccctgagagggagccacatgggccccatggagatctacaaaaccgtgagcgcctggaagcggcagcctgtgcgcgtgctgagcctgtttcggaatatcgataaagtcctgaaaagcctgggattcctggagagcggctctggctccggcggtggcaccctgaagtacgtggaggatgtgacaaacgtggtcagacgggatgtggagaagtggggccccttcgatctggtgtacggcagcacccaacccctgggcagctcttgtgaccggtgccctggctggtacatgtttcagttccaccggatcctgcagtacgccctgccgagacaggagtcccagcggccattcttttggattttcatggacaacttgctgctgaccgaggatgaccaggaaactaccactcggttcctgcagaccgaagccgtgaccctgcaggacgtgagaggccgggactaccagaacgccatgcgggtgtggtccaacatccctggactgaaaagcaagcacgcacctctgacccctaaagaagaggagtacctgcaggcccaggtgcggagcagaagcaagctggacgcccctaaggtggatctgctggtgaagaattgcctcctgcccctgagagagtacttcaagtatttcagccagaatagtctgcccctgggaggcagcggcggcggcgccctggtgacatttgaggacgtcgccgtgcggttcacccaggaggaatgggctctgctggatccttctcagaaaatcctgtaccgggacgtgatgagagagacataccggaatctgacctccgtgggcatcaactgggaatgttgggaccttgaagcctgcttcagaagcctgggaagaaacctgagagtgcaggtggtgaagagaaagtgcgagctgaccaacagcggcccctgcgccgagggcggcccaagcagcggcgcccctcctcccagcggcggcagcccagccggctccccaacctctaccgaggagggcacctctgagtccgccacccccgagagcggccctggcacctccaccgagcccagcgagggcagcgcacccggcagccctgccggcagccccacctccacagaggagggaaccagcaccgagcccagcgaaggcagcgccccaggcaccagcaccgagcctagtgagcaggagattaaacggatcaacaagatcagaagaagacttgtgaaagacagcaacaccaagaaggccggcaagacaggccccatgaaaaccctgctggttagagtgatgacacccgatctgagagagcggctggaaaacctgagaaagaagcctgaaaatatcccccagcccatcagcaatacatctagagccaacctgaataagctgctgaccgattacaccgaaatgaagaaggcgatcctgcatgtgtactgggaagagttccagaaggaccctgtgggcctgatgagccgggtggcccagcctgccagcaagaagatcgatcagaacaagctgaaacctgagatggacgagaagggcaacctgaccaccgccggctttgcctgctctcagtgtggccagcccctgttcgtgtacaagctggagcaggtgtctgagaagggcaaggcttacaccaactacttcggacggtgcaatgtggccgagcacgaaaagctgatcctgctggcccagctgaagcccgagaaggatagcgacgaagccgtgacatatagcctgggaaagtttgggcagagggccctggatttctacagcattcatgtgaccaaggagtccacccaccccgtgaagcccctggcccagatcgccggaaacagatacgcctccggacctgtgggaaaggccctgagcgacgcatgtatgggcacaatcgcctccttcctgtctaagtaccaggacatcatcatcgaacaccagaaggtggtgaagggcaaccagaagagactggagagcctgcgggagctggccggcaaggaaaacctggaataccctagcgtgaccctgccacctcagcctcacaccaaggagggcgttgatgcctacaacgaagtgatcgcccgggtgcgaatgtgggtgaacctgaacctgtggcagaagctgaagctaagcagagatgatgccaagcctctgctgagactgaagggattcccttcctttcctctggtcgagagacaggccaacgaagtggactggtgggacatggtgtgtaacgtgaagaagctgatcaacgagaaaaaggaggatggcaaggtgttttggcagaatctggctggctacaagagacaggaagccctgagaccatacctgagcagcgaggaagatcggaagaagggaaagaaattcgctcggtaccagctgggcgacctgctgctgcacctggaaaagaagcacggcgaggactggggaaaggtgtacgacgaggcctgggagcggattgacaagaaagtggaaggcctgagcaagcacatcaagctggaagaggaacggagaagcgaggacgcccagagcaaggccgccctgaccgactggctgcgggctaaggccagcttcgtgatcgagggcctgaaggaggccgacaaggacgagttctgcagatgcgagctgaagctgcagaagtggtacggggacctgcggggaaagcccttcgccatcgaagccgagaacagcatcctggacatcagcggcttcagcaagcagtacaactgtgccttcatctggcagaaggacggcgtgaagaagctgaacctgtacctgatcatcaactacttcaagggcggcaagctgcggttcaagaagatcaaacctgaagccttcgaagccaacagattctacaccgtgatcaacaaaaagagcggcgagatcgtgcccatggaggtgaacttcaacttcgacgaccccaacctgatcatcctgcctctggcctttggcaagagacagggcagagaattcatctggaacgacctgctgtccctggaaaccggcagcctgaagctggccaacggaagagtgatcgagaagacactgtacaacagaagaacccggcaggatgagcctgccctgttcgtggccctgaccttcgagcggcgggaggtcctggactcctccaatatcaaaccaatgaacctgatcggcgtggcaagaggcgaaaacatccccgccgtgatcgccctgaccgaccccgagggctgcccactgagccggtttaaggatagcctgggaaacccaacccacatcctgagaatcggcgagagctataaggagaagcagcggaccatccaggccaagaaggaggtggagcagcggagagccggcggctacagccggaagtacgccagcaaagccaagaatctggcagacgatatggtgagaaacaccgctagagatctgctgtactacgccgtgacccaggatgccatgctgatcttcgccaacctgagccggggcttcggccggcagggcaagcggaccttcatggccgagagacagtacacacggatggaggactggctgaccgccaagctggcctacgagggcctgagcaagacctacctgtccaagacactggcccagtacacctccaagacatgcagcaactgtgggtttaccatcaccagcgccgactacgacagggtgctggagaagctgaagaagacagcaacaggctggatgaccacaattaacggcaaggagctgaaggtggagggccagattacctactacaacagatacaagagacagaacgtagtcaaggacctgtccgtcgagctggatagactgagcgaagaatctgtgaacaacgacatctcctcctggacaaagggcagaagcggagaagctctgagcctcctgaagaaaagattctcccatagacccgtgcaggagaagttcgtgtgcctgaactgcggcttcgagacacacgcagccgagcaagccgccctgaacatcgccagatcctggctgttcctgcggagccaggagtacaagaaataccagacaaacaagacaaccggcaacaccgataagagagccttcgtcgagacctggcagtccttttaccggaagaagcttaaggaggtgtggaaacctgccgtgcggtctggcggatctggcggaggctccggcctgctgagcttcgaggacgtggccctgtacttcaccagggaggagtgggacaccctggactgggcccagaaggccctgtacagggacgtgatgctggacaactacaggcacatcgtgagcctgggcttccccttccccaagcccgaggtgatctgccagctggagcagtgggaggagccctggatcctggacctgcccagggccggcaccaggaaggccagcggcagcgcctgccccgacggcggcccaagcagcggcgcccctcctcccagcggcggcagcccagccggctccccaacctctaccgaggagggcacctctgagtccgccacccccgagagcggccctggcacctccaccgagcccagcgagggcagcgcacccggcagccctgccggcagccccacctccacagaggagggaaccagcaccgagcccagcgaaggcagcgccccaggcaccagcaccgagcctagtgagcaggagattaaacggatcaacaagatcagaagaagacttgtgaaagacagcaacaccaagaaggccggcaagacaggccccatgaaaaccctgctggttagagtgatgacacccgatctgagagagcggctggaaaacctgagaaagaagcctgaaaatatcccccagcccatcagcaatacatctagagccaacctgaataagctgctgaccgattacaccgaaatgaagaaggcgatcctgcatgtgtactgggaagagttccagaaggaccctgtgggcctgatgagccgggtggcccagcctgccagcaagaagatcgatcagaacaagctgaaacctgagatggacgagaagggcaacctgaccaccgccggctttgcctgctctcagtgtggccagcccctgttcgtgtacaagctggagcaggtgtctgagaagggcaaggcttacaccaactacttcggacggtgcaatgtggccgagcacgaaaagctgatcctgctggcccagctgaagcccgagaaggatagcgacgaagccgtgacatatagcctgggaaagtttgggcagagggccctggatttctacagcattcatgtgaccaaggagtccacccaccccgtgaagcccctggcccagatcgccggaaacagatacgcctccggacctgtgggaaaggccctgagcgacgcatgtatgggcacaatcgcctccttcctgtctaagtaccaggacatcatcatcgaacaccagaaggtggtgaagggcaaccagaagagactggagagcctgcgggagctggccggcaaggaaaacctggaataccctagcgtgaccctgccacctcagcctcacaccaaggagggcgttgatgcctacaacgaagtgatcgcccgggtgcgaatgtgggtgaacctgaacctgtggcagaagctgaagctaagcagagatgatgccaagcctctgctgagactgaagggattcccttcctttcctctggtcgagagacaggccaacgaagtggactggtgggacatggtgtgtaacgtgaagaagctgatcaacgagaaaaaggaggatggcaaggtgttttggcagaatctggctggctacaagagacaggaagccctgagaccatacctgagcagcgaggaagatcggaagaagggaaagaaattcgctcggtaccagctgggcgacctgctgctgcacctggaaaagaagcacggcgaggactggggaaaggtgtacgacgaggcctgggagcggattgacaagaaagtggaaggcctgagcaagcacatcaagctggaagaggaacggagaagcgaggacgcccagagcaaggccgccctgaccgactggctgcgggctaaggccagcttcgtgatcgagggcctgaaggaggccgacaaggacgagttctgcagatgcgagctgaagctgcagaagtggtacggggacctgcggggaaagcccttcgccatcgaagccgagaacagcatcctggacatcagcggcttcagcaagcagtacaactgtgccttcatctggcagaaggacggcgtgaagaagctgaacctgtacctgatcatcaactacttcaagggcggcaagctgcggttcaagaagatcaaacctgaagccttcgaagccaacagattctacaccgtgatcaacaaaaagagcggcgagatcgtgcccatggaggtgaacttcaacttcgacgaccccaacctgatcatcctgcctctggcctttggcaagagacagggcagagaattcatctggaacgacctgctgtccctggaaaccggcagcctgaagctggccaacggaagagtgatcgagaagacactgtacaacagaagaacccggcaggatgagcctgccctgttcgtggccctgaccttcgagcggcgggaggtcctggactcctccaatatcaaaccaatgaacctgatcggcgtggcaagaggcgaaaacatccccgccgtgatcgccctgaccgaccccgagggctgcccactgagccggtttaaggatagcctgggaaacccaacccacatcctgagaatcggcgagagctataaggagaagcagcggaccatccaggccaagaaggaggtggagcagcggagagccggcggctacagccggaagtacgccagcaaagccaagaatctggcagacgatatggtgagaaacaccgctagagatctgctgtactacgccgtgacccaggatgccatgctgatcttcgccaacctgagccggggcttcggccggcagggcaagcggaccttcatggccgagagacagtacacacggatggaggactggctgaccgccaagctggcctacgagggcctgagcaagacctacctgtccaagacactggcccagtacacctccaagacatgcagcaactgtgggtttaccatcaccagcgccgactacgacagggtgctggagaagctgaagaagacagcaacaggctggatgaccacaattaacggcaaggagctgaaggtggagggccagattacctactacaacagatacaagagacagaacgtagtcaaggacctgtccgtcgagctggatagactgagcgaagaatctgtgaacaacgacatctcctcctggacaaagggcagaagcggagaagctctgagcctcctgaagaaaagattctcccatagacccgtgcaggagaagttcgtgtgcctgaactgcggcttcgagacacacgcagccgagcaagccgccctgaacatcgccagatcctggctgttcctgcggagccaggagtacaagaaataccagacaaacaagacaaccggcaacaccgataagagagccttcgtcgagacctggcagtccttttaccggaagaagcttaaggaggtgtggaaacctgccgtgcggtctggcggatctggcggaggctcctggcctgctgagcttcgaggacgtggccctgtacttcaccagggaggagtgggacaccctggactgggcccagaaggccctgtacagggacgtgatgctggacaactacaggcacatcgtgagcctgggcttccccttccccaagcccgaggtgatctgccagctggagcagtgggaggagccctggatcctggacctgcccagggccggcaccaggaaggccagcggcagcgcctgccccgacggatctggctccggcagcggccccaagaaaaagagaaaagtctaagctgccttctgcggggcttgccttctggccatgcccttcttctctcccttgcacctgtacctcttggtctttgaataaagcctgagtaggaaggctagcaaaaaaaaaaaaaaaaaaaaaaaaaaaaaaaaaaaaaaaaaaaaaaaaaaaaaaaaaaaaaaaaaaaaaaaaaaaaaaaa

SEQ ID NO: 15571 - RNA, 9485 nt, synthetic construct
  source 1..9485: mol_type = other RNA
aggaaataagagagaaaagaagagtaagaagaaatataagagccaccatggcccctaagaagaagcgtaaagtgagccggatggaacgcctcgtctacgaggtgcggcagaagtgcagaaacatcgaggacatctgcatctcctgcggatctctgaacgtgaccctggagcacccactgttcatcggcggcatgtgccagaactgtaaaaactgttttctggagtgtgcctatcaatacgacgatgacggctaccagagctactgcaccatctgttgcggcggaagagaggtgctgatgtgtggaaataacaactgctgccggtgcttctgcgtggaatgcgtggacctgctggtgggccccggcgccgcccaggccgctattaaggaagatccttggaactgctacatgtgcggccacaagggcacatacggcctgctgagacggagagaggactggcctagcagactgcagatgttcttcgccaataaccacgaccaggagttcgacccccctaaggtgtaccctcccgtccccgccgagaagagaaagcccatccgggtcctgagcctgttcgatggcatcgccaccggtctgctggtgctgaaggacctgggcatccaggtggataggtacattgcctccgaggtgtgcgaggactccatcaccgtgggaatggtgcgtcatcagggcaagatcatgtacgtgggcgacgtgcggagcgtgacacagaagcatatccaggagtggggccctttcgacctggtgatcggcggcagcccttgcaatgacctgagcatcgtgaacccagcccggaagggcctgtacgagggaaccggcagactgttcttcgagttttacagactgctgcacgacgcccggcctaaggaaggcgacgaccggcccttcttttggctgttcgagaatgtggtggccatgggagtcagcgacaagcgggatattagccggttcctggagagcaaccccgtgatgatcgatgccaaggaagtgagcgccgcccaccgggccagatacttctggggcaatctgcctggcatgaacagacccctggccagcaccgtgaacgacaagctggagctgcaggagtgcctggagcacggccggatcgccaagttcagcaaggtgagaaccatcaccacccgaagcaacagcatcaaacaaggcaaggaccagcactttcctgtgttcatgaacgagaaggaggacatcctgtggtgtaccgagatggagagagtgttcgggttcccagtccactacacagatgtcagcaacatgtctagactggccagacagagactgctgggaagaagctggtccgtccctgtgatcagacacctgttcgcccctctgaaggagtacttcgcctgcgtgagcagcggcaacagcaacgccaacagccggggccccagcttctctagcggcctggtgccactgtccctgagagggagccacatgggccccatggagatctacaaaaccgtgagcgcctggaagcggcagcctgtgcgcgtgctgagcctgtttcggaatatcgataaagtcctgaaaagcctgggattcctggagagcggctctggctccggcggtggcaccctgaagtacgtggaggatgtgacaaacgtggtcagacgggatgtggagaagtggggccccttcgatctggtgtacggcagcacccaacccctgggcagctcttgtgaccggtgccctggctggtacatgtttcagttccaccggatcctgcagtacgccctgccgagacaggagtcccagcggccattcttttggattttcatggacaacttgctgctgaccgaggatgaccaggaaactaccactcggttcctgcagaccgaagccgtgaccctgcaggacgtgagaggccgggactaccagaacgccatgcgggtgtggtccaacatccctggactgaaaagcaagcacgcacctctgacccctaaagaagaggagtacctgcaggcccaggtgcggagcagaagcaagctggacgcccctaaggtggatctgctggtgaagaattgcctcctgcccctgagagagtacttcaagtatttcagccagaatagtctgcccctgggaggcagcggcggcggcgccctggtgacatttgaggacgtcgccgtgcggttcacccaggaggaatgggctctgctggatccttctcagaaaatcctgtaccgggacgtgatgagagagacataccggaatctgacctccgtgggcatcaactgggaatgttgggaccttgaagcctgcttcagaagcctgggaagaaacctgagagtgcaggtggtgaagagaaagtgcgagctgaccaacagcggcccctgcgccgagggcggcccaagcagcggcgcccctcctcccagcggcggcagcccagccggctccccaacctctaccgaggagggcacctctgagtccgccacccccgagagcggccctggcacctccaccgagcccagcgagggcagcgcacccggcagccctgccggcagccccacctccacagaggagggaaccagcaccgagcccagcgaaggcagcgccccaggcaccagcaccgagcctagtgagcaggagattaaacggatcaacaagatcagaagaagacttgtgaaagacagcaacaccaagaaggccggcaagacaggccccatgaaaaccctgctggttagagtgatgacacccgatctgagagagcggctggaaaacctgagaaagaagcctgaaaatatcccccagcccatcagcaatacatctagagccaacctgaataagctgctgaccgattacaccgaaatgaagaaggcgatcctgcatgtgtactgggaagagttccagaaggaccctgtgggcctgatgagccgggtggcccagcctgccagcaagaagatcgatcagaacaagctgaaacctgagatggacgagaagggcaacctgaccaccgccggctttgcctgctctcagtgtggccagcccctgttcgtgtacaagctggagcaggtgtctgagaagggcaaggcttacaccaactacttcggacggtgcaatgtggccgagcacgaaaagctgatcctgctggcccagctgaagcccgagaaggatagcgacgaagccgtgacatatagcctgggaaagtttgggcagagggccctggatttctacagcattcatgtgaccaaggagtccacccaccccgtgaagcccctggcccagatcgccggaaacagatacgcctccggacctgtgggaaaggccctgagcgacgcatgtatgggcacaatcgcctccttcctgtctaagtaccaggacatcatcatcgaacaccagaaggtggtgaagggcaaccagaagagactggagagcctgcgggagctggccggcaaggaaaacctggaataccctagcgtgaccctgccacctcagcctcacaccaaggagggcgttgatgcctacaacgaagtgatcgcccgggtgcgaatgtgggtgaacctgaacctgtggcagaagctgaagctaagcagagatgatgccaagcctctgctgagactgaagggattcccttcctttcctctggtcgagagacaggccaacgaagtggactggtgggacatggtgtgtaacgtgaagaagctgatcaacgagaaaaaggaggatggcaaggtgttttggcagaatctggctggctacaagagacaggaagccctgagaccatacctgagcagcgaggaagatcggaagaagggaaagaaattcgctcggtaccagctgggcgacctgctgctgcacctggaaaagaagcacggcgaggactggggaaaggtgtacgacgaggcctgggagcggattgacaagaaagtggaaggcctgagcaagcacatcaagctggaagaggaacggagaagcgaggacgcccagagcaaggccgccctgaccgactggctgcgggctaaggccagcttcgtgatcgagggcctgaaggaggccgacaaggacgagttctgcagatgcgagctgaagctgcagaagtggtacggggacctgcggggaaagcccttcgccatcgaagccgagaacagcatcctggacatcagcggcttcagcaagcagtacaactgtgccttcatctggcagaaggacggcgtgaagaagctgaacctgtacctgatcatcaactacttcaagggcggcaagctgcggttcaagaagatcaaacctgaagccttcgaagccaacagattctacaccgtgatcaacaaaaagagcggcgagatcgtgcccatggaggtgaacttcaacttcgacgaccccaacctgatcatcctgcctctggcctttggcaagagacagggcagagaattcatctggaacgacctgctgtccctggaaaccggcagcctgaagctggccaacggaagagtgatcgagaagacactgtacaacagaagaacccggcaggatgagcctgccctgttcgtggccctgaccttcgagcggcgggaggtcctggactcctccaatatcaaaccaatgaacctgatcggcgtggcaagaggcgaaaacatccccgccgtgatcgccctgaccgaccccgagggctgcccactgagccggtttaaggatagcctgggaaacccaacccacatcctgagaatcggcgagagctataaggagaagcagcggaccatccaggccaagaaggaggtggagcagcggagagccggcggctacagccggaagtacgccagcaaagccaagaatctggcagacgatatggtgagaaacaccgctagagatctgctgtactacgccgtgacccaggatgccatgctgatcttcgccaacctgagccggggcttcggccggcagggcaagcggaccttcatggccgagagacagtacacacggatggaggactggctgaccgccaagctggcctacgagggcctgagcaagacctacctgtccaagacactggcccagtacacctccaagacatgcagcaactgtgggtttaccatcaccagcgccgactacgacagggtgctggagaagctgaagaagacagcaacaggctggatgaccacaattaacggcaaggagctgaaggtggagggccagattacctactacaacagatacaagagacagaacgtagtcaaggacctgtccgtcgagctggatagactgagcgaagaatctgtgaacaacgacatctcctcctggacaaagggcagaagcggagaagctctgagcctcctgaagaaaagattctcccatagacccgtgcaggagaagttcgtgtgcctgaactgcggcttcgagacacacgcagccgagcaagccgccctgaacatcgccagatcctggctgttcctgcggagccaggagtacaagaaataccagacaaacaagacaaccggcaacaccgataagagagccttcgtcgagacctggcagtccttttaccggaagaagcttaaggaggtgtggaaacctgccgtgcggtctggcggatctggcggaggctccgtgttccagggcagcctgagcttcgaggacgtgaccgtggacttcagcagggaggagtggaggctgctggacctggcccagaagagcctgtacagggacgtgatgctggagaactacttcaacctgatcagcgtgggctgccaggtgcccaagcaggaggtgctgttcagcctggagcaggaggagcccaggatgctggacggcgagatcagcagccacaactgcctgggcggcgacatcggcggcggcccaagcagcggcgcccctcctcccagcggcggcagcccagccggctccccaacctctaccgaggagggcacctctgagtccgccacccccgagagcggccctggcacctccaccgagcccagcgagggcagcgcacccggcagccctgccggcagccccacctccacagaggagggaaccagcaccgagcccagcgaaggcagcgccccaggcaccagcaccgagcctagtgagcaggagattaaacggatcaacaagatcagaagaagacttgtgaaagacagcaacaccaagaaggccggcaagacaggccccatgaaaaccctgctggttagagtgatgacacccgatctgagagagcggctggaaaacctgagaaagaagcctgaaaatatcccccagcccatcagcaatacatctagagccaacctgaataagctgctgaccgattacaccgaaatgaagaaggcgatcctgcatgtgtactgggaagagttccagaaggaccctgtgggcctgatgagccgggtggcccagcctgccagcaagaagatcgatcagaacaagctgaaacctgagatggacgagaagggcaacctgaccaccgccggctttgcctgctctcagtgtggccagcccctgttcgtgtacaagctggagcaggtgtctgagaagggcaaggcttacaccaactacttcggacggtgcaatgtggccgagcacgaaaagctgatcctgctggcccagctgaagcccgagaaggatagcgacgaagccgtgacatatagcctgggaaagtttgggcagagggccctggatttctacagcattcatgtgaccaaggagtccacccaccccgtgaagcccctggcccagatcgccggaaacagatacgcctccggacctgtgggaaaggccctgagcgacgcatgtatgggcacaatcgcctccttcctgtctaagtaccaggacatcatcatcgaacaccagaaggtggtgaagggcaaccagaagagactggagagcctgcgggagctggccggcaaggaaaacctggaataccctagcgtgaccctgccacctcagcctcacaccaaggagggcgttgatgcctacaacgaagtgatcgcccgggtgcgaatgtgggtgaacctgaacctgtggcagaagctgaagctaagcagagatgatgccaagcctctgctgagactgaagggattcccttcctttcctctggtcgagagacaggccaacgaagtggactggtgggacatggtgtgtaacgtgaagaagctgatcaacgagaaaaaggaggatggcaaggtgttttggcagaatctggctggctacaagagacaggaagccctgagaccatacctgagcagcgaggaagatcggaagaagggaaagaaattcgctcggtaccagctgggcgacctgctgctgcacctggaaaagaagcacggcgaggactggggaaaggtgtacgacgaggcctgggagcggattgacaagaaagtggaaggcctgagcaagcacatcaagctggaagaggaacggagaagcgaggacgcccagagcaaggccgccctgaccgactggctgcgggctaaggccagcttcgtgatcgagggcctgaaggaggccgacaaggacgagttctgcagatgcgagctgaagctgcagaagtggtacggggacctgcggggaaagcccttcgccatcgaagccgagaacagcatcctggacatcagcggcttcagcaagcagtacaactgtgccttcatctggcagaaggacggcgtgaagaagctgaacctgtacctgatcatcaactacttcaagggcggcaagctgcggttcaagaagatcaaacctgaagccttcgaagccaacagattctacaccgtgatcaacaaaaagagcggcgagatcgtgcccatggaggtgaacttcaacttcgacgaccccaacctgatcatcctgcctctggcctttggcaagagacagggcagagaattcatctggaacgacctgctgtccctggaaaccggcagcctgaagctggccaacggaagagtgatcgagaagacactgtacaacagaagaacccggcaggatgagcctgccctgttcgtggccctgaccttcgagcggcgggaggtcctggactcctccaatatcaaaccaatgaacctgatcggcgtggcaagaggcgaaaacatccccgccgtgatcgccctgaccgaccccgagggctgcccactgagccggtttaaggatagcctgggaaacccaacccacatcctgagaatcggcgagagctataaggagaagcagcggaccatccaggccaagaaggaggtggagcagcggagagccggcggctacagccggaagtacgccagcaaagccaagaatctggcagacgatatggtgagaaacaccgctagagatctgctgtactacgccgtgacccaggatgccatgctgatcttcgccaacctgagccggggcttcggccggcagggcaagcggaccttcatggccgagagacagtacacacggatggaggactggctgaccgccaagctggcctacgagggcctgagcaagacctacctgtccaagacactggcccagtacacctccaagacatgcagcaactgtgggtttaccatcaccagcgccgactacgacagggtgctggagaagctgaagaagacagcaacaggctggatgaccacaattaacggcaaggagctgaaggtggagggccagattacctactacaacagatacaagagacagaacgtagtcaaggacctgtccgtcgagctggatagactgagcgaagaatctgtgaacaacgacatctcctcctggacaaagggcagaagcggagaagctctgagcctcctgaagaaaagattctcccatagacccgtgcaggagaagttcgtgtgcctgaactgcggcttcgagacacacgcagccgagcaagccgccctgaacatcgccagatcctggctgttcctgcggagccaggagtacaagaaataccagacaaacaagacaaccggcaacaccgataagagagccttcgtcgagacctggcagtccttttaccggaagaagcttaaggaggtgtggaaacctgccgtgcggtctggcggatctggcggaggctcctgtgttccagggcagcctgagcttcgaggacgtgaccgtggacttcagcagggaggagtggaggctgctggacctggcccagaagagcctgtacagggacgtgatgctggagaactacttcaacctgatcagcgtgggctgccaggtgcccaagcaggaggtgctgttcagcctggagcaggaggagcccaggatgctggacggcgagatcagcagccacaactgcctgggcggcgacatcggcggatctggctccggcagcggccccaagaaaaagagaaaagtctaagctgccttctgcggggcttgccttctggccatgcccttcttctctcccttgcacctgtacctcttggtctttgaataaagcctgagtaggaaggctagcaaaaaaaaaaaaaaaaaaaaaaaaaaaaaaaaaaaaaaaaaaaaaaaaaaaaaaaaaaaaaaaaaaaaaaaaaaaaaaaa

SEQ ID NO: 15572 - RNA, 9485 nt, synthetic construct
  source 1..9485: mol_type = other RNA
aggaaataagagagaaaagaagagtaagaagaaatataagagccaccatggcccctaagaagaagcgtaaagtgagccggatggaacgcctcgtctacgaggtgcggcagaagtgcagaaacatcgaggacatctgcatctcctgcggatctctgaacgtgaccctggagcacccactgttcatcggcggcatgtgccagaactgtaaaaactgttttctggagtgtgcctatcaatacgacgatgacggctaccagagctactgcaccatctgttgcggcggaagagaggtgctgatgtgtggaaataacaactgctgccggtgcttctgcgtggaatgcgtggacctgctggtgggccccggcgccgcccaggccgctattaaggaagatccttggaactgctacatgtgcggccacaagggcacatacggcctgctgagacggagagaggactggcctagcagactgcagatgttcttcgccaataaccacgaccaggagttcgacccccctaaggtgtaccctcccgtccccgccgagaagagaaagcccatccgggtcctgagcctgttcgatggcatcgccaccggtctgctggtgctgaaggacctgggcatccaggtggataggtacattgcctccgaggtgtgcgaggactccatcaccgtgggaatggtgcgtcatcagggcaagatcatgtacgtgggcgacgtgcggagcgtgacacagaagcatatccaggagtggggccctttcgacctggtgatcggcggcagcccttgcaatgacctgagcatcgtgaacccagcccggaagggcctgtacgagggaaccggcagactgttcttcgagttttacagactgctgcacgacgcccggcctaaggaaggcgacgaccggcccttcttttggctgttcgagaatgtggtggccatgggagtcagcgacaagcgggatattagccggttcctggagagcaaccccgtgatgatcgatgccaaggaagtgagcgccgcccaccgggccagatacttctggggcaatctgcctggcatgaacagacccctggccagcaccgtgaacgacaagctggagctgcaggagtgcctggagcacggccggatcgccaagttcagcaaggtgagaaccatcaccacccgaagcaacagcatcaaacaaggcaaggaccagcactttcctgtgttcatgaacgagaaggaggacatcctgtggtgtaccgagatggagagagtgttcgggttcccagtccactacacagatgtcagcaacatgtctagactggccagacagagactgctgggaagaagctggtccgtccctgtgatcagacacctgttcgcccctctgaaggagtacttcgcctgcgtgagcagcggcaacagcaacgccaacagccggggccccagcttctctagcggcctggtgccactgtccctgagagggagccacatgggccccatggagatctacaaaaccgtgagcgcctggaagcggcagcctgtgcgcgtgctgagcctgtttcggaatatcgataaagtcctgaaaagcctgggattcctggagagcggctctggctccggcggtggcaccctgaagtacgtggaggatgtgacaaacgtggtcagacgggatgtggagaagtggggccccttcgatctggtgtacggcagcacccaacccctgggcagctcttgtgaccggtgccctggctggtacatgtttcagttccaccggatcctgcagtacgccctgccgagacaggagtcccagcggccattcttttggattttcatggacaacttgctgctgaccgaggatgaccaggaaactaccactcggttcctgcagaccgaagccgtgaccctgcaggacgtgagaggccgggactaccagaacgccatgcgggtgtggtccaacatccctggactgaaaagcaagcacgcacctctgacccctaaagaagaggagtacctgcaggcccaggtgcggagcagaagcaagctggacgcccctaaggtggatctgctggtgaagaattgcctcctgcccctgagagagtacttcaagtatttcagccagaatagtctgcccctgggaggcagcggcggcggcgccctggtgacatttgaggacgtcgccgtgcggttcacccaggaggaatgggctctgctggatccttctcagaaaatcctgtaccgggacgtgatgagagagacataccggaatctgacctccgtgggcatcaactgggaatgttgggaccttgaagcctgcttcagaagcctgggaagaaacctgagagtgcaggtggtgaagagaaagtgcgagctgaccaacagcggcccctgcgccgagggcggcccaagcagcggcgcccctcctcccagcggcggcagcccagccggctccccaacctctaccgaggagggcacctctgagtccgccacccccgagagcggccctggcacctccaccgagcccagcgagggcagcgcacccggcagccctgccggcagccccacctccacagaggagggaaccagcaccgagcccagcgaaggcagcgccccaggcaccagcaccgagcctagtgagcaggagattaaacggatcaacaagatcagaagaagacttgtgaaagacagcaacaccaagaaggccggcaagacaggccccatgaaaaccctgctggttagagtgatgacacccgatctgagagagcggctggaaaacctgagaaagaagcctgaaaatatcccccagcccatcagcaatacatctagagccaacctgaataagctgctgaccgattacaccgaaatgaagaaggcgatcctgcatgtgtactgggaagagttccagaaggaccctgtgggcctgatgagccgggtggcccagcctgccagcaagaagatcgatcagaacaagctgaaacctgagatggacgagaagggcaacctgaccaccgccggctttgcctgctctcagtgtggccagcccctgttcgtgtacaagctggagcaggtgtctgagaagggcaaggcttacaccaactacttcggacggtgcaatgtggccgagcacgaaaagctgatcctgctggcccagctgaagcccgagaaggatagcgacgaagccgtgacatatagcctgggaaagtttgggcagagggccctggatttctacagcattcatgtgaccaaggagtccacccaccccgtgaagcccctggcccagatcgccggaaacagatacgcctccggacctgtgggaaaggccctgagcgacgcatgtatgggcacaatcgcctccttcctgtctaagtaccaggacatcatcatcgaacaccagaaggtggtgaagggcaaccagaagagactggagagcctgcgggagctggccggcaaggaaaacctggaataccctagcgtgaccctgccacctcagcctcacaccaaggagggcgttgatgcctacaacgaagtgatcgcccgggtgcgaatgtgggtgaacctgaacctgtggcagaagctgaagctaagcagagatgatgccaagcctctgctgagactgaagggattcccttcctttcctctggtcgagagacaggccaacgaagtggactggtgggacatggtgtgtaacgtgaagaagctgatcaacgagaaaaaggaggatggcaaggtgttttggcagaatctggctggctacaagagacaggaagccctgagaccatacctgagcagcgaggaagatcggaagaagggaaagaaattcgctcggtaccagctgggcgacctgctgctgcacctggaaaagaagcacggcgaggactggggaaaggtgtacgacgaggcctgggagcggattgacaagaaagtggaaggcctgagcaagcacatcaagctggaagaggaacggagaagcgaggacgcccagagcaaggccgccctgaccgactggctgcgggctaaggccagcttcgtgatcgagggcctgaaggaggccgacaaggacgagttctgcagatgcgagctgaagctgcagaagtggtacggggacctgcggggaaagcccttcgccatcgaagccgagaacagcatcctggacatcagcggcttcagcaagcagtacaactgtgccttcatctggcagaaggacggcgtgaagaagctgaacctgtacctgatcatcaactacttcaagggcggcaagctgcggttcaagaagatcaaacctgaagccttcgaagccaacagattctacaccgtgatcaacaaaaagagcggcgagatcgtgcccatggaggtgaacttcaacttcgacgaccccaacctgatcatcctgcctctggcctttggcaagagacagggcagagaattcatctggaacgacctgctgtccctggaaaccggcagcctgaagctggccaacggaagagtgatcgagaagacactgtacaacagaagaacccggcaggatgagcctgccctgttcgtggccctgaccttcgagcggcgggaggtcctggactcctccaatatcaaaccaatgaacctgatcggcgtggcaagaggcgaaaacatccccgccgtgatcgccctgaccgaccccgagggctgcccactgagccggtttaaggatagcctgggaaacccaacccacatcctgagaatcggcgagagctataaggagaagcagcggaccatccaggccaagaaggaggtggagcagcggagagccggcggctacagccggaagtacgccagcaaagccaagaatctggcagacgatatggtgagaaacaccgctagagatctgctgtactacgccgtgacccaggatgccatgctgatcttcgccaacctgagccggggcttcggccggcagggcaagcggaccttcatggccgagagacagtacacacggatggaggactggctgaccgccaagctggcctacgagggcctgagcaagacctacctgtccaagacactggcccagtacacctccaagacatgcagcaactgtgggtttaccatcaccagcgccgactacgacagggtgctggagaagctgaagaagacagcaacaggctggatgaccacaattaacggcaaggagctgaaggtggagggccagattacctactacaacagatacaagagacagaacgtagtcaaggacctgtccgtcgagctggatagactgagcgaagaatctgtgaacaacgacatctcctcctggacaaagggcagaagcggagaagctctgagcctcctgaagaaaagattctcccatagacccgtgcaggagaagttcgtgtgcctgaactgcggcttcgagacacacgcagccgagcaagccgccctgaacatcgccagatcctggctgttcctgcggagccaggagtacaagaaataccagacaaacaagacaaccggcaacaccgataagagagccttcgtcgagacctggcagtccttttaccggaagaagcttaaggaggtgtggaaacctgccgtgcggtctggcggatctggcggaggctccatgcccgtgaccttcgaggaggtggccgtgtacttcacccagggccagggcgccctgctggaccccgcccagagggccctgtacagggacgtgatgcaggagaactacgagaccgtgaccagcctgggcttccccatccccaagcccgagctgatcgccaggctggagaggggcgaggagccctgggtgcccgacctgcaggcctgcaaggagaggaggctgcccaggtgcaccaggaccggcggcggcccaagcagcggcgcccctcctcccagcggcggcagcccagccggctccccaacctctaccgaggagggcacctctgagtccgccacccccgagagcggccctggcacctccaccgagcccagcgagggcagcgcacccggcagccctgccggcagccccacctccacagaggagggaaccagcaccgagcccagcgaaggcagcgccccaggcaccagcaccgagcctagtgagcaggagattaaacggatcaacaagatcagaagaagacttgtgaaagacagcaacaccaagaaggccggcaagacaggccccatgaaaaccctgctggttagagtgatgacacccgatctgagagagcggctggaaaacctgagaaagaagcctgaaaatatcccccagcccatcagcaatacatctagagccaacctgaataagctgctgaccgattacaccgaaatgaagaaggcgatcctgcatgtgtactgggaagagttccagaaggaccctgtgggcctgatgagccgggtggcccagcctgccagcaagaagatcgatcagaacaagctgaaacctgagatggacgagaagggcaacctgaccaccgccggctttgcctgctctcagtgtggccagcccctgttcgtgtacaagctggagcaggtgtctgagaagggcaaggcttacaccaactacttcggacggtgcaatgtggccgagcacgaaaagctgatcctgctggcccagctgaagcccgagaaggatagcgacgaagccgtgacatatagcctgggaaagtttgggcagagggccctggatttctacagcattcatgtgaccaaggagtccacccaccccgtgaagcccctggcccagatcgccggaaacagatacgcctccggacctgtgggaaaggccctgagcgacgcatgtatgggcacaatcgcctccttcctgtctaagtaccaggacatcatcatcgaacaccagaaggtggtgaagggcaaccagaagagactggagagcctgcgggagctggccggcaaggaaaacctggaataccctagcgtgaccctgccacctcagcctcacaccaaggagggcgttgatgcctacaacgaagtgatcgcccgggtgcgaatgtgggtgaacctgaacctgtggcagaagctgaagctaagcagagatgatgccaagcctctgctgagactgaagggattcccttcctttcctctggtcgagagacaggccaacgaagtggactggtgggacatggtgtgtaacgtgaagaagctgatcaacgagaaaaaggaggatggcaaggtgttttggcagaatctggctggctacaagagacaggaagccctgagaccatacctgagcagcgaggaagatcggaagaagggaaagaaattcgctcggtaccagctgggcgacctgctgctgcacctggaaaagaagcacggcgaggactggggaaaggtgtacgacgaggcctgggagcggattgacaagaaagtggaaggcctgagcaagcacatcaagctggaagaggaacggagaagcgaggacgcccagagcaaggccgccctgaccgactggctgcgggctaaggccagcttcgtgatcgagggcctgaaggaggccgacaaggacgagttctgcagatgcgagctgaagctgcagaagtggtacggggacctgcggggaaagcccttcgccatcgaagccgagaacagcatcctggacatcagcggcttcagcaagcagtacaactgtgccttcatctggcagaaggacggcgtgaagaagctgaacctgtacctgatcatcaactacttcaagggcggcaagctgcggttcaagaagatcaaacctgaagccttcgaagccaacagattctacaccgtgatcaacaaaaagagcggcgagatcgtgcccatggaggtgaacttcaacttcgacgaccccaacctgatcatcctgcctctggcctttggcaagagacagggcagagaattcatctggaacgacctgctgtccctggaaaccggcagcctgaagctggccaacggaagagtgatcgagaagacactgtacaacagaagaacccggcaggatgagcctgccctgttcgtggccctgaccttcgagcggcgggaggtcctggactcctccaatatcaaaccaatgaacctgatcggcgtggcaagaggcgaaaacatccccgccgtgatcgccctgaccgaccccgagggctgcccactgagccggtttaaggatagcctgggaaacccaacccacatcctgagaatcggcgagagctataaggagaagcagcggaccatccaggccaagaaggaggtggagcagcggagagccggcggctacagccggaagtacgccagcaaagccaagaatctggcagacgatatggtgagaaacaccgctagagatctgctgtactacgccgtgacccaggatgccatgctgatcttcgccaacctgagccggggcttcggccggcagggcaagcggaccttcatggccgagagacagtacacacggatggaggactggctgaccgccaagctggcctacgagggcctgagcaagacctacctgtccaagacactggcccagtacacctccaagacatgcagcaactgtgggtttaccatcaccagcgccgactacgacagggtgctggagaagctgaagaagacagcaacaggctggatgaccacaattaacggcaaggagctgaaggtggagggccagattacctactacaacagatacaagagacagaacgtagtcaaggacctgtccgtcgagctggatagactgagcgaagaatctgtgaacaacgacatctcctcctggacaaagggcagaagcggagaagctctgagcctcctgaagaaaagattctcccatagacccgtgcaggagaagttcgtgtgcctgaactgcggcttcgagacacacgcagccgagcaagccgccctgaacatcgccagatcctggctgttcctgcggagccaggagtacaagaaataccagacaaacaagacaaccggcaacaccgataagagagccttcgtcgagacctggcagtccttttaccggaagaagcttaaggaggtgtggaaacctgccgtgcggtctggcggatctggcggaggctcctatgcccgtgaccttcgaggaggtggccgtgtacttcacccagggccagggcgccctgctggaccccgcccagagggccctgtacagggacgtgatgcaggagaactacgagaccgtgaccagcctgggcttccccatccccaagcccgagctgatcgccaggctggagaggggcgaggagccctgggtgcccgacctgcaggcctgcaaggagaggaggctgcccaggtgcaccaggaccggcggatctggctccggcagcggccccaagaaaaagagaaaagtctaagctgccttctgcggggcttgccttctggccatgcccttcttctctcccttgcacctgtacctcttggtctttgaataaagcctgagtaggaaggctagcaaaaaaaaaaaaaaaaaaaaaaaaaaaaaaaaaaaaaaaaaaaaaaaaaaaaaaaaaaaaaaaaaaaaaaaaaaaaaaaa

SEQ ID NO: 15573 - RNA, 9485 nt, synthetic construct
  source 1..9485: mol_type = other RNA
aggaaataagagagaaaagaagagtaagaagaaatataagagccaccatggcccctaagaagaagcgtaaagtgagccggatggaacgcctcgtctacgaggtgcggcagaagtgcagaaacatcgaggacatctgcatctcctgcggatctctgaacgtgaccctggagcacccactgttcatcggcggcatgtgccagaactgtaaaaactgttttctggagtgtgcctatcaatacgacgatgacggctaccagagctactgcaccatctgttgcggcggaagagaggtgctgatgtgtggaaataacaactgctgccggtgcttctgcgtggaatgcgtggacctgctggtgggccccggcgccgcccaggccgctattaaggaagatccttggaactgctacatgtgcggccacaagggcacatacggcctgctgagacggagagaggactggcctagcagactgcagatgttcttcgccaataaccacgaccaggagttcgacccccctaaggtgtaccctcccgtccccgccgagaagagaaagcccatccgggtcctgagcctgttcgatggcatcgccaccggtctgctggtgctgaaggacctgggcatccaggtggataggtacattgcctccgaggtgtgcgaggactccatcaccgtgggaatggtgcgtcatcagggcaagatcatgtacgtgggcgacgtgcggagcgtgacacagaagcatatccaggagtggggccctttcgacctggtgatcggcggcagcccttgcaatgacctgagcatcgtgaacccagcccggaagggcctgtacgagggaaccggcagactgttcttcgagttttacagactgctgcacgacgcccggcctaaggaaggcgacgaccggcccttcttttggctgttcgagaatgtggtggccatgggagtcagcgacaagcgggatattagccggttcctggagagcaaccccgtgatgatcgatgccaaggaagtgagcgccgcccaccgggccagatacttctggggcaatctgcctggcatgaacagacccctggccagcaccgtgaacgacaagctggagctgcaggagtgcctggagcacggccggatcgccaagttcagcaaggtgagaaccatcaccacccgaagcaacagcatcaaacaaggcaaggaccagcactttcctgtgttcatgaacgagaaggaggacatcctgtggtgtaccgagatggagagagtgttcgggttcccagtccactacacagatgtcagcaacatgtctagactggccagacagagactgctgggaagaagctggtccgtccctgtgatcagacacctgttcgcccctctgaaggagtacttcgcctgcgtgagcagcggcaacagcaacgccaacagccggggccccagcttctctagcggcctggtgccactgtccctgagagggagccacatgggccccatggagatctacaaaaccgtgagcgcctggaagcggcagcctgtgcgcgtgctgagcctgtttcggaatatcgataaagtcctgaaaagcctgggattcctggagagcggctctggctccggcggtggcaccctgaagtacgtggaggatgtgacaaacgtggtcagacgggatgtggagaagtggggccccttcgatctggtgtacggcagcacccaacccctgggcagctcttgtgaccggtgccctggctggtacatgtttcagttccaccggatcctgcagtacgccctgccgagacaggagtcccagcggccattcttttggattttcatggacaacttgctgctgaccgaggatgaccaggaaactaccactcggttcctgcagaccgaagccgtgaccctgcaggacgtgagaggccgggactaccagaacgccatgcgggtgtggtccaacatccctggactgaaaagcaagcacgcacctctgacccctaaagaagaggagtacctgcaggcccaggtgcggagcagaagcaagctggacgcccctaaggtggatctgctggtgaagaattgcctcctgcccctgagagagtacttcaagtatttcagccagaatagtctgcccctgggaggcagcggcggcggcgccctggtgacatttgaggacgtcgccgtgcggttcacccaggaggaatgggctctgctggatccttctcagaaaatcctgtaccgggacgtgatgagagagacataccggaatctgacctccgtgggcatcaactgggaatgttgggaccttgaagcctgcttcagaagcctgggaagaaacctgagagtgcaggtggtgaagagaaagtgcgagctgaccaacagcggcccctgcgccgagggcggcccaagcagcggcgcccctcctcccagcggcggcagcccagccggctccccaacctctaccgaggagggcacctctgagtccgccacccccgagagcggccctggcacctccaccgagcccagcgagggcagcgcacccggcagccctgccggcagccccacctccacagaggagggaaccagcaccgagcccagcgaaggcagcgccccaggcaccagcaccgagcctagtgagcaggagattaaacggatcaacaagatcagaagaagacttgtgaaagacagcaacaccaagaaggccggcaagacaggccccatgaaaaccctgctggttagagtgatgacacccgatctgagagagcggctggaaaacctgagaaagaagcctgaaaatatcccccagcccatcagcaatacatctagagccaacctgaataagctgctgaccgattacaccgaaatgaagaaggcgatcctgcatgtgtactgggaagagttccagaaggaccctgtgggcctgatgagccgggtggcccagcctgccagcaagaagatcgatcagaacaagctgaaacctgagatggacgagaagggcaacctgaccaccgccggctttgcctgctctcagtgtggccagcccctgttcgtgtacaagctggagcaggtgtctgagaagggcaaggcttacaccaactacttcggacggtgcaatgtggccgagcacgaaaagctgatcctgctggcccagctgaagcccgagaaggatagcgacgaagccgtgacatatagcctgggaaagtttgggcagagggccctggatttctacagcattcatgtgaccaaggagtccacccaccccgtgaagcccctggcccagatcgccggaaacagatacgcctccggacctgtgggaaaggccctgagcgacgcatgtatgggcacaatcgcctccttcctgtctaagtaccaggacatcatcatcgaacaccagaaggtggtgaagggcaaccagaagagactggagagcctgcgggagctggccggcaaggaaaacctggaataccctagcgtgaccctgccacctcagcctcacaccaaggagggcgttgatgcctacaacgaagtgatcgcccgggtgcgaatgtgggtgaacctgaacctgtggcagaagctgaagctaagcagagatgatgccaagcctctgctgagactgaagggattcccttcctttcctctggtcgagagacaggccaacgaagtggactggtgggacatggtgtgtaacgtgaagaagctgatcaacgagaaaaaggaggatggcaaggtgttttggcagaatctggctggctacaagagacaggaagccctgagaccatacctgagcagcgaggaagatcggaagaagggaaagaaattcgctcggtaccagctgggcgacctgctgctgcacctggaaaagaagcacggcgaggactggggaaaggtgtacgacgaggcctgggagcggattgacaagaaagtggaaggcctgagcaagcacatcaagctggaagaggaacggagaagcgaggacgcccagagcaaggccgccctgaccgactggctgcgggctaaggccagcttcgtgatcgagggcctgaaggaggccgacaaggacgagttctgcagatgcgagctgaagctgcagaagtggtacggggacctgcggggaaagcccttcgccatcgaagccgagaacagcatcctggacatcagcggcttcagcaagcagtacaactgtgccttcatctggcagaaggacggcgtgaagaagctgaacctgtacctgatcatcaactacttcaagggcggcaagctgcggttcaagaagatcaaacctgaagccttcgaagccaacagattctacaccgtgatcaacaaaaagagcggcgagatcgtgcccatggaggtgaacttcaacttcgacgaccccaacctgatcatcctgcctctggcctttggcaagagacagggcagagaattcatctggaacgacctgctgtccctggaaaccggcagcctgaagctggccaacggaagagtgatcgagaagacactgtacaacagaagaacccggcaggatgagcctgccctgttcgtggccctgaccttcgagcggcgggaggtcctggactcctccaatatcaaaccaatgaacctgatcggcgtggcaagaggcgaaaacatccccgccgtgatcgccctgaccgaccccgagggctgcccactgagccggtttaaggatagcctgggaaacccaacccacatcctgagaatcggcgagagctataaggagaagcagcggaccatccaggccaagaaggaggtggagcagcggagagccggcggctacagccggaagtacgccagcaaagccaagaatctggcagacgatatggtgagaaacaccgctagagatctgctgtactacgccgtgacccaggatgccatgctgatcttcgccaacctgagccggggcttcggccggcagggcaagcggaccttcatggccgagagacagtacacacggatggaggactggctgaccgccaagctggcctacgagggcctgagcaagacctacctgtccaagacactggcccagtacacctccaagacatgcagcaactgtgggtttaccatcaccagcgccgactacgacagggtgctggagaagctgaagaagacagcaacaggctggatgaccacaattaacggcaaggagctgaaggtggagggccagattacctactacaacagatacaagagacagaacgtagtcaaggacctgtccgtcgagctggatagactgagcgaagaatctgtgaacaacgacatctcctcctggacaaagggcagaagcggagaagctctgagcctcctgaagaaaagattctcccatagacccgtgcaggagaagttcgtgtgcctgaactgcggcttcgagacacacgcagccgagcaagccgccctgaacatcgccagatcctggctgttcctgcggagccaggagtacaagaaataccagacaaacaagacaaccggcaacaccgataagagagccttcgtcgagacctggcagtccttttaccggaagaagcttaaggaggtgtggaaacctgccgtgcggtctggcggatctggcggaggctccagccagagcctggtgaccttcggcgacgtggccgtgaacttcagccaggaggagtgggagtggctgaacagcgcccagaggaacctgtacaggagcgtgatgctggagaactacaggaacctggtgagcctgggcctgtgcgtgagcaagcccgacatgatcagcagcctggagcagaggaaggagccctggatggtgaagaggaagctgaccaggggcaggtgccccgacctgaaggccgtgggcggcccaagcagcggcgcccctcctcccagcggcggcagcccagccggctccccaacctctaccgaggagggcacctctgagtccgccacccccgagagcggccctggcacctccaccgagcccagcgagggcagcgcacccggcagccctgccggcagccccacctccacagaggagggaaccagcaccgagcccagcgaaggcagcgccccaggcaccagcaccgagcctagtgagcaggagattaaacggatcaacaagatcagaagaagacttgtgaaagacagcaacaccaagaaggccggcaagacaggccccatgaaaaccctgctggttagagtgatgacacccgatctgagagagcggctggaaaacctgagaaagaagcctgaaaatatcccccagcccatcagcaatacatctagagccaacctgaataagctgctgaccgattacaccgaaatgaagaaggcgatcctgcatgtgtactgggaagagttccagaaggaccctgtgggcctgatgagccgggtggcccagcctgccagcaagaagatcgatcagaacaagctgaaacctgagatggacgagaagggcaacctgaccaccgccggctttgcctgctctcagtgtggccagcccctgttcgtgtacaagctggagcaggtgtctgagaagggcaaggcttacaccaactacttcggacggtgcaatgtggccgagcacgaaaagctgatcctgctggcccagctgaagcccgagaaggatagcgacgaagccgtgacatatagcctgggaaagtttgggcagagggccctggatttctacagcattcatgtgaccaaggagtccacccaccccgtgaagcccctggcccagatcgccggaaacagatacgcctccggacctgtgggaaaggccctgagcgacgcatgtatgggcacaatcgcctccttcctgtctaagtaccaggacatcatcatcgaacaccagaaggtggtgaagggcaaccagaagagactggagagcctgcgggagctggccggcaaggaaaacctggaataccctagcgtgaccctgccacctcagcctcacaccaaggagggcgttgatgcctacaacgaagtgatcgcccgggtgcgaatgtgggtgaacctgaacctgtggcagaagctgaagctaagcagagatgatgccaagcctctgctgagactgaagggattcccttcctttcctctggtcgagagacaggccaacgaagtggactggtgggacatggtgtgtaacgtgaagaagctgatcaacgagaaaaaggaggatggcaaggtgttttggcagaatctggctggctacaagagacaggaagccctgagaccatacctgagcagcgaggaagatcggaagaagggaaagaaattcgctcggtaccagctgggcgacctgctgctgcacctggaaaagaagcacggcgaggactggggaaaggtgtacgacgaggcctgggagcggattgacaagaaagtggaaggcctgagcaagcacatcaagctggaagaggaacggagaagcgaggacgcccagagcaaggccgccctgaccgactggctgcgggctaaggccagcttcgtgatcgagggcctgaaggaggccgacaaggacgagttctgcagatgcgagctgaagctgcagaagtggtacggggacctgcggggaaagcccttcgccatcgaagccgagaacagcatcctggacatcagcggcttcagcaagcagtacaactgtgccttcatctggcagaaggacggcgtgaagaagctgaacctgtacctgatcatcaactacttcaagggcggcaagctgcggttcaagaagatcaaacctgaagccttcgaagccaacagattctacaccgtgatcaacaaaaagagcggcgagatcgtgcccatggaggtgaacttcaacttcgacgaccccaacctgatcatcctgcctctggcctttggcaagagacagggcagagaattcatctggaacgacctgctgtccctggaaaccggcagcctgaagctggccaacggaagagtgatcgagaagacactgtacaacagaagaacccggcaggatgagcctgccctgttcgtggccctgaccttcgagcggcgggaggtcctggactcctccaatatcaaaccaatgaacctgatcggcgtggcaagaggcgaaaacatccccgccgtgatcgccctgaccgaccccgagggctgcccactgagccggtttaaggatagcctgggaaacccaacccacatcctgagaatcggcgagagctataaggagaagcagcggaccatccaggccaagaaggaggtggagcagcggagagccggcggctacagccggaagtacgccagcaaagccaagaatctggcagacgatatggtgagaaacaccgctagagatctgctgtactacgccgtgacccaggatgccatgctgatcttcgccaacctgagccggggcttcggccggcagggcaagcggaccttcatggccgagagacagtacacacggatggaggactggctgaccgccaagctggcctacgagggcctgagcaagacctacctgtccaagacactggcccagtacacctccaagacatgcagcaactgtgggtttaccatcaccagcgccgactacgacagggtgctggagaagctgaagaagacagcaacaggctggatgaccacaattaacggcaaggagctgaaggtggagggccagattacctactacaacagatacaagagacagaacgtagtcaaggacctgtccgtcgagctggatagactgagcgaagaatctgtgaacaacgacatctcctcctggacaaagggcagaagcggagaagctctgagcctcctgaagaaaagattctcccatagacccgtgcaggagaagttcgtgtgcctgaactgcggcttcgagacacacgcagccgagcaagccgccctgaacatcgccagatcctggctgttcctgcggagccaggagtacaagaaataccagacaaacaagacaaccggcaacaccgataagagagccttcgtcgagacctggcagtccttttaccggaagaagcttaaggaggtgtggaaacctgccgtgcggtctggcggatctggcggaggctcctagccagagcctggtgaccttcggcgacgtggccgtgaacttcagccaggaggagtgggagtggctgaacagcgcccagaggaacctgtacaggagcgtgatgctggagaactacaggaacctggtgagcctgggcctgtgcgtgagcaagcccgacatgatcagcagcctggagcagaggaaggagccctggatggtgaagaggaagctgaccaggggcaggtgccccgacctgaaggccgtgggatctggctccggcagcggccccaagaaaaagagaaaagtctaagctgccttctgcggggcttgccttctggccatgcccttcttctctcccttgcacctgtacctcttggtctttgaataaagcctgagtaggaaggctagcaaaaaaaaaaaaaaaaaaaaaaaaaaaaaaaaaaaaaaaaaaaaaaaaaaaaaaaaaaaaaaaaaaaaaaaaaaaaaaaa

SEQ ID NO: 15574 - RNA, 9485 nt, synthetic construct
  source 1..9485: mol_type = other RNA
aggaaataagagagaaaagaagagtaagaagaaatataagagccaccatggcccctaagaagaagcgtaaagtgagccggatggaacgcctcgtctacgaggtgcggcagaagtgcagaaacatcgaggacatctgcatctcctgcggatctctgaacgtgaccctggagcacccactgttcatcggcggcatgtgccagaactgtaaaaactgttttctggagtgtgcctatcaatacgacgatgacggctaccagagctactgcaccatctgttgcggcggaagagaggtgctgatgtgtggaaataacaactgctgccggtgcttctgcgtggaatgcgtggacctgctggtgggccccggcgccgcccaggccgctattaaggaagatccttggaactgctacatgtgcggccacaagggcacatacggcctgctgagacggagagaggactggcctagcagactgcagatgttcttcgccaataaccacgaccaggagttcgacccccctaaggtgtaccctcccgtccccgccgagaagagaaagcccatccgggtcctgagcctgttcgatggcatcgccaccggtctgctggtgctgaaggacctgggcatccaggtggataggtacattgcctccgaggtgtgcgaggactccatcaccgtgggaatggtgcgtcatcagggcaagatcatgtacgtgggcgacgtgcggagcgtgacacagaagcatatccaggagtggggccctttcgacctggtgatcggcggcagcccttgcaatgacctgagcatcgtgaacccagcccggaagggcctgtacgagggaaccggcagactgttcttcgagttttacagactgctgcacgacgcccggcctaaggaaggcgacgaccggcccttcttttggctgttcgagaatgtggtggccatgggagtcagcgacaagcgggatattagccggttcctggagagcaaccccgtgatgatcgatgccaaggaagtgagcgccgcccaccgggccagatacttctggggcaatctgcctggcatgaacagacccctggccagcaccgtgaacgacaagctggagctgcaggagtgcctggagcacggccggatcgccaagttcagcaaggtgagaaccatcaccacccgaagcaacagcatcaaacaaggcaaggaccagcactttcctgtgttcatgaacgagaaggaggacatcctgtggtgtaccgagatggagagagtgttcgggttcccagtccactacacagatgtcagcaacatgtctagactggccagacagagactgctgggaagaagctggtccgtccctgtgatcagacacctgttcgcccctctgaaggagtacttcgcctgcgtgagcagcggcaacagcaacgccaacagccggggccccagcttctctagcggcctggtgccactgtccctgagagggagccacatgggccccatggagatctacaaaaccgtgagcgcctggaagcggcagcctgtgcgcgtgctgagcctgtttcggaatatcgataaagtcctgaaaagcctgggattcctggagagcggctctggctccggcggtggcaccctgaagtacgtggaggatgtgacaaacgtggtcagacgggatgtggagaagtggggccccttcgatctggtgtacggcagcacccaacccctgggcagctcttgtgaccggtgccctggctggtacatgtttcagttccaccggatcctgcagtacgccctgccgagacaggagtcccagcggccattcttttggattttcatggacaacttgctgctgaccgaggatgaccaggaaactaccactcggttcctgcagaccgaagccgtgaccctgcaggacgtgagaggccgggactaccagaacgccatgcgggtgtggtccaacatccctggactgaaaagcaagcacgcacctctgacccctaaagaagaggagtacctgcaggcccaggtgcggagcagaagcaagctggacgcccctaaggtggatctgctggtgaagaattgcctcctgcccctgagagagtacttcaagtatttcagccagaatagtctgcccctgggaggcagcggcggcggcgccctggtgacatttgaggacgtcgccgtgcggttcacccaggaggaatgggctctgctggatccttctcagaaaatcctgtaccgggacgtgatgagagagacataccggaatctgacctccgtgggcatcaactgggaatgttgggaccttgaagcctgcttcagaagcctgggaagaaacctgagagtgcaggtggtgaagagaaagtgcgagctgaccaacagcggcccctgcgccgagggcggcccaagcagcggcgcccctcctcccagcggcggcagcccagccggctccccaacctctaccgaggagggcacctctgagtccgccacccccgagagcggccctggcacctccaccgagcccagcgagggcagcgcacccggcagccctgccggcagccccacctccacagaggagggaaccagcaccgagcccagcgaaggcagcgccccaggcaccagcaccgagcctagtgagcaggagattaaacggatcaacaagatcagaagaagacttgtgaaagacagcaacaccaagaaggccggcaagacaggccccatgaaaaccctgctggttagagtgatgacacccgatctgagagagcggctggaaaacctgagaaagaagcctgaaaatatcccccagcccatcagcaatacatctagagccaacctgaataagctgctgaccgattacaccgaaatgaagaaggcgatcctgcatgtgtactgggaagagttccagaaggaccctgtgggcctgatgagccgggtggcccagcctgccagcaagaagatcgatcagaacaagctgaaacctgagatggacgagaagggcaacctgaccaccgccggctttgcctgctctcagtgtggccagcccctgttcgtgtacaagctggagcaggtgtctgagaagggcaaggcttacaccaactacttcggacggtgcaatgtggccgagcacgaaaagctgatcctgctggcccagctgaagcccgagaaggatagcgacgaagccgtgacatatagcctgggaaagtttgggcagagggccctggatttctacagcattcatgtgaccaaggagtccacccaccccgtgaagcccctggcccagatcgccggaaacagatacgcctccggacctgtgggaaaggccctgagcgacgcatgtatgggcacaatcgcctccttcctgtctaagtaccaggacatcatcatcgaacaccagaaggtggtgaagggcaaccagaagagactggagagcctgcgggagctggccggcaaggaaaacctggaataccctagcgtgaccctgccacctcagcctcacaccaaggagggcgttgatgcctacaacgaagtgatcgcccgggtgcgaatgtgggtgaacctgaacctgtggcagaagctgaagctaagcagagatgatgccaagcctctgctgagactgaagggattcccttcctttcctctggtcgagagacaggccaacgaagtggactggtgggacatggtgtgtaacgtgaagaagctgatcaacgagaaaaaggaggatggcaaggtgttttggcagaatctggctggctacaagagacaggaagccctgagaccatacctgagcagcgaggaagatcggaagaagggaaagaaattcgctcggtaccagctgggcgacctgctgctgcacctggaaaagaagcacggcgaggactggggaaaggtgtacgacgaggcctgggagcggattgacaagaaagtggaaggcctgagcaagcacatcaagctggaagaggaacggagaagcgaggacgcccagagcaaggccgccctgaccgactggctgcgggctaaggccagcttcgtgatcgagggcctgaaggaggccgacaaggacgagttctgcagatgcgagctgaagctgcagaagtggtacggggacctgcggggaaagcccttcgccatcgaagccgagaacagcatcctggacatcagcggcttcagcaagcagtacaactgtgccttcatctggcagaaggacggcgtgaagaagctgaacctgtacctgatcatcaactacttcaagggcggcaagctgcggttcaagaagatcaaacctgaagccttcgaagccaacagattctacaccgtgatcaacaaaaagagcggcgagatcgtgcccatggaggtgaacttcaacttcgacgaccccaacctgatcatcctgcctctggcctttggcaagagacagggcagagaattcatctggaacgacctgctgtccctggaaaccggcagcctgaagctggccaacggaagagtgatcgagaagacactgtacaacagaagaacccggcaggatgagcctgccctgttcgtggccctgaccttcgagcggcgggaggtcctggactcctccaatatcaaaccaatgaacctgatcggcgtggcaagaggcgaaaacatccccgccgtgatcgccctgaccgaccccgagggctgcccactgagccggtttaaggatagcctgggaaacccaacccacatcctgagaatcggcgagagctataaggagaagcagcggaccatccaggccaagaaggaggtggagcagcggagagccggcggctacagccggaagtacgccagcaaagccaagaatctggcagacgatatggtgagaaacaccgctagagatctgctgtactacgccgtgacccaggatgccatgctgatcttcgccaacctgagccggggcttcggccggcagggcaagcggaccttcatggccgagagacagtacacacggatggaggactggctgaccgccaagctggcctacgagggcctgagcaagacctacctgtccaagacactggcccagtacacctccaagacatgcagcaactgtgggtttaccatcaccagcgccgactacgacagggtgctggagaagctgaagaagacagcaacaggctggatgaccacaattaacggcaaggagctgaaggtggagggccagattacctactacaacagatacaagagacagaacgtagtcaaggacctgtccgtcgagctggatagactgagcgaagaatctgtgaacaacgacatctcctcctggacaaagggcagaagcggagaagctctgagcctcctgaagaaaagattctcccatagacccgtgcaggagaagttcgtgtgcctgaactgcggcttcgagacacacgcagccgagcaagccgccctgaacatcgccagatcctggctgttcctgcggagccaggagtacaagaaataccagacaaacaagacaaccggcaacaccgataagagagccttcgtcgagacctggcagtccttttaccggaagaagcttaaggaggtgtggaaacctgccgtgcggtctggcggatctggcggaggctccgaggagctgcccgtggtgttcgaggacgtggccgtgtacttcaccagggaggagtggggcatgctggtgaagaggcagaaggagctgtacagggacgtgatgaggatgaactacgagctgctggccgccctgggccccgccgccgccaagcccgacctgatcagcaagctggagaggagggccgccccctggatcaaggaccccaacaggcccaagtggggcaagggcaggcccctgggcaagggcggcccaagcagcggcgcccctcctcccagcggcggcagcccagccggctccccaacctctaccgaggagggcacctctgagtccgccacccccgagagcggccctggcacctccaccgagcccagcgagggcagcgcacccggcagccctgccggcagccccacctccacagaggagggaaccagcaccgagcccagcgaaggcagcgccccaggcaccagcaccgagcctagtgagcaggagattaaacggatcaacaagatcagaagaagacttgtgaaagacagcaacaccaagaaggccggcaagacaggccccatgaaaaccctgctggttagagtgatgacacccgatctgagagagcggctggaaaacctgagaaagaagcctgaaaatatcccccagcccatcagcaatacatctagagccaacctgaataagctgctgaccgattacaccgaaatgaagaaggcgatcctgcatgtgtactgggaagagttccagaaggaccctgtgggcctgatgagccgggtggcccagcctgccagcaagaagatcgatcagaacaagctgaaacctgagatggacgagaagggcaacctgaccaccgccggctttgcctgctctcagtgtggccagcccctgttcgtgtacaagctggagcaggtgtctgagaagggcaaggcttacaccaactacttcggacggtgcaatgtggccgagcacgaaaagctgatcctgctggcccagctgaagcccgagaaggatagcgacgaagccgtgacatatagcctgggaaagtttgggcagagggccctggatttctacagcattcatgtgaccaaggagtccacccaccccgtgaagcccctggcccagatcgccggaaacagatacgcctccggacctgtgggaaaggccctgagcgacgcatgtatgggcacaatcgcctccttcctgtctaagtaccaggacatcatcatcgaacaccagaaggtggtgaagggcaaccagaagagactggagagcctgcgggagctggccggcaaggaaaacctggaataccctagcgtgaccctgccacctcagcctcacaccaaggagggcgttgatgcctacaacgaagtgatcgcccgggtgcgaatgtgggtgaacctgaacctgtggcagaagctgaagctaagcagagatgatgccaagcctctgctgagactgaagggattcccttcctttcctctggtcgagagacaggccaacgaagtggactggtgggacatggtgtgtaacgtgaagaagctgatcaacgagaaaaaggaggatggcaaggtgttttggcagaatctggctggctacaagagacaggaagccctgagaccatacctgagcagcgaggaagatcggaagaagggaaagaaattcgctcggtaccagctgggcgacctgctgctgcacctggaaaagaagcacggcgaggactggggaaaggtgtacgacgaggcctgggagcggattgacaagaaagtggaaggcctgagcaagcacatcaagctggaagaggaacggagaagcgaggacgcccagagcaaggccgccctgaccgactggctgcgggctaaggccagcttcgtgatcgagggcctgaaggaggccgacaaggacgagttctgcagatgcgagctgaagctgcagaagtggtacggggacctgcggggaaagcccttcgccatcgaagccgagaacagcatcctggacatcagcggcttcagcaagcagtacaactgtgccttcatctggcagaaggacggcgtgaagaagctgaacctgtacctgatcatcaactacttcaagggcggcaagctgcggttcaagaagatcaaacctgaagccttcgaagccaacagattctacaccgtgatcaacaaaaagagcggcgagatcgtgcccatggaggtgaacttcaacttcgacgaccccaacctgatcatcctgcctctggcctttggcaagagacagggcagagaattcatctggaacgacctgctgtccctggaaaccggcagcctgaagctggccaacggaagagtgatcgagaagacactgtacaacagaagaacccggcaggatgagcctgccctgttcgtggccctgaccttcgagcggcgggaggtcctggactcctccaatatcaaaccaatgaacctgatcggcgtggcaagaggcgaaaacatccccgccgtgatcgccctgaccgaccccgagggctgcccactgagccggtttaaggatagcctgggaaacccaacccacatcctgagaatcggcgagagctataaggagaagcagcggaccatccaggccaagaaggaggtggagcagcggagagccggcggctacagccggaagtacgccagcaaagccaagaatctggcagacgatatggtgagaaacaccgctagagatctgctgtactacgccgtgacccaggatgccatgctgatcttcgccaacctgagccggggcttcggccggcagggcaagcggaccttcatggccgagagacagtacacacggatggaggactggctgaccgccaagctggcctacgagggcctgagcaagacctacctgtccaagacactggcccagtacacctccaagacatgcagcaactgtgggtttaccatcaccagcgccgactacgacagggtgctggagaagctgaagaagacagcaacaggctggatgaccacaattaacggcaaggagctgaaggtggagggccagattacctactacaacagatacaagagacagaacgtagtcaaggacctgtccgtcgagctggatagactgagcgaagaatctgtgaacaacgacatctcctcctggacaaagggcagaagcggagaagctctgagcctcctgaagaaaagattctcccatagacccgtgcaggagaagttcgtgtgcctgaactgcggcttcgagacacacgcagccgagcaagccgccctgaacatcgccagatcctggctgttcctgcggagccaggagtacaagaaataccagacaaacaagacaaccggcaacaccgataagagagccttcgtcgagacctggcagtccttttaccggaagaagcttaaggaggtgtggaaacctgccgtgcggtctggcggatctggcggaggctcctgaggagctgcccgtggtgttcgaggacgtggccgtgtacttcaccagggaggagtggggcatgctggtgaagaggcagaaggagctgtacagggacgtgatgaggatgaactacgagctgctggccgccctgggccccgccgccgccaagcccgacctgatcagcaagctggagaggagggccgccccctggatcaaggaccccaacaggcccaagtggggcaagggcaggcccctgggcaagggatctggctccggcagcggccccaagaaaaagagaaaagtctaagctgccttctgcggggcttgccttctggccatgcccttcttctctcccttgcacctgtacctcttggtctttgaataaagcctgagtaggaaggctagcaaaaaaaaaaaaaaaaaaaaaaaaaaaaaaaaaaaaaaaaaaaaaaaaaaaaaaaaaaaaaaaaaaaaaaaaaaaaaaaa

SEQ ID NO: 15575 - RNA, 9485 nt, synthetic construct
  source 1..9485: mol_type = other RNA
aggaaataagagagaaaagaagagtaagaagaaatataagagccaccatggcccctaagaagaagcgtaaagtgagccggatggaacgcctcgtctacgaggtgcggcagaagtgcagaaacatcgaggacatctgcatctcctgcggatctctgaacgtgaccctggagcacccactgttcatcggcggcatgtgccagaactgtaaaaactgttttctggagtgtgcctatcaatacgacgatgacggctaccagagctactgcaccatctgttgcggcggaagagaggtgctgatgtgtggaaataacaactgctgccggtgcttctgcgtggaatgcgtggacctgctggtgggccccggcgccgcccaggccgctattaaggaagatccttggaactgctacatgtgcggccacaagggcacatacggcctgctgagacggagagaggactggcctagcagactgcagatgttcttcgccaataaccacgaccaggagttcgacccccctaaggtgtaccctcccgtccccgccgagaagagaaagcccatccgggtcctgagcctgttcgatggcatcgccaccggtctgctggtgctgaaggacctgggcatccaggtggataggtacattgcctccgaggtgtgcgaggactccatcaccgtgggaatggtgcgtcatcagggcaagatcatgtacgtgggcgacgtgcggagcgtgacacagaagcatatccaggagtggggccctttcgacctggtgatcggcggcagcccttgcaatgacctgagcatcgtgaacccagcccggaagggcctgtacgagggaaccggcagactgttcttcgagttttacagactgctgcacgacgcccggcctaaggaaggcgacgaccggcccttcttttggctgttcgagaatgtggtggccatgggagtcagcgacaagcgggatattagccggttcctggagagcaaccccgtgatgatcgatgccaaggaagtgagcgccgcccaccgggccagatacttctggggcaatctgcctggcatgaacagacccctggccagcaccgtgaacgacaagctggagctgcaggagtgcctggagcacggccggatcgccaagttcagcaaggtgagaaccatcaccacccgaagcaacagcatcaaacaaggcaaggaccagcactttcctgtgttcatgaacgagaaggaggacatcctgtggtgtaccgagatggagagagtgttcgggttcccagtccactacacagatgtcagcaacatgtctagactggccagacagagactgctgggaagaagctggtccgtccctgtgatcagacacctgttcgcccctctgaaggagtacttcgcctgcgtgagcagcggcaacagcaacgccaacagccggggccccagcttctctagcggcctggtgccactgtccctgagagggagccacatgggccccatggagatctacaaaaccgtgagcgcctggaagcggcagcctgtgcgcgtgctgagcctgtttcggaatatcgataaagtcctgaaaagcctgggattcctggagagcggctctggctccggcggtggcaccctgaagtacgtggaggatgtgacaaacgtggtcagacgggatgtggagaagtggggccccttcgatctggtgtacggcagcacccaacccctgggcagctcttgtgaccggtgccctggctggtacatgtttcagttccaccggatcctgcagtacgccctgccgagacaggagtcccagcggccattcttttggattttcatggacaacttgctgctgaccgaggatgaccaggaaactaccactcggttcctgcagaccgaagccgtgaccctgcaggacgtgagaggccgggactaccagaacgccatgcgggtgtggtccaacatccctggactgaaaagcaagcacgcacctctgacccctaaagaagaggagtacctgcaggcccaggtgcggagcagaagcaagctggacgcccctaaggtggatctgctggtgaagaattgcctcctgcccctgagagagtacttcaagtatttcagccagaatagtctgcccctgggaggcagcggcggcggcgccctggtgacatttgaggacgtcgccgtgcggttcacccaggaggaatgggctctgctggatccttctcagaaaatcctgtaccgggacgtgatgagagagacataccggaatctgacctccgtgggcatcaactgggaatgttgggaccttgaagcctgcttcagaagcctgggaagaaacctgagagtgcaggtggtgaagagaaagtgcgagctgaccaacagcggcccctgcgccgagggcggcccaagcagcggcgcccctcctcccagcggcggcagcccagccggctccccaacctctaccgaggagggcacctctgagtccgccacccccgagagcggccctggcacctccaccgagcccagcgagggcagcgcacccggcagccctgccggcagccccacctccacagaggagggaaccagcaccgagcccagcgaaggcagcgccccaggcaccagcaccgagcctagtgagcaggagattaaacggatcaacaagatcagaagaagacttgtgaaagacagcaacaccaagaaggccggcaagacaggccccatgaaaaccctgctggttagagtgatgacacccgatctgagagagcggctggaaaacctgagaaagaagcctgaaaatatcccccagcccatcagcaatacatctagagccaacctgaataagctgctgaccgattacaccgaaatgaagaaggcgatcctgcatgtgtactgggaagagttccagaaggaccctgtgggcctgatgagccgggtggcccagcctgccagcaagaagatcgatcagaacaagctgaaacctgagatggacgagaagggcaacctgaccaccgccggctttgcctgctctcagtgtggccagcccctgttcgtgtacaagctggagcaggtgtctgagaagggcaaggcttacaccaactacttcggacggtgcaatgtggccgagcacgaaaagctgatcctgctggcccagctgaagcccgagaaggatagcgacgaagccgtgacatatagcctgggaaagtttgggcagagggccctggatttctacagcattcatgtgaccaaggagtccacccaccccgtgaagcccctggcccagatcgccggaaacagatacgcctccggacctgtgggaaaggccctgagcgacgcatgtatgggcacaatcgcctccttcctgtctaagtaccaggacatcatcatcgaacaccagaaggtggtgaagggcaaccagaagagactggagagcctgcgggagctggccggcaaggaaaacctggaataccctagcgtgaccctgccacctcagcctcacaccaaggagggcgttgatgcctacaacgaagtgatcgcccgggtgcgaatgtgggtgaacctgaacctgtggcagaagctgaagctaagcagagatgatgccaagcctctgctgagactgaagggattcccttcctttcctctggtcgagagacaggccaacgaagtggactggtgggacatggtgtgtaacgtgaagaagctgatcaacgagaaaaaggaggatggcaaggtgttttggcagaatctggctggctacaagagacaggaagccctgagaccatacctgagcagcgaggaagatcggaagaagggaaagaaattcgctcggtaccagctgggcgacctgctgctgcacctggaaaagaagcacggcgaggactggggaaaggtgtacgacgaggcctgggagcggattgacaagaaagtggaaggcctgagcaagcacatcaagctggaagaggaacggagaagcgaggacgcccagagcaaggccgccctgaccgactggctgcgggctaaggccagcttcgtgatcgagggcctgaaggaggccgacaaggacgagttctgcagatgcgagctgaagctgcagaagtggtacggggacctgcggggaaagcccttcgccatcgaagccgagaacagcatcctggacatcagcggcttcagcaagcagtacaactgtgccttcatctggcagaaggacggcgtgaagaagctgaacctgtacctgatcatcaactacttcaagggcggcaagctgcggttcaagaagatcaaacctgaagccttcgaagccaacagattctacaccgtgatcaacaaaaagagcggcgagatcgtgcccatggaggtgaacttcaacttcgacgaccccaacctgatcatcctgcctctggcctttggcaagagacagggcagagaattcatctggaacgacctgctgtccctggaaaccggcagcctgaagctggccaacggaagagtgatcgagaagacactgtacaacagaagaacccggcaggatgagcctgccctgttcgtggccctgaccttcgagcggcgggaggtcctggactcctccaatatcaaaccaatgaacctgatcggcgtggcaagaggcgaaaacatccccgccgtgatcgccctgaccgaccccgagggctgcccactgagccggtttaaggatagcctgggaaacccaacccacatcctgagaatcggcgagagctataaggagaagcagcggaccatccaggccaagaaggaggtggagcagcggagagccggcggctacagccggaagtacgccagcaaagccaagaatctggcagacgatatggtgagaaacaccgctagagatctgctgtactacgccgtgacccaggatgccatgctgatcttcgccaacctgagccggggcttcggccggcagggcaagcggaccttcatggccgagagacagtacacacggatggaggactggctgaccgccaagctggcctacgagggcctgagcaagacctacctgtccaagacactggcccagtacacctccaagacatgcagcaactgtgggtttaccatcaccagcgccgactacgacagggtgctggagaagctgaagaagacagcaacaggctggatgaccacaattaacggcaaggagctgaaggtggagggccagattacctactacaacagatacaagagacagaacgtagtcaaggacctgtccgtcgagctggatagactgagcgaagaatctgtgaacaacgacatctcctcctggacaaagggcagaagcggagaagctctgagcctcctgaagaaaagattctcccatagacccgtgcaggagaagttcgtgtgcctgaactgcggcttcgagacacacgcagccgagcaagccgccctgaacatcgccagatcctggctgttcctgcggagccaggagtacaagaaataccagacaaacaagacaaccggcaacaccgataagagagccttcgtcgagacctggcagtccttttaccggaagaagcttaaggaggtgtggaaacctgccgtgcggtctggcggatctggcggaggctccccccagaagagcgtgaccttcgaggacgtggccgtgtacttcacccagaccgagtgggacggcctgagccccgcccagagggccctgtacagggacgtgatgctggagaactacggcaacgtggccagcctgggcttcagcctgctgaagcccgccgtgatcagccagctggagggcgccggcgagctgggcaggcccagccccctggtggccggcaccgagatcggcctgcagggcctgtggggcggcccaagcagcggcgcccctcctcccagcggcggcagcccagccggctccccaacctctaccgaggagggcacctctgagtccgccacccccgagagcggccctggcacctccaccgagcccagcgagggcagcgcacccggcagccctgccggcagccccacctccacagaggagggaaccagcaccgagcccagcgaaggcagcgccccaggcaccagcaccgagcctagtgagcaggagattaaacggatcaacaagatcagaagaagacttgtgaaagacagcaacaccaagaaggccggcaagacaggccccatgaaaaccctgctggttagagtgatgacacccgatctgagagagcggctggaaaacctgagaaagaagcctgaaaatatcccccagcccatcagcaatacatctagagccaacctgaataagctgctgaccgattacaccgaaatgaagaaggcgatcctgcatgtgtactgggaagagttccagaaggaccctgtgggcctgatgagccgggtggcccagcctgccagcaagaagatcgatcagaacaagctgaaacctgagatggacgagaagggcaacctgaccaccgccggctttgcctgctctcagtgtggccagcccctgttcgtgtacaagctggagcaggtgtctgagaagggcaaggcttacaccaactacttcggacggtgcaatgtggccgagcacgaaaagctgatcctgctggcccagctgaagcccgagaaggatagcgacgaagccgtgacatatagcctgggaaagtttgggcagagggccctggatttctacagcattcatgtgaccaaggagtccacccaccccgtgaagcccctggcccagatcgccggaaacagatacgcctccggacctgtgggaaaggccctgagcgacgcatgtatgggcacaatcgcctccttcctgtctaagtaccaggacatcatcatcgaacaccagaaggtggtgaagggcaaccagaagagactggagagcctgcgggagctggccggcaaggaaaacctggaataccctagcgtgaccctgccacctcagcctcacaccaaggagggcgttgatgcctacaacgaagtgatcgcccgggtgcgaatgtgggtgaacctgaacctgtggcagaagctgaagctaagcagagatgatgccaagcctctgctgagactgaagggattcccttcctttcctctggtcgagagacaggccaacgaagtggactggtgggacatggtgtgtaacgtgaagaagctgatcaacgagaaaaaggaggatggcaaggtgttttggcagaatctggctggctacaagagacaggaagccctgagaccatacctgagcagcgaggaagatcggaagaagggaaagaaattcgctcggtaccagctgggcgacctgctgctgcacctggaaaagaagcacggcgaggactggggaaaggtgtacgacgaggcctgggagcggattgacaagaaagtggaaggcctgagcaagcacatcaagctggaagaggaacggagaagcgaggacgcccagagcaaggccgccctgaccgactggctgcgggctaaggccagcttcgtgatcgagggcctgaaggaggccgacaaggacgagttctgcagatgcgagctgaagctgcagaagtggtacggggacctgcggggaaagcccttcgccatcgaagccgagaacagcatcctggacatcagcggcttcagcaagcagtacaactgtgccttcatctggcagaaggacggcgtgaagaagctgaacctgtacctgatcatcaactacttcaagggcggcaagctgcggttcaagaagatcaaacctgaagccttcgaagccaacagattctacaccgtgatcaacaaaaagagcggcgagatcgtgcccatggaggtgaacttcaacttcgacgaccccaacctgatcatcctgcctctggcctttggcaagagacagggcagagaattcatctggaacgacctgctgtccctggaaaccggcagcctgaagctggccaacggaagagtgatcgagaagacactgtacaacagaagaacccggcaggatgagcctgccctgttcgtggccctgaccttcgagcggcgggaggtcctggactcctccaatatcaaaccaatgaacctgatcggcgtggcaagaggcgaaaacatccccgccgtgatcgccctgaccgaccccgagggctgcccactgagccggtttaaggatagcctgggaaacccaacccacatcctgagaatcggcgagagctataaggagaagcagcggaccatccaggccaagaaggaggtggagcagcggagagccggcggctacagccggaagtacgccagcaaagccaagaatctggcagacgatatggtgagaaacaccgctagagatctgctgtactacgccgtgacccaggatgccatgctgatcttcgccaacctgagccggggcttcggccggcagggcaagcggaccttcatggccgagagacagtacacacggatggaggactggctgaccgccaagctggcctacgagggcctgagcaagacctacctgtccaagacactggcccagtacacctccaagacatgcagcaactgtgggtttaccatcaccagcgccgactacgacagggtgctggagaagctgaagaagacagcaacaggctggatgaccacaattaacggcaaggagctgaaggtggagggccagattacctactacaacagatacaagagacagaacgtagtcaaggacctgtccgtcgagctggatagactgagcgaagaatctgtgaacaacgacatctcctcctggacaaagggcagaagcggagaagctctgagcctcctgaagaaaagattctcccatagacccgtgcaggagaagttcgtgtgcctgaactgcggcttcgagacacacgcagccgagcaagccgccctgaacatcgccagatcctggctgttcctgcggagccaggagtacaagaaataccagacaaacaagacaaccggcaacaccgataagagagccttcgtcgagacctggcagtccttttaccggaagaagcttaaggaggtgtggaaacctgccgtgcggtctggcggatctggcggaggctcctccccagaagagcgtgaccttcgaggacgtggccgtgtacttcacccagaccgagtgggacggcctgagccccgcccagagggccctgtacagggacgtgatgctggagaactacggcaacgtggccagcctgggcttcagcctgctgaagcccgccgtgatcagccagctggagggcgccggcgagctgggcaggcccagccccctggtggccggcaccgagatcggcctgcagggcctgtggggatctggctccggcagcggccccaagaaaaagagaaaagtctaagctgccttctgcggggcttgccttctggccatgcccttcttctctcccttgcacctgtacctcttggtctttgaataaagcctgagtaggaaggctagcaaaaaaaaaaaaaaaaaaaaaaaaaaaaaaaaaaaaaaaaaaaaaaaaaaaaaaaaaaaaaaaaaaaaaaaaaaaaaaaa

SEQ ID NO: 15576 - RNA, 9485 nt, synthetic construct
  source 1..9485: mol_type = other RNA
aggaaataagagagaaaagaagagtaagaagaaatataagagccaccatggcccctaagaagaagcgtaaagtgagccggatggaacgcctcgtctacgaggtgcggcagaagtgcagaaacatcgaggacatctgcatctcctgcggatctctgaacgtgaccctggagcacccactgttcatcggcggcatgtgccagaactgtaaaaactgttttctggagtgtgcctatcaatacgacgatgacggctaccagagctactgcaccatctgttgcggcggaagagaggtgctgatgtgtggaaataacaactgctgccggtgcttctgcgtggaatgcgtggacctgctggtgggccccggcgccgcccaggccgctattaaggaagatccttggaactgctacatgtgcggccacaagggcacatacggcctgctgagacggagagaggactggcctagcagactgcagatgttcttcgccaataaccacgaccaggagttcgacccccctaaggtgtaccctcccgtccccgccgagaagagaaagcccatccgggtcctgagcctgttcgatggcatcgccaccggtctgctggtgctgaaggacctgggcatccaggtggataggtacattgcctccgaggtgtgcgaggactccatcaccgtgggaatggtgcgtcatcagggcaagatcatgtacgtgggcgacgtgcggagcgtgacacagaagcatatccaggagtggggccctttcgacctggtgatcggcggcagcccttgcaatgacctgagcatcgtgaacccagcccggaagggcctgtacgagggaaccggcagactgttcttcgagttttacagactgctgcacgacgcccggcctaaggaaggcgacgaccggcccttcttttggctgttcgagaatgtggtggccatgggagtcagcgacaagcgggatattagccggttcctggagagcaaccccgtgatgatcgatgccaaggaagtgagcgccgcccaccgggccagatacttctggggcaatctgcctggcatgaacagacccctggccagcaccgtgaacgacaagctggagctgcaggagtgcctggagcacggccggatcgccaagttcagcaaggtgagaaccatcaccacccgaagcaacagcatcaaacaaggcaaggaccagcactttcctgtgttcatgaacgagaaggaggacatcctgtggtgtaccgagatggagagagtgttcgggttcccagtccactacacagatgtcagcaacatgtctagactggccagacagagactgctgggaagaagctggtccgtccctgtgatcagacacctgttcgcccctctgaaggagtacttcgcctgcgtgagcagcggcaacagcaacgccaacagccggggccccagcttctctagcggcctggtgccactgtccctgagagggagccacatgggccccatggagatctacaaaaccgtgagcgcctggaagcggcagcctgtgcgcgtgctgagcctgtttcggaatatcgataaagtcctgaaaagcctgggattcctggagagcggctctggctccggcggtggcaccctgaagtacgtggaggatgtgacaaacgtggtcagacgggatgtggagaagtggggccccttcgatctggtgtacggcagcacccaacccctgggcagctcttgtgaccggtgccctggctggtacatgtttcagttccaccggatcctgcagtacgccctgccgagacaggagtcccagcggccattcttttggattttcatggacaacttgctgctgaccgaggatgaccaggaaactaccactcggttcctgcagaccgaagccgtgaccctgcaggacgtgagaggccgggactaccagaacgccatgcgggtgtggtccaacatccctggactgaaaagcaagcacgcacctctgacccctaaagaagaggagtacctgcaggcccaggtgcggagcagaagcaagctggacgcccctaaggtggatctgctggtgaagaattgcctcctgcccctgagagagtacttcaagtatttcagccagaatagtctgcccctgggaggcagcggcggcggcgccctggtgacatttgaggacgtcgccgtgcggttcacccaggaggaatgggctctgctggatccttctcagaaaatcctgtaccgggacgtgatgagagagacataccggaatctgacctccgtgggcatcaactgggaatgttgggaccttgaagcctgcttcagaagcctgggaagaaacctgagagtgcaggtggtgaagagaaagtgcgagctgaccaacagcggcccctgcgccgagggcggcccaagcagcggcgcccctcctcccagcggcggcagcccagccggctccccaacctctaccgaggagggcacctctgagtccgccacccccgagagcggccctggcacctccaccgagcccagcgagggcagcgcacccggcagccctgccggcagccccacctccacagaggagggaaccagcaccgagcccagcgaaggcagcgccccaggcaccagcaccgagcctagtgagcaggagattaaacggatcaacaagatcagaagaagacttgtgaaagacagcaacaccaagaaggccggcaagacaggccccatgaaaaccctgctggttagagtgatgacacccgatctgagagagcggctggaaaacctgagaaagaagcctgaaaatatcccccagcccatcagcaatacatctagagccaacctgaataagctgctgaccgattacaccgaaatgaagaaggcgatcctgcatgtgtactgggaagagttccagaaggaccctgtgggcctgatgagccgggtggcccagcctgccagcaagaagatcgatcagaacaagctgaaacctgagatggacgagaagggcaacctgaccaccgccggctttgcctgctctcagtgtggccagcccctgttcgtgtacaagctggagcaggtgtctgagaagggcaaggcttacaccaactacttcggacggtgcaatgtggccgagcacgaaaagctgatcctgctggcccagctgaagcccgagaaggatagcgacgaagccgtgacatatagcctgggaaagtttgggcagagggccctggatttctacagcattcatgtgaccaaggagtccacccaccccgtgaagcccctggcccagatcgccggaaacagatacgcctccggacctgtgggaaaggccctgagcgacgcatgtatgggcacaatcgcctccttcctgtctaagtaccaggacatcatcatcgaacaccagaaggtggtgaagggcaaccagaagagactggagagcctgcgggagctggccggcaaggaaaacctggaataccctagcgtgaccctgccacctcagcctcacaccaaggagggcgttgatgcctacaacgaagtgatcgcccgggtgcgaatgtgggtgaacctgaacctgtggcagaagctgaagctaagcagagatgatgccaagcctctgctgagactgaagggattcccttcctttcctctggtcgagagacaggccaacgaagtggactggtgggacatggtgtgtaacgtgaagaagctgatcaacgagaaaaaggaggatggcaaggtgttttggcagaatctggctggctacaagagacaggaagccctgagaccatacctgagcagcgaggaagatcggaagaagggaaagaaattcgctcggtaccagctgggcgacctgctgctgcacctggaaaagaagcacggcgaggactggggaaaggtgtacgacgaggcctgggagcggattgacaagaaagtggaaggcctgagcaagcacatcaagctggaagaggaacggagaagcgaggacgcccagagcaaggccgccctgaccgactggctgcgggctaaggccagcttcgtgatcgagggcctgaaggaggccgacaaggacgagttctgcagatgcgagctgaagctgcagaagtggtacggggacctgcggggaaagcccttcgccatcgaagccgagaacagcatcctggacatcagcggcttcagcaagcagtacaactgtgccttcatctggcagaaggacggcgtgaagaagctgaacctgtacctgatcatcaactacttcaagggcggcaagctgcggttcaagaagatcaaacctgaagccttcgaagccaacagattctacaccgtgatcaacaaaaagagcggcgagatcgtgcccatggaggtgaacttcaacttcgacgaccccaacctgatcatcctgcctctggcctttggcaagagacagggcagagaattcatctggaacgacctgctgtccctggaaaccggcagcctgaagctggccaacggaagagtgatcgagaagacactgtacaacagaagaacccggcaggatgagcctgccctgttcgtggccctgaccttcgagcggcgggaggtcctggactcctccaatatcaaaccaatgaacctgatcggcgtggcaagaggcgaaaacatccccgccgtgatcgccctgaccgaccccgagggctgcccactgagccggtttaaggatagcctgggaaacccaacccacatcctgagaatcggcgagagctataaggagaagcagcggaccatccaggccaagaaggaggtggagcagcggagagccggcggctacagccggaagtacgccagcaaagccaagaatctggcagacgatatggtgagaaacaccgctagagatctgctgtactacgccgtgacccaggatgccatgctgatcttcgccaacctgagccggggcttcggccggcagggcaagcggaccttcatggccgagagacagtacacacggatggaggactggctgaccgccaagctggcctacgagggcctgagcaagacctacctgtccaagacactggcccagtacacctccaagacatgcagcaactgtgggtttaccatcaccagcgccgactacgacagggtgctggagaagctgaagaagacagcaacaggctggatgaccacaattaacggcaaggagctgaaggtggagggccagattacctactacaacagatacaagagacagaacgtagtcaaggacctgtccgtcgagctggatagactgagcgaagaatctgtgaacaacgacatctcctcctggacaaagggcagaagcggagaagctctgagcctcctgaagaaaagattctcccatagacccgtgcaggagaagttcgtgtgcctgaactgcggcttcgagacacacgcagccgagcaagccgccctgaacatcgccagatcctggctgttcctgcggagccaggagtacaagaaataccagacaaacaagacaaccggcaacaccgataagagagccttcgtcgagacctggcagtccttttaccggaagaagcttaaggaggtgtggaaacctgccgtgcggtctggcggatctggcggaggctccgcccaggaggtggtgagcttcaaggacgtggccgtggacttcaccagggaggagtggaggctgctgagccccccccagaaggagctgtacaaggaggtgatgctggagaacgccaggaacctgctgagcgtgggcctgcccgcccccagcgaggaggtgatcagctacctggagcagagggaggccccctggatcctggagcaggagggcctgaggaactgctgcagcgagggcgagatcaggggcggcccaagcagcggcgcccctcctcccagcggcggcagcccagccggctccccaacctctaccgaggagggcacctctgagtccgccacccccgagagcggccctggcacctccaccgagcccagcgagggcagcgcacccggcagccctgccggcagccccacctccacagaggagggaaccagcaccgagcccagcgaaggcagcgccccaggcaccagcaccgagcctagtgagcaggagattaaacggatcaacaagatcagaagaagacttgtgaaagacagcaacaccaagaaggccggcaagacaggccccatgaaaaccctgctggttagagtgatgacacccgatctgagagagcggctggaaaacctgagaaagaagcctgaaaatatcccccagcccatcagcaatacatctagagccaacctgaataagctgctgaccgattacaccgaaatgaagaaggcgatcctgcatgtgtactgggaagagttccagaaggaccctgtgggcctgatgagccgggtggcccagcctgccagcaagaagatcgatcagaacaagctgaaacctgagatggacgagaagggcaacctgaccaccgccggctttgcctgctctcagtgtggccagcccctgttcgtgtacaagctggagcaggtgtctgagaagggcaaggcttacaccaactacttcggacggtgcaatgtggccgagcacgaaaagctgatcctgctggcccagctgaagcccgagaaggatagcgacgaagccgtgacatatagcctgggaaagtttgggcagagggccctggatttctacagcattcatgtgaccaaggagtccacccaccccgtgaagcccctggcccagatcgccggaaacagatacgcctccggacctgtgggaaaggccctgagcgacgcatgtatgggcacaatcgcctccttcctgtctaagtaccaggacatcatcatcgaacaccagaaggtggtgaagggcaaccagaagagactggagagcctgcgggagctggccggcaaggaaaacctggaataccctagcgtgaccctgccacctcagcctcacaccaaggagggcgttgatgcctacaacgaagtgatcgcccgggtgcgaatgtgggtgaacctgaacctgtggcagaagctgaagctaagcagagatgatgccaagcctctgctgagactgaagggattcccttcctttcctctggtcgagagacaggccaacgaagtggactggtgggacatggtgtgtaacgtgaagaagctgatcaacgagaaaaaggaggatggcaaggtgttttggcagaatctggctggctacaagagacaggaagccctgagaccatacctgagcagcgaggaagatcggaagaagggaaagaaattcgctcggtaccagctgggcgacctgctgctgcacctggaaaagaagcacggcgaggactggggaaaggtgtacgacgaggcctgggagcggattgacaagaaagtggaaggcctgagcaagcacatcaagctggaagaggaacggagaagcgaggacgcccagagcaaggccgccctgaccgactggctgcgggctaaggccagcttcgtgatcgagggcctgaaggaggccgacaaggacgagttctgcagatgcgagctgaagctgcagaagtggtacggggacctgcggggaaagcccttcgccatcgaagccgagaacagcatcctggacatcagcggcttcagcaagcagtacaactgtgccttcatctggcagaaggacggcgtgaagaagctgaacctgtacctgatcatcaactacttcaagggcggcaagctgcggttcaagaagatcaaacctgaagccttcgaagccaacagattctacaccgtgatcaacaaaaagagcggcgagatcgtgcccatggaggtgaacttcaacttcgacgaccccaacctgatcatcctgcctctggcctttggcaagagacagggcagagaattcatctggaacgacctgctgtccctggaaaccggcagcctgaagctggccaacggaagagtgatcgagaagacactgtacaacagaagaacccggcaggatgagcctgccctgttcgtggccctgaccttcgagcggcgggaggtcctggactcctccaatatcaaaccaatgaacctgatcggcgtggcaagaggcgaaaacatccccgccgtgatcgccctgaccgaccccgagggctgcccactgagccggtttaaggatagcctgggaaacccaacccacatcctgagaatcggcgagagctataaggagaagcagcggaccatccaggccaagaaggaggtggagcagcggagagccggcggctacagccggaagtacgccagcaaagccaagaatctggcagacgatatggtgagaaacaccgctagagatctgctgtactacgccgtgacccaggatgccatgctgatcttcgccaacctgagccggggcttcggccggcagggcaagcggaccttcatggccgagagacagtacacacggatggaggactggctgaccgccaagctggcctacgagggcctgagcaagacctacctgtccaagacactggcccagtacacctccaagacatgcagcaactgtgggtttaccatcaccagcgccgactacgacagggtgctggagaagctgaagaagacagcaacaggctggatgaccacaattaacggcaaggagctgaaggtggagggccagattacctactacaacagatacaagagacagaacgtagtcaaggacctgtccgtcgagctggatagactgagcgaagaatctgtgaacaacgacatctcctcctggacaaagggcagaagcggagaagctctgagcctcctgaagaaaagattctcccatagacccgtgcaggagaagttcgtgtgcctgaactgcggcttcgagacacacgcagccgagcaagccgccctgaacatcgccagatcctggctgttcctgcggagccaggagtacaagaaataccagacaaacaagacaaccggcaacaccgataagagagccttcgtcgagacctggcagtccttttaccggaagaagcttaaggaggtgtggaaacctgccgtgcggtctggcggatctggcggaggctcctgcccaggaggtggtgagcttcaaggacgtggccgtggacttcaccagggaggagtggaggctgctgagccccccccagaaggagctgtacaaggaggtgatgctggagaacgccaggaacctgctgagcgtgggcctgcccgcccccagcgaggaggtgatcagctacctggagcagagggaggccccctggatcctggagcaggagggcctgaggaactgctgcagcgagggcgagatcaggggatctggctccggcagcggccccaagaaaaagagaaaagtctaagctgccttctgcggggcttgccttctggccatgcccttcttctctcccttgcacctgtacctcttggtctttgaataaagcctgagtaggaaggctagcaaaaaaaaaaaaaaaaaaaaaaaaaaaaaaaaaaaaaaaaaaaaaaaaaaaaaaaaaaaaaaaaaaaaaaaaaaaaaaaa

SEQ ID NO: 15577 - RNA, 9485 nt, synthetic construct
  source 1..9485: mol_type = other RNA
aggaaataagagagaaaagaagagtaagaagaaatataagagccaccatggcccctaagaagaagcgtaaagtgagccggatggaacgcctcgtctacgaggtgcggcagaagtgcagaaacatcgaggacatctgcatctcctgcggatctctgaacgtgaccctggagcacccactgttcatcggcggcatgtgccagaactgtaaaaactgttttctggagtgtgcctatcaatacgacgatgacggctaccagagctactgcaccatctgttgcggcggaagagaggtgctgatgtgtggaaataacaactgctgccggtgcttctgcgtggaatgcgtggacctgctggtgggccccggcgccgcccaggccgctattaaggaagatccttggaactgctacatgtgcggccacaagggcacatacggcctgctgagacggagagaggactggcctagcagactgcagatgttcttcgccaataaccacgaccaggagttcgacccccctaaggtgtaccctcccgtccccgccgagaagagaaagcccatccgggtcctgagcctgttcgatggcatcgccaccggtctgctggtgctgaaggacctgggcatccaggtggataggtacattgcctccgaggtgtgcgaggactccatcaccgtgggaatggtgcgtcatcagggcaagatcatgtacgtgggcgacgtgcggagcgtgacacagaagcatatccaggagtggggccctttcgacctggtgatcggcggcagcccttgcaatgacctgagcatcgtgaacccagcccggaagggcctgtacgagggaaccggcagactgttcttcgagttttacagactgctgcacgacgcccggcctaaggaaggcgacgaccggcccttcttttggctgttcgagaatgtggtggccatgggagtcagcgacaagcgggatattagccggttcctggagagcaaccccgtgatgatcgatgccaaggaagtgagcgccgcccaccgggccagatacttctggggcaatctgcctggcatgaacagacccctggccagcaccgtgaacgacaagctggagctgcaggagtgcctggagcacggccggatcgccaagttcagcaaggtgagaaccatcaccacccgaagcaacagcatcaaacaaggcaaggaccagcactttcctgtgttcatgaacgagaaggaggacatcctgtggtgtaccgagatggagagagtgttcgggttcccagtccactacacagatgtcagcaacatgtctagactggccagacagagactgctgggaagaagctggtccgtccctgtgatcagacacctgttcgcccctctgaaggagtacttcgcctgcgtgagcagcggcaacagcaacgccaacagccggggccccagcttctctagcggcctggtgccactgtccctgagagggagccacatgggccccatggagatctacaaaaccgtgagcgcctggaagcggcagcctgtgcgcgtgctgagcctgtttcggaatatcgataaagtcctgaaaagcctgggattcctggagagcggctctggctccggcggtggcaccctgaagtacgtggaggatgtgacaaacgtggtcagacgggatgtggagaagtggggccccttcgatctggtgtacggcagcacccaacccctgggcagctcttgtgaccggtgccctggctggtacatgtttcagttccaccggatcctgcagtacgccctgccgagacaggagtcccagcggccattcttttggattttcatggacaacttgctgctgaccgaggatgaccaggaaactaccactcggttcctgcagaccgaagccgtgaccctgcaggacgtgagaggccgggactaccagaacgccatgcgggtgtggtccaacatccctggactgaaaagcaagcacgcacctctgacccctaaagaagaggagtacctgcaggcccaggtgcggagcagaagcaagctggacgcccctaaggtggatctgctggtgaagaattgcctcctgcccctgagagagtacttcaagtatttcagccagaatagtctgcccctgggaggcagcggcggcggcgccctggtgacatttgaggacgtcgccgtgcggttcacccaggaggaatgggctctgctggatccttctcagaaaatcctgtaccgggacgtgatgagagagacataccggaatctgacctccgtgggcatcaactgggaatgttgggaccttgaagcctgcttcagaagcctgggaagaaacctgagagtgcaggtggtgaagagaaagtgcgagctgaccaacagcggcccctgcgccgagggcggcccaagcagcggcgcccctcctcccagcggcggcagcccagccggctccccaacctctaccgaggagggcacctctgagtccgccacccccgagagcggccctggcacctccaccgagcccagcgagggcagcgcacccggcagccctgccggcagccccacctccacagaggagggaaccagcaccgagcccagcgaaggcagcgccccaggcaccagcaccgagcctagtgagcaggagattaaacggatcaacaagatcagaagaagacttgtgaaagacagcaacaccaagaaggccggcaagacaggccccatgaaaaccctgctggttagagtgatgacacccgatctgagagagcggctggaaaacctgagaaagaagcctgaaaatatcccccagcccatcagcaatacatctagagccaacctgaataagctgctgaccgattacaccgaaatgaagaaggcgatcctgcatgtgtactgggaagagttccagaaggaccctgtgggcctgatgagccgggtggcccagcctgccagcaagaagatcgatcagaacaagctgaaacctgagatggacgagaagggcaacctgaccaccgccggctttgcctgctctcagtgtggccagcccctgttcgtgtacaagctggagcaggtgtctgagaagggcaaggcttacaccaactacttcggacggtgcaatgtggccgagcacgaaaagctgatcctgctggcccagctgaagcccgagaaggatagcgacgaagccgtgacatatagcctgggaaagtttgggcagagggccctggatttctacagcattcatgtgaccaaggagtccacccaccccgtgaagcccctggcccagatcgccggaaacagatacgcctccggacctgtgggaaaggccctgagcgacgcatgtatgggcacaatcgcctccttcctgtctaagtaccaggacatcatcatcgaacaccagaaggtggtgaagggcaaccagaagagactggagagcctgcgggagctggccggcaaggaaaacctggaataccctagcgtgaccctgccacctcagcctcacaccaaggagggcgttgatgcctacaacgaagtgatcgcccgggtgcgaatgtgggtgaacctgaacctgtggcagaagctgaagctaagcagagatgatgccaagcctctgctgagactgaagggattcccttcctttcctctggtcgagagacaggccaacgaagtggactggtgggacatggtgtgtaacgtgaagaagctgatcaacgagaaaaaggaggatggcaaggtgttttggcagaatctggctggctacaagagacaggaagccctgagaccatacctgagcagcgaggaagatcggaagaagggaaagaaattcgctcggtaccagctgggcgacctgctgctgcacctggaaaagaagcacggcgaggactggggaaaggtgtacgacgaggcctgggagcggattgacaagaaagtggaaggcctgagcaagcacatcaagctggaagaggaacggagaagcgaggacgcccagagcaaggccgccctgaccgactggctgcgggctaaggccagcttcgtgatcgagggcctgaaggaggccgacaaggacgagttctgcagatgcgagctgaagctgcagaagtggtacggggacctgcggggaaagcccttcgccatcgaagccgagaacagcatcctggacatcagcggcttcagcaagcagtacaactgtgccttcatctggcagaaggacggcgtgaagaagctgaacctgtacctgatcatcaactacttcaagggcggcaagctgcggttcaagaagatcaaacctgaagccttcgaagccaacagattctacaccgtgatcaacaaaaagagcggcgagatcgtgcccatggaggtgaacttcaacttcgacgaccccaacctgatcatcctgcctctggcctttggcaagagacagggcagagaattcatctggaacgacctgctgtccctggaaaccggcagcctgaagctggccaacggaagagtgatcgagaagacactgtacaacagaagaacccggcaggatgagcctgccctgttcgtggccctgaccttcgagcggcgggaggtcctggactcctccaatatcaaaccaatgaacctgatcggcgtggcaagaggcgaaaacatccccgccgtgatcgccctgaccgaccccgagggctgcccactgagccggtttaaggatagcctgggaaacccaacccacatcctgagaatcggcgagagctataaggagaagcagcggaccatccaggccaagaaggaggtggagcagcggagagccggcggctacagccggaagtacgccagcaaagccaagaatctggcagacgatatggtgagaaacaccgctagagatctgctgtactacgccgtgacccaggatgccatgctgatcttcgccaacctgagccggggcttcggccggcagggcaagcggaccttcatggccgagagacagtacacacggatggaggactggctgaccgccaagctggcctacgagggcctgagcaagacctacctgtccaagacactggcccagtacacctccaagacatgcagcaactgtgggtttaccatcaccagcgccgactacgacagggtgctggagaagctgaagaagacagcaacaggctggatgaccacaattaacggcaaggagctgaaggtggagggccagattacctactacaacagatacaagagacagaacgtagtcaaggacctgtccgtcgagctggatagactgagcgaagaatctgtgaacaacgacatctcctcctggacaaagggcagaagcggagaagctctgagcctcctgaagaaaagattctcccatagacccgtgcaggagaagttcgtgtgcctgaactgcggcttcgagacacacgcagccgagcaagccgccctgaacatcgccagatcctggctgttcctgcggagccaggagtacaagaaataccagacaaacaagacaaccggcaacaccgataagagagccttcgtcgagacctggcagtccttttaccggaagaagcttaaggaggtgtggaaacctgccgtgcggtctggcggatctggcggaggctccatggccttcgaggacgtggccgtgtacttcagcagggaggagtgggagctgctggacaccgcccagagggccctgtacaggcacgtgatgctggagaacttcgccctggtggccagcctgggcttcagccccagcaggccctgcgtggtgatccagctggagagcggcaaggagccctggctgcacagcggcatggacaccaccatgagcaggcacgcccacaagaggcccagcagcggcagcggcggcccaagcagcggcgcccctcctcccagcggcggcagcccagccggctccccaacctctaccgaggagggcacctctgagtccgccacccccgagagcggccctggcacctccaccgagcccagcgagggcagcgcacccggcagccctgccggcagccccacctccacagaggagggaaccagcaccgagcccagcgaaggcagcgccccaggcaccagcaccgagcctagtgagcaggagattaaacggatcaacaagatcagaagaagacttgtgaaagacagcaacaccaagaaggccggcaagacaggccccatgaaaaccctgctggttagagtgatgacacccgatctgagagagcggctggaaaacctgagaaagaagcctgaaaatatcccccagcccatcagcaatacatctagagccaacctgaataagctgctgaccgattacaccgaaatgaagaaggcgatcctgcatgtgtactgggaagagttccagaaggaccctgtgggcctgatgagccgggtggcccagcctgccagcaagaagatcgatcagaacaagctgaaacctgagatggacgagaagggcaacctgaccaccgccggctttgcctgctctcagtgtggccagcccctgttcgtgtacaagctggagcaggtgtctgagaagggcaaggcttacaccaactacttcggacggtgcaatgtggccgagcacgaaaagctgatcctgctggcccagctgaagcccgagaaggatagcgacgaagccgtgacatatagcctgggaaagtttgggcagagggccctggatttctacagcattcatgtgaccaaggagtccacccaccccgtgaagcccctggcccagatcgccggaaacagatacgcctccggacctgtgggaaaggccctgagcgacgcatgtatgggcacaatcgcctccttcctgtctaagtaccaggacatcatcatcgaacaccagaaggtggtgaagggcaaccagaagagactggagagcctgcgggagctggccggcaaggaaaacctggaataccctagcgtgaccctgccacctcagcctcacaccaaggagggcgttgatgcctacaacgaagtgatcgcccgggtgcgaatgtgggtgaacctgaacctgtggcagaagctgaagctaagcagagatgatgccaagcctctgctgagactgaagggattcccttcctttcctctggtcgagagacaggccaacgaagtggactggtgggacatggtgtgtaacgtgaagaagctgatcaacgagaaaaaggaggatggcaaggtgttttggcagaatctggctggctacaagagacaggaagccctgagaccatacctgagcagcgaggaagatcggaagaagggaaagaaattcgctcggtaccagctgggcgacctgctgctgcacctggaaaagaagcacggcgaggactggggaaaggtgtacgacgaggcctgggagcggattgacaagaaagtggaaggcctgagcaagcacatcaagctggaagaggaacggagaagcgaggacgcccagagcaaggccgccctgaccgactggctgcgggctaaggccagcttcgtgatcgagggcctgaaggaggccgacaaggacgagttctgcagatgcgagctgaagctgcagaagtggtacggggacctgcggggaaagcccttcgccatcgaagccgagaacagcatcctggacatcagcggcttcagcaagcagtacaactgtgccttcatctggcagaaggacggcgtgaagaagctgaacctgtacctgatcatcaactacttcaagggcggcaagctgcggttcaagaagatcaaacctgaagccttcgaagccaacagattctacaccgtgatcaacaaaaagagcggcgagatcgtgcccatggaggtgaacttcaacttcgacgaccccaacctgatcatcctgcctctggcctttggcaagagacagggcagagaattcatctggaacgacctgctgtccctggaaaccggcagcctgaagctggccaacggaagagtgatcgagaagacactgtacaacagaagaacccggcaggatgagcctgccctgttcgtggccctgaccttcgagcggcgggaggtcctggactcctccaatatcaaaccaatgaacctgatcggcgtggcaagaggcgaaaacatccccgccgtgatcgccctgaccgaccccgagggctgcccactgagccggtttaaggatagcctgggaaacccaacccacatcctgagaatcggcgagagctataaggagaagcagcggaccatccaggccaagaaggaggtggagcagcggagagccggcggctacagccggaagtacgccagcaaagccaagaatctggcagacgatatggtgagaaacaccgctagagatctgctgtactacgccgtgacccaggatgccatgctgatcttcgccaacctgagccggggcttcggccggcagggcaagcggaccttcatggccgagagacagtacacacggatggaggactggctgaccgccaagctggcctacgagggcctgagcaagacctacctgtccaagacactggcccagtacacctccaagacatgcagcaactgtgggtttaccatcaccagcgccgactacgacagggtgctggagaagctgaagaagacagcaacaggctggatgaccacaattaacggcaaggagctgaaggtggagggccagattacctactacaacagatacaagagacagaacgtagtcaaggacctgtccgtcgagctggatagactgagcgaagaatctgtgaacaacgacatctcctcctggacaaagggcagaagcggagaagctctgagcctcctgaagaaaagattctcccatagacccgtgcaggagaagttcgtgtgcctgaactgcggcttcgagacacacgcagccgagcaagccgccctgaacatcgccagatcctggctgttcctgcggagccaggagtacaagaaataccagacaaacaagacaaccggcaacaccgataagagagccttcgtcgagacctggcagtccttttaccggaagaagcttaaggaggtgtggaaacctgccgtgcggtctggcggatctggcggaggctcctatggccttcgaggacgtggccgtgtacttcagcagggaggagtgggagctgctggacaccgcccagagggccctgtacaggcacgtgatgctggagaacttcgccctggtggccagcctgggcttcagccccagcaggccctgcgtggtgatccagctggagagcggcaaggagccctggctgcacagcggcatggacaccaccatgagcaggcacgcccacaagaggcccagcagcggcagcggatctggctccggcagcggccccaagaaaaagagaaaagtctaagctgccttctgcggggcttgccttctggccatgcccttcttctctcccttgcacctgtacctcttggtctttgaataaagcctgagtaggaaggctagcaaaaaaaaaaaaaaaaaaaaaaaaaaaaaaaaaaaaaaaaaaaaaaaaaaaaaaaaaaaaaaaaaaaaaaaaaaaaaaaa

SEQ ID NO: 15578 - RNA, 9485 nt, synthetic construct
  source 1..9485: mol_type = other RNA
aggaaataagagagaaaagaagagtaagaagaaatataagagccaccatggcccctaagaagaagcgtaaagtgagccggatggaacgcctcgtctacgaggtgcggcagaagtgcagaaacatcgaggacatctgcatctcctgcggatctctgaacgtgaccctggagcacccactgttcatcggcggcatgtgccagaactgtaaaaactgttttctggagtgtgcctatcaatacgacgatgacggctaccagagctactgcaccatctgttgcggcggaagagaggtgctgatgtgtggaaataacaactgctgccggtgcttctgcgtggaatgcgtggacctgctggtgggccccggcgccgcccaggccgctattaaggaagatccttggaactgctacatgtgcggccacaagggcacatacggcctgctgagacggagagaggactggcctagcagactgcagatgttcttcgccaataaccacgaccaggagttcgacccccctaaggtgtaccctcccgtccccgccgagaagagaaagcccatccgggtcctgagcctgttcgatggcatcgccaccggtctgctggtgctgaaggacctgggcatccaggtggataggtacattgcctccgaggtgtgcgaggactccatcaccgtgggaatggtgcgtcatcagggcaagatcatgtacgtgggcgacgtgcggagcgtgacacagaagcatatccaggagtggggccctttcgacctggtgatcggcggcagcccttgcaatgacctgagcatcgtgaacccagcccggaagggcctgtacgagggaaccggcagactgttcttcgagttttacagactgctgcacgacgcccggcctaaggaaggcgacgaccggcccttcttttggctgttcgagaatgtggtggccatgggagtcagcgacaagcgggatattagccggttcctggagagcaaccccgtgatgatcgatgccaaggaagtgagcgccgcccaccgggccagatacttctggggcaatctgcctggcatgaacagacccctggccagcaccgtgaacgacaagctggagctgcaggagtgcctggagcacggccggatcgccaagttcagcaaggtgagaaccatcaccacccgaagcaacagcatcaaacaaggcaaggaccagcactttcctgtgttcatgaacgagaaggaggacatcctgtggtgtaccgagatggagagagtgttcgggttcccagtccactacacagatgtcagcaacatgtctagactggccagacagagactgctgggaagaagctggtccgtccctgtgatcagacacctgttcgcccctctgaaggagtacttcgcctgcgtgagcagcggcaacagcaacgccaacagccggggccccagcttctctagcggcctggtgccactgtccctgagagggagccacatgggccccatggagatctacaaaaccgtgagcgcctggaagcggcagcctgtgcgcgtgctgagcctgtttcggaatatcgataaagtcctgaaaagcctgggattcctggagagcggctctggctccggcggtggcaccctgaagtacgtggaggatgtgacaaacgtggtcagacgggatgtggagaagtggggccccttcgatctggtgtacggcagcacccaacccctgggcagctcttgtgaccggtgccctggctggtacatgtttcagttccaccggatcctgcagtacgccctgccgagacaggagtcccagcggccattcttttggattttcatggacaacttgctgctgaccgaggatgaccaggaaactaccactcggttcctgcagaccgaagccgtgaccctgcaggacgtgagaggccgggactaccagaacgccatgcgggtgtggtccaacatccctggactgaaaagcaagcacgcacctctgacccctaaagaagaggagtacctgcaggcccaggtgcggagcagaagcaagctggacgcccctaaggtggatctgctggtgaagaattgcctcctgcccctgagagagtacttcaagtatttcagccagaatagtctgcccctgggaggcagcggcggcggcgccctggtgacatttgaggacgtcgccgtgcggttcacccaggaggaatgggctctgctggatccttctcagaaaatcctgtaccgggacgtgatgagagagacataccggaatctgacctccgtgggcatcaactgggaatgttgggaccttgaagcctgcttcagaagcctgggaagaaacctgagagtgcaggtggtgaagagaaagtgcgagctgaccaacagcggcccctgcgccgagggcggcccaagcagcggcgcccctcctcccagcggcggcagcccagccggctccccaacctctaccgaggagggcacctctgagtccgccacccccgagagcggccctggcacctccaccgagcccagcgagggcagcgcacccggcagccctgccggcagccccacctccacagaggagggaaccagcaccgagcccagcgaaggcagcgccccaggcaccagcaccgagcctagtgagcaggagattaaacggatcaacaagatcagaagaagacttgtgaaagacagcaacaccaagaaggccggcaagacaggccccatgaaaaccctgctggttagagtgatgacacccgatctgagagagcggctggaaaacctgagaaagaagcctgaaaatatcccccagcccatcagcaatacatctagagccaacctgaataagctgctgaccgattacaccgaaatgaagaaggcgatcctgcatgtgtactgggaagagttccagaaggaccctgtgggcctgatgagccgggtggcccagcctgccagcaagaagatcgatcagaacaagctgaaacctgagatggacgagaagggcaacctgaccaccgccggctttgcctgctctcagtgtggccagcccctgttcgtgtacaagctggagcaggtgtctgagaagggcaaggcttacaccaactacttcggacggtgcaatgtggccgagcacgaaaagctgatcctgctggcccagctgaagcccgagaaggatagcgacgaagccgtgacatatagcctgggaaagtttgggcagagggccctggatttctacagcattcatgtgaccaaggagtccacccaccccgtgaagcccctggcccagatcgccggaaacagatacgcctccggacctgtgggaaaggccctgagcgacgcatgtatgggcacaatcgcctccttcctgtctaagtaccaggacatcatcatcgaacaccagaaggtggtgaagggcaaccagaagagactggagagcctgcgggagctggccggcaaggaaaacctggaataccctagcgtgaccctgccacctcagcctcacaccaaggagggcgttgatgcctacaacgaagtgatcgcccgggtgcgaatgtgggtgaacctgaacctgtggcagaagctgaagctaagcagagatgatgccaagcctctgctgagactgaagggattcccttcctttcctctggtcgagagacaggccaacgaagtggactggtgggacatggtgtgtaacgtgaagaagctgatcaacgagaaaaaggaggatggcaaggtgttttggcagaatctggctggctacaagagacaggaagccctgagaccatacctgagcagcgaggaagatcggaagaagggaaagaaattcgctcggtaccagctgggcgacctgctgctgcacctggaaaagaagcacggcgaggactggggaaaggtgtacgacgaggcctgggagcggattgacaagaaagtggaaggcctgagcaagcacatcaagctggaagaggaacggagaagcgaggacgcccagagcaaggccgccctgaccgactggctgcgggctaaggccagcttcgtgatcgagggcctgaaggaggccgacaaggacgagttctgcagatgcgagctgaagctgcagaagtggtacggggacctgcggggaaagcccttcgccatcgaagccgagaacagcatcctggacatcagcggcttcagcaagcagtacaactgtgccttcatctggcagaaggacggcgtgaagaagctgaacctgtacctgatcatcaactacttcaagggcggcaagctgcggttcaagaagatcaaacctgaagccttcgaagccaacagattctacaccgtgatcaacaaaaagagcggcgagatcgtgcccatggaggtgaacttcaacttcgacgaccccaacctgatcatcctgcctctggcctttggcaagagacagggcagagaattcatctggaacgacctgctgtccctggaaaccggcagcctgaagctggccaacggaagagtgatcgagaagacactgtacaacagaagaacccggcaggatgagcctgccctgttcgtggccctgaccttcgagcggcgggaggtcctggactcctccaatatcaaaccaatgaacctgatcggcgtggcaagaggcgaaaacatccccgccgtgatcgccctgaccgaccccgagggctgcccactgagccggtttaaggatagcctgggaaacccaacccacatcctgagaatcggcgagagctataaggagaagcagcggaccatccaggccaagaaggaggtggagcagcggagagccggcggctacagccggaagtacgccagcaaagccaagaatctggcagacgatatggtgagaaacaccgctagagatctgctgtactacgccgtgacccaggatgccatgctgatcttcgccaacctgagccggggcttcggccggcagggcaagcggaccttcatggccgagagacagtacacacggatggaggactggctgaccgccaagctggcctacgagggcctgagcaagacctacctgtccaagacactggcccagtacacctccaagacatgcagcaactgtgggtttaccatcaccagcgccgactacgacagggtgctggagaagctgaagaagacagcaacaggctggatgaccacaattaacggcaaggagctgaaggtggagggccagattacctactacaacagatacaagagacagaacgtagtcaaggacctgtccgtcgagctggatagactgagcgaagaatctgtgaacaacgacatctcctcctggacaaagggcagaagcggagaagctctgagcctcctgaagaaaagattctcccatagacccgtgcaggagaagttcgtgtgcctgaactgcggcttcgagacacacgcagccgagcaagccgccctgaacatcgccagatcctggctgttcctgcggagccaggagtacaagaaataccagacaaacaagacaaccggcaacaccgataagagagccttcgtcgagacctggcagtccttttaccggaagaagcttaaggaggtgtggaaacctgccgtgcggtctggcggatctggcggaggctccatgatcgagtaccagatccccgtgagcttcaaggacgtggtggtgggcttcacccaggaggagtggcaccagctgagccccgcccagagggccctgtacagggacgtgatgctggagacctacagcaacctggtgagcgtgggctacgagggcaccaagcccgacgtgatcctgaggctggagcaggaggaggccccctggatcggcgaggccgcctgccccggctgccactgctggggcatcggcggcccaagcagcggcgcccctcctcccagcggcggcagcccagccggctccccaacctctaccgaggagggcacctctgagtccgccacccccgagagcggccctggcacctccaccgagcccagcgagggcagcgcacccggcagccctgccggcagccccacctccacagaggagggaaccagcaccgagcccagcgaaggcagcgccccaggcaccagcaccgagcctagtgagcaggagattaaacggatcaacaagatcagaagaagacttgtgaaagacagcaacaccaagaaggccggcaagacaggccccatgaaaaccctgctggttagagtgatgacacccgatctgagagagcggctggaaaacctgagaaagaagcctgaaaatatcccccagcccatcagcaatacatctagagccaacctgaataagctgctgaccgattacaccgaaatgaagaaggcgatcctgcatgtgtactgggaagagttccagaaggaccctgtgggcctgatgagccgggtggcccagcctgccagcaagaagatcgatcagaacaagctgaaacctgagatggacgagaagggcaacctgaccaccgccggctttgcctgctctcagtgtggccagcccctgttcgtgtacaagctggagcaggtgtctgagaagggcaaggcttacaccaactacttcggacggtgcaatgtggccgagcacgaaaagctgatcctgctggcccagctgaagcccgagaaggatagcgacgaagccgtgacatatagcctgggaaagtttgggcagagggccctggatttctacagcattcatgtgaccaaggagtccacccaccccgtgaagcccctggcccagatcgccggaaacagatacgcctccggacctgtgggaaaggccctgagcgacgcatgtatgggcacaatcgcctccttcctgtctaagtaccaggacatcatcatcgaacaccagaaggtggtgaagggcaaccagaagagactggagagcctgcgggagctggccggcaaggaaaacctggaataccctagcgtgaccctgccacctcagcctcacaccaaggagggcgttgatgcctacaacgaagtgatcgcccgggtgcgaatgtgggtgaacctgaacctgtggcagaagctgaagctaagcagagatgatgccaagcctctgctgagactgaagggattcccttcctttcctctggtcgagagacaggccaacgaagtggactggtgggacatggtgtgtaacgtgaagaagctgatcaacgagaaaaaggaggatggcaaggtgttttggcagaatctggctggctacaagagacaggaagccctgagaccatacctgagcagcgaggaagatcggaagaagggaaagaaattcgctcggtaccagctgggcgacctgctgctgcacctggaaaagaagcacggcgaggactggggaaaggtgtacgacgaggcctgggagcggattgacaagaaagtggaaggcctgagcaagcacatcaagctggaagaggaacggagaagcgaggacgcccagagcaaggccgccctgaccgactggctgcgggctaaggccagcttcgtgatcgagggcctgaaggaggccgacaaggacgagttctgcagatgcgagctgaagctgcagaagtggtacggggacctgcggggaaagcccttcgccatcgaagccgagaacagcatcctggacatcagcggcttcagcaagcagtacaactgtgccttcatctggcagaaggacggcgtgaagaagctgaacctgtacctgatcatcaactacttcaagggcggcaagctgcggttcaagaagatcaaacctgaagccttcgaagccaacagattctacaccgtgatcaacaaaaagagcggcgagatcgtgcccatggaggtgaacttcaacttcgacgaccccaacctgatcatcctgcctctggcctttggcaagagacagggcagagaattcatctggaacgacctgctgtccctggaaaccggcagcctgaagctggccaacggaagagtgatcgagaagacactgtacaacagaagaacccggcaggatgagcctgccctgttcgtggccctgaccttcgagcggcgggaggtcctggactcctccaatatcaaaccaatgaacctgatcggcgtggcaagaggcgaaaacatccccgccgtgatcgccctgaccgaccccgagggctgcccactgagccggtttaaggatagcctgggaaacccaacccacatcctgagaatcggcgagagctataaggagaagcagcggaccatccaggccaagaaggaggtggagcagcggagagccggcggctacagccggaagtacgccagcaaagccaagaatctggcagacgatatggtgagaaacaccgctagagatctgctgtactacgccgtgacccaggatgccatgctgatcttcgccaacctgagccggggcttcggccggcagggcaagcggaccttcatggccgagagacagtacacacggatggaggactggctgaccgccaagctggcctacgagggcctgagcaagacctacctgtccaagacactggcccagtacacctccaagacatgcagcaactgtgggtttaccatcaccagcgccgactacgacagggtgctggagaagctgaagaagacagcaacaggctggatgaccacaattaacggcaaggagctgaaggtggagggccagattacctactacaacagatacaagagacagaacgtagtcaaggacctgtccgtcgagctggatagactgagcgaagaatctgtgaacaacgacatctcctcctggacaaagggcagaagcggagaagctctgagcctcctgaagaaaagattctcccatagacccgtgcaggagaagttcgtgtgcctgaactgcggcttcgagacacacgcagccgagcaagccgccctgaacatcgccagatcctggctgttcctgcggagccaggagtacaagaaataccagacaaacaagacaaccggcaacaccgataagagagccttcgtcgagacctggcagtccttttaccggaagaagcttaaggaggtgtggaaacctgccgtgcggtctggcggatctggcggaggctcctatgatcgagtaccagatccccgtgagcttcaaggacgtggtggtgggcttcacccaggaggagtggcaccagctgagccccgcccagagggccctgtacagggacgtgatgctggagacctacagcaacctggtgagcgtgggctacgagggcaccaagcccgacgtgatcctgaggctggagcaggaggaggccccctggatcggcgaggccgcctgccccggctgccactgctggggcatcggatctggctccggcagcggccccaagaaaaagagaaaagtctaagctgccttctgcggggcttgccttctggccatgcccttcttctctcccttgcacctgtacctcttggtctttgaataaagcctgagtaggaaggctagcaaaaaaaaaaaaaaaaaaaaaaaaaaaaaaaaaaaaaaaaaaaaaaaaaaaaaaaaaaaaaaaaaaaaaaaaaaaaaaaa

SEQ ID NO: 15579 - RNA, 9485 nt, synthetic construct
  source 1..9485: mol_type = other RNA
aggaaataagagagaaaagaagagtaagaagaaatataagagccaccatggcccctaagaagaagcgtaaagtgagccggatggaacgcctcgtctacgaggtgcggcagaagtgcagaaacatcgaggacatctgcatctcctgcggatctctgaacgtgaccctggagcacccactgttcatcggcggcatgtgccagaactgtaaaaactgttttctggagtgtgcctatcaatacgacgatgacggctaccagagctactgcaccatctgttgcggcggaagagaggtgctgatgtgtggaaataacaactgctgccggtgcttctgcgtggaatgcgtggacctgctggtgggccccggcgccgcccaggccgctattaaggaagatccttggaactgctacatgtgcggccacaagggcacatacggcctgctgagacggagagaggactggcctagcagactgcagatgttcttcgccaataaccacgaccaggagttcgacccccctaaggtgtaccctcccgtccccgccgagaagagaaagcccatccgggtcctgagcctgttcgatggcatcgccaccggtctgctggtgctgaaggacctgggcatccaggtggataggtacattgcctccgaggtgtgcgaggactccatcaccgtgggaatggtgcgtcatcagggcaagatcatgtacgtgggcgacgtgcggagcgtgacacagaagcatatccaggagtggggccctttcgacctggtgatcggcggcagcccttgcaatgacctgagcatcgtgaacccagcccggaagggcctgtacgagggaaccggcagactgttcttcgagttttacagactgctgcacgacgcccggcctaaggaaggcgacgaccggcccttcttttggctgttcgagaatgtggtggccatgggagtcagcgacaagcgggatattagccggttcctggagagcaaccccgtgatgatcgatgccaaggaagtgagcgccgcccaccgggccagatacttctggggcaatctgcctggcatgaacagacccctggccagcaccgtgaacgacaagctggagctgcaggagtgcctggagcacggccggatcgccaagttcagcaaggtgagaaccatcaccacccgaagcaacagcatcaaacaaggcaaggaccagcactttcctgtgttcatgaacgagaaggaggacatcctgtggtgtaccgagatggagagagtgttcgggttcccagtccactacacagatgtcagcaacatgtctagactggccagacagagactgctgggaagaagctggtccgtccctgtgatcagacacctgttcgcccctctgaaggagtacttcgcctgcgtgagcagcggcaacagcaacgccaacagccggggccccagcttctctagcggcctggtgccactgtccctgagagggagccacatgggccccatggagatctacaaaaccgtgagcgcctggaagcggcagcctgtgcgcgtgctgagcctgtttcggaatatcgataaagtcctgaaaagcctgggattcctggagagcggctctggctccggcggtggcaccctgaagtacgtggaggatgtgacaaacgtggtcagacgggatgtggagaagtggggccccttcgatctggtgtacggcagcacccaacccctgggcagctcttgtgaccggtgccctggctggtacatgtttcagttccaccggatcctgcagtacgccctgccgagacaggagtcccagcggccattcttttggattttcatggacaacttgctgctgaccgaggatgaccaggaaactaccactcggttcctgcagaccgaagccgtgaccctgcaggacgtgagaggccgggactaccagaacgccatgcgggtgtggtccaacatccctggactgaaaagcaagcacgcacctctgacccctaaagaagaggagtacctgcaggcccaggtgcggagcagaagcaagctggacgcccctaaggtggatctgctggtgaagaattgcctcctgcccctgagagagtacttcaagtatttcagccagaatagtctgcccctgggaggcagcggcggcggcgccctggtgacatttgaggacgtcgccgtgcggttcacccaggaggaatgggctctgctggatccttctcagaaaatcctgtaccgggacgtgatgagagagacataccggaatctgacctccgtgggcatcaactgggaatgttgggaccttgaagcctgcttcagaagcctgggaagaaacctgagagtgcaggtggtgaagagaaagtgcgagctgaccaacagcggcccctgcgccgagggcggcccaagcagcggcgcccctcctcccagcggcggcagcccagccggctccccaacctctaccgaggagggcacctctgagtccgccacccccgagagcggccctggcacctccaccgagcccagcgagggcagcgcacccggcagccctgccggcagccccacctccacagaggagggaaccagcaccgagcccagcgaaggcagcgccccaggcaccagcaccgagcctagtgagcaggagattaaacggatcaacaagatcagaagaagacttgtgaaagacagcaacaccaagaaggccggcaagacaggccccatgaaaaccctgctggttagagtgatgacacccgatctgagagagcggctggaaaacctgagaaagaagcctgaaaatatcccccagcccatcagcaatacatctagagccaacctgaataagctgctgaccgattacaccgaaatgaagaaggcgatcctgcatgtgtactgggaagagttccagaaggaccctgtgggcctgatgagccgggtggcccagcctgccagcaagaagatcgatcagaacaagctgaaacctgagatggacgagaagggcaacctgaccaccgccggctttgcctgctctcagtgtggccagcccctgttcgtgtacaagctggagcaggtgtctgagaagggcaaggcttacaccaactacttcggacggtgcaatgtggccgagcacgaaaagctgatcctgctggcccagctgaagcccgagaaggatagcgacgaagccgtgacatatagcctgggaaagtttgggcagagggccctggatttctacagcattcatgtgaccaaggagtccacccaccccgtgaagcccctggcccagatcgccggaaacagatacgcctccggacctgtgggaaaggccctgagcgacgcatgtatgggcacaatcgcctccttcctgtctaagtaccaggacatcatcatcgaacaccagaaggtggtgaagggcaaccagaagagactggagagcctgcgggagctggccggcaaggaaaacctggaataccctagcgtgaccctgccacctcagcctcacaccaaggagggcgttgatgcctacaacgaagtgatcgcccgggtgcgaatgtgggtgaacctgaacctgtggcagaagctgaagctaagcagagatgatgccaagcctctgctgagactgaagggattcccttcctttcctctggtcgagagacaggccaacgaagtggactggtgggacatggtgtgtaacgtgaagaagctgatcaacgagaaaaaggaggatggcaaggtgttttggcagaatctggctggctacaagagacaggaagccctgagaccatacctgagcagcgaggaagatcggaagaagggaaagaaattcgctcggtaccagctgggcgacctgctgctgcacctggaaaagaagcacggcgaggactggggaaaggtgtacgacgaggcctgggagcggattgacaagaaagtggaaggcctgagcaagcacatcaagctggaagaggaacggagaagcgaggacgcccagagcaaggccgccctgaccgactggctgcgggctaaggccagcttcgtgatcgagggcctgaaggaggccgacaaggacgagttctgcagatgcgagctgaagctgcagaagtggtacggggacctgcggggaaagcccttcgccatcgaagccgagaacagcatcctggacatcagcggcttcagcaagcagtacaactgtgccttcatctggcagaaggacggcgtgaagaagctgaacctgtacctgatcatcaactacttcaagggcggcaagctgcggttcaagaagatcaaacctgaagccttcgaagccaacagattctacaccgtgatcaacaaaaagagcggcgagatcgtgcccatggaggtgaacttcaacttcgacgaccccaacctgatcatcctgcctctggcctttggcaagagacagggcagagaattcatctggaacgacctgctgtccctggaaaccggcagcctgaagctggccaacggaagagtgatcgagaagacactgtacaacagaagaacccggcaggatgagcctgccctgttcgtggccctgaccttcgagcggcgggaggtcctggactcctccaatatcaaaccaatgaacctgatcggcgtggcaagaggcgaaaacatccccgccgtgatcgccctgaccgaccccgagggctgcccactgagccggtttaaggatagcctgggaaacccaacccacatcctgagaatcggcgagagctataaggagaagcagcggaccatccaggccaagaaggaggtggagcagcggagagccggcggctacagccggaagtacgccagcaaagccaagaatctggcagacgatatggtgagaaacaccgctagagatctgctgtactacgccgtgacccaggatgccatgctgatcttcgccaacctgagccggggcttcggccggcagggcaagcggaccttcatggccgagagacagtacacacggatggaggactggctgaccgccaagctggcctacgagggcctgagcaagacctacctgtccaagacactggcccagtacacctccaagacatgcagcaactgtgggtttaccatcaccagcgccgactacgacagggtgctggagaagctgaagaagacagcaacaggctggatgaccacaattaacggcaaggagctgaaggtggagggccagattacctactacaacagatacaagagacagaacgtagtcaaggacctgtccgtcgagctggatagactgagcgaagaatctgtgaacaacgacatctcctcctggacaaagggcagaagcggagaagctctgagcctcctgaagaaaagattctcccatagacccgtgcaggagaagttcgtgtgcctgaactgcggcttcgagacacacgcagccgagcaagccgccctgaacatcgccagatcctggctgttcctgcggagccaggagtacaagaaataccagacaaacaagacaaccggcaacaccgataagagagccttcgtcgagacctggcagtccttttaccggaagaagcttaaggaggtgtggaaacctgccgtgcggtctggcggatctggcggaggctccgcccaggtgcccgtgaccttcgaggacgtggccgtgtacttcagcagggaggagtgggccgccctggacggcaggcagaaggagctgtacagggacgtgatgaggggcaactacgagctggtggccagcctgggctgccccgccgccaagcccgacctgatctgccagatcgagagggacgaggagctgggcgtgggcgagccccagggcaggcccgtgaggaggcagccccagaggaggagcggcggcccaagcagcggcgcccctcctcccagcggcggcagcccagccggctccccaacctctaccgaggagggcacctctgagtccgccacccccgagagcggccctggcacctccaccgagcccagcgagggcagcgcacccggcagccctgccggcagccccacctccacagaggagggaaccagcaccgagcccagcgaaggcagcgccccaggcaccagcaccgagcctagtgagcaggagattaaacggatcaacaagatcagaagaagacttgtgaaagacagcaacaccaagaaggccggcaagacaggccccatgaaaaccctgctggttagagtgatgacacccgatctgagagagcggctggaaaacctgagaaagaagcctgaaaatatcccccagcccatcagcaatacatctagagccaacctgaataagctgctgaccgattacaccgaaatgaagaaggcgatcctgcatgtgtactgggaagagttccagaaggaccctgtgggcctgatgagccgggtggcccagcctgccagcaagaagatcgatcagaacaagctgaaacctgagatggacgagaagggcaacctgaccaccgccggctttgcctgctctcagtgtggccagcccctgttcgtgtacaagctggagcaggtgtctgagaagggcaaggcttacaccaactacttcggacggtgcaatgtggccgagcacgaaaagctgatcctgctggcccagctgaagcccgagaaggatagcgacgaagccgtgacatatagcctgggaaagtttgggcagagggccctggatttctacagcattcatgtgaccaaggagtccacccaccccgtgaagcccctggcccagatcgccggaaacagatacgcctccggacctgtgggaaaggccctgagcgacgcatgtatgggcacaatcgcctccttcctgtctaagtaccaggacatcatcatcgaacaccagaaggtggtgaagggcaaccagaagagactggagagcctgcgggagctggccggcaaggaaaacctggaataccctagcgtgaccctgccacctcagcctcacaccaaggagggcgttgatgcctacaacgaagtgatcgcccgggtgcgaatgtgggtgaacctgaacctgtggcagaagctgaagctaagcagagatgatgccaagcctctgctgagactgaagggattcccttcctttcctctggtcgagagacaggccaacgaagtggactggtgggacatggtgtgtaacgtgaagaagctgatcaacgagaaaaaggaggatggcaaggtgttttggcagaatctggctggctacaagagacaggaagccctgagaccatacctgagcagcgaggaagatcggaagaagggaaagaaattcgctcggtaccagctgggcgacctgctgctgcacctggaaaagaagcacggcgaggactggggaaaggtgtacgacgaggcctgggagcggattgacaagaaagtggaaggcctgagcaagcacatcaagctggaagaggaacggagaagcgaggacgcccagagcaaggccgccctgaccgactggctgcgggctaaggccagcttcgtgatcgagggcctgaaggaggccgacaaggacgagttctgcagatgcgagctgaagctgcagaagtggtacggggacctgcggggaaagcccttcgccatcgaagccgagaacagcatcctggacatcagcggcttcagcaagcagtacaactgtgccttcatctggcagaaggacggcgtgaagaagctgaacctgtacctgatcatcaactacttcaagggcggcaagctgcggttcaagaagatcaaacctgaagccttcgaagccaacagattctacaccgtgatcaacaaaaagagcggcgagatcgtgcccatggaggtgaacttcaacttcgacgaccccaacctgatcatcctgcctctggcctttggcaagagacagggcagagaattcatctggaacgacctgctgtccctggaaaccggcagcctgaagctggccaacggaagagtgatcgagaagacactgtacaacagaagaacccggcaggatgagcctgccctgttcgtggccctgaccttcgagcggcgggaggtcctggactcctccaatatcaaaccaatgaacctgatcggcgtggcaagaggcgaaaacatccccgccgtgatcgccctgaccgaccccgagggctgcccactgagccggtttaaggatagcctgggaaacccaacccacatcctgagaatcggcgagagctataaggagaagcagcggaccatccaggccaagaaggaggtggagcagcggagagccggcggctacagccggaagtacgccagcaaagccaagaatctggcagacgatatggtgagaaacaccgctagagatctgctgtactacgccgtgacccaggatgccatgctgatcttcgccaacctgagccggggcttcggccggcagggcaagcggaccttcatggccgagagacagtacacacggatggaggactggctgaccgccaagctggcctacgagggcctgagcaagacctacctgtccaagacactggcccagtacacctccaagacatgcagcaactgtgggtttaccatcaccagcgccgactacgacagggtgctggagaagctgaagaagacagcaacaggctggatgaccacaattaacggcaaggagctgaaggtggagggccagattacctactacaacagatacaagagacagaacgtagtcaaggacctgtccgtcgagctggatagactgagcgaagaatctgtgaacaacgacatctcctcctggacaaagggcagaagcggagaagctctgagcctcctgaagaaaagattctcccatagacccgtgcaggagaagttcgtgtgcctgaactgcggcttcgagacacacgcagccgagcaagccgccctgaacatcgccagatcctggctgttcctgcggagccaggagtacaagaaataccagacaaacaagacaaccggcaacaccgataagagagccttcgtcgagacctggcagtccttttaccggaagaagcttaaggaggtgtggaaacctgccgtgcggtctggcggatctggcggaggctcctgcccaggtgcccgtgaccttcgaggacgtggccgtgtacttcagcagggaggagtgggccgccctggacggcaggcagaaggagctgtacagggacgtgatgaggggcaactacgagctggtggccagcctgggctgccccgccgccaagcccgacctgatctgccagatcgagagggacgaggagctgggcgtgggcgagccccagggcaggcccgtgaggaggcagccccagaggaggagcggatctggctccggcagcggccccaagaaaaagagaaaagtctaagctgccttctgcggggcttgccttctggccatgcccttcttctctcccttgcacctgtacctcttggtctttgaataaagcctgagtaggaaggctagcaaaaaaaaaaaaaaaaaaaaaaaaaaaaaaaaaaaaaaaaaaaaaaaaaaaaaaaaaaaaaaaaaaaaaaaaaaaaaaaa

SEQ ID NO: 15580 - RNA, 9485 nt, synthetic construct
  source 1..9485: mol_type = other RNA
aggaaataagagagaaaagaagagtaagaagaaatataagagccaccatggcccctaagaagaagcgtaaagtgagccggatggaacgcctcgtctacgaggtgcggcagaagtgcagaaacatcgaggacatctgcatctcctgcggatctctgaacgtgaccctggagcacccactgttcatcggcggcatgtgccagaactgtaaaaactgttttctggagtgtgcctatcaatacgacgatgacggctaccagagctactgcaccatctgttgcggcggaagagaggtgctgatgtgtggaaataacaactgctgccggtgcttctgcgtggaatgcgtggacctgctggtgggccccggcgccgcccaggccgctattaaggaagatccttggaactgctacatgtgcggccacaagggcacatacggcctgctgagacggagagaggactggcctagcagactgcagatgttcttcgccaataaccacgaccaggagttcgacccccctaaggtgtaccctcccgtccccgccgagaagagaaagcccatccgggtcctgagcctgttcgatggcatcgccaccggtctgctggtgctgaaggacctgggcatccaggtggataggtacattgcctccgaggtgtgcgaggactccatcaccgtgggaatggtgcgtcatcagggcaagatcatgtacgtgggcgacgtgcggagcgtgacacagaagcatatccaggagtggggccctttcgacctggtgatcggcggcagcccttgcaatgacctgagcatcgtgaacccagcccggaagggcctgtacgagggaaccggcagactgttcttcgagttttacagactgctgcacgacgcccggcctaaggaaggcgacgaccggcccttcttttggctgttcgagaatgtggtggccatgggagtcagcgacaagcgggatattagccggttcctggagagcaaccccgtgatgatcgatgccaaggaagtgagcgccgcccaccgggccagatacttctggggcaatctgcctggcatgaacagacccctggccagcaccgtgaacgacaagctggagctgcaggagtgcctggagcacggccggatcgccaagttcagcaaggtgagaaccatcaccacccgaagcaacagcatcaaacaaggcaaggaccagcactttcctgtgttcatgaacgagaaggaggacatcctgtggtgtaccgagatggagagagtgttcgggttcccagtccactacacagatgtcagcaacatgtctagactggccagacagagactgctgggaagaagctggtccgtccctgtgatcagacacctgttcgcccctctgaaggagtacttcgcctgcgtgagcagcggcaacagcaacgccaacagccggggccccagcttctctagcggcctggtgccactgtccctgagagggagccacatgggccccatggagatctacaaaaccgtgagcgcctggaagcggcagcctgtgcgcgtgctgagcctgtttcggaatatcgataaagtcctgaaaagcctgggattcctggagagcggctctggctccggcggtggcaccctgaagtacgtggaggatgtgacaaacgtggtcagacgggatgtggagaagtggggccccttcgatctggtgtacggcagcacccaacccctgggcagctcttgtgaccggtgccctggctggtacatgtttcagttccaccggatcctgcagtacgccctgccgagacaggagtcccagcggccattcttttggattttcatggacaacttgctgctgaccgaggatgaccaggaaactaccactcggttcctgcagaccgaagccgtgaccctgcaggacgtgagaggccgggactaccagaacgccatgcgggtgtggtccaacatccctggactgaaaagcaagcacgcacctctgacccctaaagaagaggagtacctgcaggcccaggtgcggagcagaagcaagctggacgcccctaaggtggatctgctggtgaagaattgcctcctgcccctgagagagtacttcaagtatttcagccagaatagtctgcccctgggaggcagcggcggcggcgccctggtgacatttgaggacgtcgccgtgcggttcacccaggaggaatgggctctgctggatccttctcagaaaatcctgtaccgggacgtgatgagagagacataccggaatctgacctccgtgggcatcaactgggaatgttgggaccttgaagcctgcttcagaagcctgggaagaaacctgagagtgcaggtggtgaagagaaagtgcgagctgaccaacagcggcccctgcgccgagggcggcccaagcagcggcgcccctcctcccagcggcggcagcccagccggctccccaacctctaccgaggagggcacctctgagtccgccacccccgagagcggccctggcacctccaccgagcccagcgagggcagcgcacccggcagccctgccggcagccccacctccacagaggagggaaccagcaccgagcccagcgaaggcagcgccccaggcaccagcaccgagcctagtgagcaggagattaaacggatcaacaagatcagaagaagacttgtgaaagacagcaacaccaagaaggccggcaagacaggccccatgaaaaccctgctggttagagtgatgacacccgatctgagagagcggctggaaaacctgagaaagaagcctgaaaatatcccccagcccatcagcaatacatctagagccaacctgaataagctgctgaccgattacaccgaaatgaagaaggcgatcctgcatgtgtactgggaagagttccagaaggaccctgtgggcctgatgagccgggtggcccagcctgccagcaagaagatcgatcagaacaagctgaaacctgagatggacgagaagggcaacctgaccaccgccggctttgcctgctctcagtgtggccagcccctgttcgtgtacaagctggagcaggtgtctgagaagggcaaggcttacaccaactacttcggacggtgcaatgtggccgagcacgaaaagctgatcctgctggcccagctgaagcccgagaaggatagcgacgaagccgtgacatatagcctgggaaagtttgggcagagggccctggatttctacagcattcatgtgaccaaggagtccacccaccccgtgaagcccctggcccagatcgccggaaacagatacgcctccggacctgtgggaaaggccctgagcgacgcatgtatgggcacaatcgcctccttcctgtctaagtaccaggacatcatcatcgaacaccagaaggtggtgaagggcaaccagaagagactggagagcctgcgggagctggccggcaaggaaaacctggaataccctagcgtgaccctgccacctcagcctcacaccaaggagggcgttgatgcctacaacgaagtgatcgcccgggtgcgaatgtgggtgaacctgaacctgtggcagaagctgaagctaagcagagatgatgccaagcctctgctgagactgaagggattcccttcctttcctctggtcgagagacaggccaacgaagtggactggtgggacatggtgtgtaacgtgaagaagctgatcaacgagaaaaaggaggatggcaaggtgttttggcagaatctggctggctacaagagacaggaagccctgagaccatacctgagcagcgaggaagatcggaagaagggaaagaaattcgctcggtaccagctgggcgacctgctgctgcacctggaaaagaagcacggcgaggactggggaaaggtgtacgacgaggcctgggagcggattgacaagaaagtggaaggcctgagcaagcacatcaagctggaagaggaacggagaagcgaggacgcccagagcaaggccgccctgaccgactggctgcgggctaaggccagcttcgtgatcgagggcctgaaggaggccgacaaggacgagttctgcagatgcgagctgaagctgcagaagtggtacggggacctgcggggaaagcccttcgccatcgaagccgagaacagcatcctggacatcagcggcttcagcaagcagtacaactgtgccttcatctggcagaaggacggcgtgaagaagctgaacctgtacctgatcatcaactacttcaagggcggcaagctgcggttcaagaagatcaaacctgaagccttcgaagccaacagattctacaccgtgatcaacaaaaagagcggcgagatcgtgcccatggaggtgaacttcaacttcgacgaccccaacctgatcatcctgcctctggcctttggcaagagacagggcagagaattcatctggaacgacctgctgtccctggaaaccggcagcctgaagctggccaacggaagagtgatcgagaagacactgtacaacagaagaacccggcaggatgagcctgccctgttcgtggccctgaccttcgagcggcgggaggtcctggactcctccaatatcaaaccaatgaacctgatcggcgtggcaagaggcgaaaacatccccgccgtgatcgccctgaccgaccccgagggctgcccactgagccggtttaaggatagcctgggaaacccaacccacatcctgagaatcggcgagagctataaggagaagcagcggaccatccaggccaagaaggaggtggagcagcggagagccggcggctacagccggaagtacgccagcaaagccaagaatctggcagacgatatggtgagaaacaccgctagagatctgctgtactacgccgtgacccaggatgccatgctgatcttcgccaacctgagccggggcttcggccggcagggcaagcggaccttcatggccgagagacagtacacacggatggaggactggctgaccgccaagctggcctacgagggcctgagcaagacctacctgtccaagacactggcccagtacacctccaagacatgcagcaactgtgggtttaccatcaccagcgccgactacgacagggtgctggagaagctgaagaagacagcaacaggctggatgaccacaattaacggcaaggagctgaaggtggagggccagattacctactacaacagatacaagagacagaacgtagtcaaggacctgtccgtcgagctggatagactgagcgaagaatctgtgaacaacgacatctcctcctggacaaagggcagaagcggagaagctctgagcctcctgaagaaaagattctcccatagacccgtgcaggagaagttcgtgtgcctgaactgcggcttcgagacacacgcagccgagcaagccgccctgaacatcgccagatcctggctgttcctgcggagccaggagtacaagaaataccagacaaacaagacaaccggcaacaccgataagagagccttcgtcgagacctggcagtccttttaccggaagaagcttaaggaggtgtggaaacctgccgtgcggtctggcggatctggcggaggctccgcccagggcagcgtgatgttcaacgacgtgagcatcgtgttcagccaggaggagtgggagtacctggacctggagcagaaggacctgtacagggacgtgatgctggagaactacagcaacctggtgagcctgggctgcttcatcagcaagcccgacgtgatcagcctgctggagcagggcaaggagccctggaaggtggtgaggaagggcaggaggaggtacctggacctggagaacaggtacggcggcccaagcagcggcgcccctcctcccagcggcggcagcccagccggctccccaacctctaccgaggagggcacctctgagtccgccacccccgagagcggccctggcacctccaccgagcccagcgagggcagcgcacccggcagccctgccggcagccccacctccacagaggagggaaccagcaccgagcccagcgaaggcagcgccccaggcaccagcaccgagcctagtgagcaggagattaaacggatcaacaagatcagaagaagacttgtgaaagacagcaacaccaagaaggccggcaagacaggccccatgaaaaccctgctggttagagtgatgacacccgatctgagagagcggctggaaaacctgagaaagaagcctgaaaatatcccccagcccatcagcaatacatctagagccaacctgaataagctgctgaccgattacaccgaaatgaagaaggcgatcctgcatgtgtactgggaagagttccagaaggaccctgtgggcctgatgagccgggtggcccagcctgccagcaagaagatcgatcagaacaagctgaaacctgagatggacgagaagggcaacctgaccaccgccggctttgcctgctctcagtgtggccagcccctgttcgtgtacaagctggagcaggtgtctgagaagggcaaggcttacaccaactacttcggacggtgcaatgtggccgagcacgaaaagctgatcctgctggcccagctgaagcccgagaaggatagcgacgaagccgtgacatatagcctgggaaagtttgggcagagggccctggatttctacagcattcatgtgaccaaggagtccacccaccccgtgaagcccctggcccagatcgccggaaacagatacgcctccggacctgtgggaaaggccctgagcgacgcatgtatgggcacaatcgcctccttcctgtctaagtaccaggacatcatcatcgaacaccagaaggtggtgaagggcaaccagaagagactggagagcctgcgggagctggccggcaaggaaaacctggaataccctagcgtgaccctgccacctcagcctcacaccaaggagggcgttgatgcctacaacgaagtgatcgcccgggtgcgaatgtgggtgaacctgaacctgtggcagaagctgaagctaagcagagatgatgccaagcctctgctgagactgaagggattcccttcctttcctctggtcgagagacaggccaacgaagtggactggtgggacatggtgtgtaacgtgaagaagctgatcaacgagaaaaaggaggatggcaaggtgttttggcagaatctggctggctacaagagacaggaagccctgagaccatacctgagcagcgaggaagatcggaagaagggaaagaaattcgctcggtaccagctgggcgacctgctgctgcacctggaaaagaagcacggcgaggactggggaaaggtgtacgacgaggcctgggagcggattgacaagaaagtggaaggcctgagcaagcacatcaagctggaagaggaacggagaagcgaggacgcccagagcaaggccgccctgaccgactggctgcgggctaaggccagcttcgtgatcgagggcctgaaggaggccgacaaggacgagttctgcagatgcgagctgaagctgcagaagtggtacggggacctgcggggaaagcccttcgccatcgaagccgagaacagcatcctggacatcagcggcttcagcaagcagtacaactgtgccttcatctggcagaaggacggcgtgaagaagctgaacctgtacctgatcatcaactacttcaagggcggcaagctgcggttcaagaagatcaaacctgaagccttcgaagccaacagattctacaccgtgatcaacaaaaagagcggcgagatcgtgcccatggaggtgaacttcaacttcgacgaccccaacctgatcatcctgcctctggcctttggcaagagacagggcagagaattcatctggaacgacctgctgtccctggaaaccggcagcctgaagctggccaacggaagagtgatcgagaagacactgtacaacagaagaacccggcaggatgagcctgccctgttcgtggccctgaccttcgagcggcgggaggtcctggactcctccaatatcaaaccaatgaacctgatcggcgtggcaagaggcgaaaacatccccgccgtgatcgccctgaccgaccccgagggctgcccactgagccggtttaaggatagcctgggaaacccaacccacatcctgagaatcggcgagagctataaggagaagcagcggaccatccaggccaagaaggaggtggagcagcggagagccggcggctacagccggaagtacgccagcaaagccaagaatctggcagacgatatggtgagaaacaccgctagagatctgctgtactacgccgtgacccaggatgccatgctgatcttcgccaacctgagccggggcttcggccggcagggcaagcggaccttcatggccgagagacagtacacacggatggaggactggctgaccgccaagctggcctacgagggcctgagcaagacctacctgtccaagacactggcccagtacacctccaagacatgcagcaactgtgggtttaccatcaccagcgccgactacgacagggtgctggagaagctgaagaagacagcaacaggctggatgaccacaattaacggcaaggagctgaaggtggagggccagattacctactacaacagatacaagagacagaacgtagtcaaggacctgtccgtcgagctggatagactgagcgaagaatctgtgaacaacgacatctcctcctggacaaagggcagaagcggagaagctctgagcctcctgaagaaaagattctcccatagacccgtgcaggagaagttcgtgtgcctgaactgcggcttcgagacacacgcagccgagcaagccgccctgaacatcgccagatcctggctgttcctgcggagccaggagtacaagaaataccagacaaacaagacaaccggcaacaccgataagagagccttcgtcgagacctggcagtccttttaccggaagaagcttaaggaggtgtggaaacctgccgtgcggtctggcggatctggcggaggctcctgcccagggcagcgtgatgttcaacgacgtgagcatcgtgttcagccaggaggagtgggagtacctggacctggagcagaaggacctgtacagggacgtgatgctggagaactacagcaacctggtgagcctgggctgcttcatcagcaagcccgacgtgatcagcctgctggagcagggcaaggagccctggaaggtggtgaggaagggcaggaggaggtacctggacctggagaacaggtacggatctggctccggcagcggccccaagaaaaagagaaaagtctaagctgccttctgcggggcttgccttctggccatgcccttcttctctcccttgcacctgtacctcttggtctttgaataaagcctgagtaggaaggctagcaaaaaaaaaaaaaaaaaaaaaaaaaaaaaaaaaaaaaaaaaaaaaaaaaaaaaaaaaaaaaaaaaaaaaaaaaaaaaaaa

SEQ ID NO: 15581 - RNA, 9485 nt, synthetic construct
  source 1..9485: mol_type = other RNA
aggaaataagagagaaaagaagagtaagaagaaatataagagccaccatggcccctaagaagaagcgtaaagtgagccggatggaacgcctcgtctacgaggtgcggcagaagtgcagaaacatcgaggacatctgcatctcctgcggatctctgaacgtgaccctggagcacccactgttcatcggcggcatgtgccagaactgtaaaaactgttttctggagtgtgcctatcaatacgacgatgacggctaccagagctactgcaccatctgttgcggcggaagagaggtgctgatgtgtggaaataacaactgctgccggtgcttctgcgtggaatgcgtggacctgctggtgggccccggcgccgcccaggccgctattaaggaagatccttggaactgctacatgtgcggccacaagggcacatacggcctgctgagacggagagaggactggcctagcagactgcagatgttcttcgccaataaccacgaccaggagttcgacccccctaaggtgtaccctcccgtccccgccgagaagagaaagcccatccgggtcctgagcctgttcgatggcatcgccaccggtctgctggtgctgaaggacctgggcatccaggtggataggtacattgcctccgaggtgtgcgaggactccatcaccgtgggaatggtgcgtcatcagggcaagatcatgtacgtgggcgacgtgcggagcgtgacacagaagcatatccaggagtggggccctttcgacctggtgatcggcggcagcccttgcaatgacctgagcatcgtgaacccagcccggaagggcctgtacgagggaaccggcagactgttcttcgagttttacagactgctgcacgacgcccggcctaaggaaggcgacgaccggcccttcttttggctgttcgagaatgtggtggccatgggagtcagcgacaagcgggatattagccggttcctggagagcaaccccgtgatgatcgatgccaaggaagtgagcgccgcccaccgggccagatacttctggggcaatctgcctggcatgaacagacccctggccagcaccgtgaacgacaagctggagctgcaggagtgcctggagcacggccggatcgccaagttcagcaaggtgagaaccatcaccacccgaagcaacagcatcaaacaaggcaaggaccagcactttcctgtgttcatgaacgagaaggaggacatcctgtggtgtaccgagatggagagagtgttcgggttcccagtccactacacagatgtcagcaacatgtctagactggccagacagagactgctgggaagaagctggtccgtccctgtgatcagacacctgttcgcccctctgaaggagtacttcgcctgcgtgagcagcggcaacagcaacgccaacagccggggccccagcttctctagcggcctggtgccactgtccctgagagggagccacatgggccccatggagatctacaaaaccgtgagcgcctggaagcggcagcctgtgcgcgtgctgagcctgtttcggaatatcgataaagtcctgaaaagcctgggattcctggagagcggctctggctccggcggtggcaccctgaagtacgtggaggatgtgacaaacgtggtcagacgggatgtggagaagtggggccccttcgatctggtgtacggcagcacccaacccctgggcagctcttgtgaccggtgccctggctggtacatgtttcagttccaccggatcctgcagtacgccctgccgagacaggagtcccagcggccattcttttggattttcatggacaacttgctgctgaccgaggatgaccaggaaactaccactcggttcctgcagaccgaagccgtgaccctgcaggacgtgagaggccgggactaccagaacgccatgcgggtgtggtccaacatccctggactgaaaagcaagcacgcacctctgacccctaaagaagaggagtacctgcaggcccaggtgcggagcagaagcaagctggacgcccctaaggtggatctgctggtgaagaattgcctcctgcccctgagagagtacttcaagtatttcagccagaatagtctgcccctgggaggcagcggcggcggcgccctggtgacatttgaggacgtcgccgtgcggttcacccaggaggaatgggctctgctggatccttctcagaaaatcctgtaccgggacgtgatgagagagacataccggaatctgacctccgtgggcatcaactgggaatgttgggaccttgaagcctgcttcagaagcctgggaagaaacctgagagtgcaggtggtgaagagaaagtgcgagctgaccaacagcggcccctgcgccgagggcggcccaagcagcggcgcccctcctcccagcggcggcagcccagccggctccccaacctctaccgaggagggcacctctgagtccgccacccccgagagcggccctggcacctccaccgagcccagcgagggcagcgcacccggcagccctgccggcagccccacctccacagaggagggaaccagcaccgagcccagcgaaggcagcgccccaggcaccagcaccgagcctagtgagcaggagattaaacggatcaacaagatcagaagaagacttgtgaaagacagcaacaccaagaaggccggcaagacaggccccatgaaaaccctgctggttagagtgatgacacccgatctgagagagcggctggaaaacctgagaaagaagcctgaaaatatcccccagcccatcagcaatacatctagagccaacctgaataagctgctgaccgattacaccgaaatgaagaaggcgatcctgcatgtgtactgggaagagttccagaaggaccctgtgggcctgatgagccgggtggcccagcctgccagcaagaagatcgatcagaacaagctgaaacctgagatggacgagaagggcaacctgaccaccgccggctttgcctgctctcagtgtggccagcccctgttcgtgtacaagctggagcaggtgtctgagaagggcaaggcttacaccaactacttcggacggtgcaatgtggccgagcacgaaaagctgatcctgctggcccagctgaagcccgagaaggatagcgacgaagccgtgacatatagcctgggaaagtttgggcagagggccctggatttctacagcattcatgtgaccaaggagtccacccaccccgtgaagcccctggcccagatcgccggaaacagatacgcctccggacctgtgggaaaggccctgagcgacgcatgtatgggcacaatcgcctccttcctgtctaagtaccaggacatcatcatcgaacaccagaaggtggtgaagggcaaccagaagagactggagagcctgcgggagctggccggcaaggaaaacctggaataccctagcgtgaccctgccacctcagcctcacaccaaggagggcgttgatgcctacaacgaagtgatcgcccgggtgcgaatgtgggtgaacctgaacctgtggcagaagctgaagctaagcagagatgatgccaagcctctgctgagactgaagggattcccttcctttcctctggtcgagagacaggccaacgaagtggactggtgggacatggtgtgtaacgtgaagaagctgatcaacgagaaaaaggaggatggcaaggtgttttggcagaatctggctggctacaagagacaggaagccctgagaccatacctgagcagcgaggaagatcggaagaagggaaagaaattcgctcggtaccagctgggcgacctgctgctgcacctggaaaagaagcacggcgaggactggggaaaggtgtacgacgaggcctgggagcggattgacaagaaagtggaaggcctgagcaagcacatcaagctggaagaggaacggagaagcgaggacgcccagagcaaggccgccctgaccgactggctgcgggctaaggccagcttcgtgatcgagggcctgaaggaggccgacaaggacgagttctgcagatgcgagctgaagctgcagaagtggtacggggacctgcggggaaagcccttcgccatcgaagccgagaacagcatcctggacatcagcggcttcagcaagcagtacaactgtgccttcatctggcagaaggacggcgtgaagaagctgaacctgtacctgatcatcaactacttcaagggcggcaagctgcggttcaagaagatcaaacctgaagccttcgaagccaacagattctacaccgtgatcaacaaaaagagcggcgagatcgtgcccatggaggtgaacttcaacttcgacgaccccaacctgatcatcctgcctctggcctttggcaagagacagggcagagaattcatctggaacgacctgctgtccctggaaaccggcagcctgaagctggccaacggaagagtgatcgagaagacactgtacaacagaagaacccggcaggatgagcctgccctgttcgtggccctgaccttcgagcggcgggaggtcctggactcctccaatatcaaaccaatgaacctgatcggcgtggcaagaggcgaaaacatccccgccgtgatcgccctgaccgaccccgagggctgcccactgagccggtttaaggatagcctgggaaacccaacccacatcctgagaatcggcgagagctataaggagaagcagcggaccatccaggccaagaaggaggtggagcagcggagagccggcggctacagccggaagtacgccagcaaagccaagaatctggcagacgatatggtgagaaacaccgctagagatctgctgtactacgccgtgacccaggatgccatgctgatcttcgccaacctgagccggggcttcggccggcagggcaagcggaccttcatggccgagagacagtacacacggatggaggactggctgaccgccaagctggcctacgagggcctgagcaagacctacctgtccaagacactggcccagtacacctccaagacatgcagcaactgtgggtttaccatcaccagcgccgactacgacagggtgctggagaagctgaagaagacagcaacaggctggatgaccacaattaacggcaaggagctgaaggtggagggccagattacctactacaacagatacaagagacagaacgtagtcaaggacctgtccgtcgagctggatagactgagcgaagaatctgtgaacaacgacatctcctcctggacaaagggcagaagcggagaagctctgagcctcctgaagaaaagattctcccatagacccgtgcaggagaagttcgtgtgcctgaactgcggcttcgagacacacgcagccgagcaagccgccctgaacatcgccagatcctggctgttcctgcggagccaggagtacaagaaataccagacaaacaagacaaccggcaacaccgataagagagccttcgtcgagacctggcagtccttttaccggaagaagcttaaggaggtgtggaaacctgccgtgcggtctggcggatctggcggaggctccccccagaagagcgtgaccttcgaggacgtggccgtgtacttcacccagaccgagtgggacggcctgagccccgcccagagggccctgtacagggacgtgatgctggagaactacggcaacgtggccagcctgggcttccccctgctgaagcccaccgtgatcagccagctggagggcggcggcgagctggagggccccagccccctggccagcggcaccggcaccggcccccagggcctgtggggcggcccaagcagcggcgcccctcctcccagcggcggcagcccagccggctccccaacctctaccgaggagggcacctctgagtccgccacccccgagagcggccctggcacctccaccgagcccagcgagggcagcgcacccggcagccctgccggcagccccacctccacagaggagggaaccagcaccgagcccagcgaaggcagcgccccaggcaccagcaccgagcctagtgagcaggagattaaacggatcaacaagatcagaagaagacttgtgaaagacagcaacaccaagaaggccggcaagacaggccccatgaaaaccctgctggttagagtgatgacacccgatctgagagagcggctggaaaacctgagaaagaagcctgaaaatatcccccagcccatcagcaatacatctagagccaacctgaataagctgctgaccgattacaccgaaatgaagaaggcgatcctgcatgtgtactgggaagagttccagaaggaccctgtgggcctgatgagccgggtggcccagcctgccagcaagaagatcgatcagaacaagctgaaacctgagatggacgagaagggcaacctgaccaccgccggctttgcctgctctcagtgtggccagcccctgttcgtgtacaagctggagcaggtgtctgagaagggcaaggcttacaccaactacttcggacggtgcaatgtggccgagcacgaaaagctgatcctgctggcccagctgaagcccgagaaggatagcgacgaagccgtgacatatagcctgggaaagtttgggcagagggccctggatttctacagcattcatgtgaccaaggagtccacccaccccgtgaagcccctggcccagatcgccggaaacagatacgcctccggacctgtgggaaaggccctgagcgacgcatgtatgggcacaatcgcctccttcctgtctaagtaccaggacatcatcatcgaacaccagaaggtggtgaagggcaaccagaagagactggagagcctgcgggagctggccggcaaggaaaacctggaataccctagcgtgaccctgccacctcagcctcacaccaaggagggcgttgatgcctacaacgaagtgatcgcccgggtgcgaatgtgggtgaacctgaacctgtggcagaagctgaagctaagcagagatgatgccaagcctctgctgagactgaagggattcccttcctttcctctggtcgagagacaggccaacgaagtggactggtgggacatggtgtgtaacgtgaagaagctgatcaacgagaaaaaggaggatggcaaggtgttttggcagaatctggctggctacaagagacaggaagccctgagaccatacctgagcagcgaggaagatcggaagaagggaaagaaattcgctcggtaccagctgggcgacctgctgctgcacctggaaaagaagcacggcgaggactggggaaaggtgtacgacgaggcctgggagcggattgacaagaaagtggaaggcctgagcaagcacatcaagctggaagaggaacggagaagcgaggacgcccagagcaaggccgccctgaccgactggctgcgggctaaggccagcttcgtgatcgagggcctgaaggaggccgacaaggacgagttctgcagatgcgagctgaagctgcagaagtggtacggggacctgcggggaaagcccttcgccatcgaagccgagaacagcatcctggacatcagcggcttcagcaagcagtacaactgtgccttcatctggcagaaggacggcgtgaagaagctgaacctgtacctgatcatcaactacttcaagggcggcaagctgcggttcaagaagatcaaacctgaagccttcgaagccaacagattctacaccgtgatcaacaaaaagagcggcgagatcgtgcccatggaggtgaacttcaacttcgacgaccccaacctgatcatcctgcctctggcctttggcaagagacagggcagagaattcatctggaacgacctgctgtccctggaaaccggcagcctgaagctggccaacggaagagtgatcgagaagacactgtacaacagaagaacccggcaggatgagcctgccctgttcgtggccctgaccttcgagcggcgggaggtcctggactcctccaatatcaaaccaatgaacctgatcggcgtggcaagaggcgaaaacatccccgccgtgatcgccctgaccgaccccgagggctgcccactgagccggtttaaggatagcctgggaaacccaacccacatcctgagaatcggcgagagctataaggagaagcagcggaccatccaggccaagaaggaggtggagcagcggagagccggcggctacagccggaagtacgccagcaaagccaagaatctggcagacgatatggtgagaaacaccgctagagatctgctgtactacgccgtgacccaggatgccatgctgatcttcgccaacctgagccggggcttcggccggcagggcaagcggaccttcatggccgagagacagtacacacggatggaggactggctgaccgccaagctggcctacgagggcctgagcaagacctacctgtccaagacactggcccagtacacctccaagacatgcagcaactgtgggtttaccatcaccagcgccgactacgacagggtgctggagaagctgaagaagacagcaacaggctggatgaccacaattaacggcaaggagctgaaggtggagggccagattacctactacaacagatacaagagacagaacgtagtcaaggacctgtccgtcgagctggatagactgagcgaagaatctgtgaacaacgacatctcctcctggacaaagggcagaagcggagaagctctgagcctcctgaagaaaagattctcccatagacccgtgcaggagaagttcgtgtgcctgaactgcggcttcgagacacacgcagccgagcaagccgccctgaacatcgccagatcctggctgttcctgcggagccaggagtacaagaaataccagacaaacaagacaaccggcaacaccgataagagagccttcgtcgagacctggcagtccttttaccggaagaagcttaaggaggtgtggaaacctgccgtgcggtctggcggatctggcggaggctcctccccagaagagcgtgaccttcgaggacgtggccgtgtacttcacccagaccgagtgggacggcctgagccccgcccagagggccctgtacagggacgtgatgctggagaactacggcaacgtggccagcctgggcttccccctgctgaagcccaccgtgatcagccagctggagggcggcggcgagctggagggccccagccccctggccagcggcaccggcaccggcccccagggcctgtggggatctggctccggcagcggccccaagaaaaagagaaaagtctaagctgccttctgcggggcttgccttctggccatgcccttcttctctcccttgcacctgtacctcttggtctttgaataaagcctgagtaggaaggctagcaaaaaaaaaaaaaaaaaaaaaaaaaaaaaaaaaaaaaaaaaaaaaaaaaaaaaaaaaaaaaaaaaaaaaaaaaaaaaaaa

SEQ ID NO: 15582 - RNA, 9485 nt, synthetic construct
  source 1..9485: mol_type = other RNA
aggaaataagagagaaaagaagagtaagaagaaatataagagccaccatggcccctaagaagaagcgtaaagtgagccggatggaacgcctcgtctacgaggtgcggcagaagtgcagaaacatcgaggacatctgcatctcctgcggatctctgaacgtgaccctggagcacccactgttcatcggcggcatgtgccagaactgtaaaaactgttttctggagtgtgcctatcaatacgacgatgacggctaccagagctactgcaccatctgttgcggcggaagagaggtgctgatgtgtggaaataacaactgctgccggtgcttctgcgtggaatgcgtggacctgctggtgggccccggcgccgcccaggccgctattaaggaagatccttggaactgctacatgtgcggccacaagggcacatacggcctgctgagacggagagaggactggcctagcagactgcagatgttcttcgccaataaccacgaccaggagttcgacccccctaaggtgtaccctcccgtccccgccgagaagagaaagcccatccgggtcctgagcctgttcgatggcatcgccaccggtctgctggtgctgaaggacctgggcatccaggtggataggtacattgcctccgaggtgtgcgaggactccatcaccgtgggaatggtgcgtcatcagggcaagatcatgtacgtgggcgacgtgcggagcgtgacacagaagcatatccaggagtggggccctttcgacctggtgatcggcggcagcccttgcaatgacctgagcatcgtgaacccagcccggaagggcctgtacgagggaaccggcagactgttcttcgagttttacagactgctgcacgacgcccggcctaaggaaggcgacgaccggcccttcttttggctgttcgagaatgtggtggccatgggagtcagcgacaagcgggatattagccggttcctggagagcaaccccgtgatgatcgatgccaaggaagtgagcgccgcccaccgggccagatacttctggggcaatctgcctggcatgaacagacccctggccagcaccgtgaacgacaagctggagctgcaggagtgcctggagcacggccggatcgccaagttcagcaaggtgagaaccatcaccacccgaagcaacagcatcaaacaaggcaaggaccagcactttcctgtgttcatgaacgagaaggaggacatcctgtggtgtaccgagatggagagagtgttcgggttcccagtccactacacagatgtcagcaacatgtctagactggccagacagagactgctgggaagaagctggtccgtccctgtgatcagacacctgttcgcccctctgaaggagtacttcgcctgcgtgagcagcggcaacagcaacgccaacagccggggccccagcttctctagcggcctggtgccactgtccctgagagggagccacatgggccccatggagatctacaaaaccgtgagcgcctggaagcggcagcctgtgcgcgtgctgagcctgtttcggaatatcgataaagtcctgaaaagcctgggattcctggagagcggctctggctccggcggtggcaccctgaagtacgtggaggatgtgacaaacgtggtcagacgggatgtggagaagtggggccccttcgatctggtgtacggcagcacccaacccctgggcagctcttgtgaccggtgccctggctggtacatgtttcagttccaccggatcctgcagtacgccctgccgagacaggagtcccagcggccattcttttggattttcatggacaacttgctgctgaccgaggatgaccaggaaactaccactcggttcctgcagaccgaagccgtgaccctgcaggacgtgagaggccgggactaccagaacgccatgcgggtgtggtccaacatccctggactgaaaagcaagcacgcacctctgacccctaaagaagaggagtacctgcaggcccaggtgcggagcagaagcaagctggacgcccctaaggtggatctgctggtgaagaattgcctcctgcccctgagagagtacttcaagtatttcagccagaatagtctgcccctgggaggcagcggcggcggcgccctggtgacatttgaggacgtcgccgtgcggttcacccaggaggaatgggctctgctggatccttctcagaaaatcctgtaccgggacgtgatgagagagacataccggaatctgacctccgtgggcatcaactgggaatgttgggaccttgaagcctgcttcagaagcctgggaagaaacctgagagtgcaggtggtgaagagaaagtgcgagctgaccaacagcggcccctgcgccgagggcggcccaagcagcggcgcccctcctcccagcggcggcagcccagccggctccccaacctctaccgaggagggcacctctgagtccgccacccccgagagcggccctggcacctccaccgagcccagcgagggcagcgcacccggcagccctgccggcagccccacctccacagaggagggaaccagcaccgagcccagcgaaggcagcgccccaggcaccagcaccgagcctagtgagcaggagattaaacggatcaacaagatcagaagaagacttgtgaaagacagcaacaccaagaaggccggcaagacaggccccatgaaaaccctgctggttagagtgatgacacccgatctgagagagcggctggaaaacctgagaaagaagcctgaaaatatcccccagcccatcagcaatacatctagagccaacctgaataagctgctgaccgattacaccgaaatgaagaaggcgatcctgcatgtgtactgggaagagttccagaaggaccctgtgggcctgatgagccgggtggcccagcctgccagcaagaagatcgatcagaacaagctgaaacctgagatggacgagaagggcaacctgaccaccgccggctttgcctgctctcagtgtggccagcccctgttcgtgtacaagctggagcaggtgtctgagaagggcaaggcttacaccaactacttcggacggtgcaatgtggccgagcacgaaaagctgatcctgctggcccagctgaagcccgagaaggatagcgacgaagccgtgacatatagcctgggaaagtttgggcagagggccctggatttctacagcattcatgtgaccaaggagtccacccaccccgtgaagcccctggcccagatcgccggaaacagatacgcctccggacctgtgggaaaggccctgagcgacgcatgtatgggcacaatcgcctccttcctgtctaagtaccaggacatcatcatcgaacaccagaaggtggtgaagggcaaccagaagagactggagagcctgcgggagctggccggcaaggaaaacctggaataccctagcgtgaccctgccacctcagcctcacaccaaggagggcgttgatgcctacaacgaagtgatcgcccgggtgcgaatgtgggtgaacctgaacctgtggcagaagctgaagctaagcagagatgatgccaagcctctgctgagactgaagggattcccttcctttcctctggtcgagagacaggccaacgaagtggactggtgggacatggtgtgtaacgtgaagaagctgatcaacgagaaaaaggaggatggcaaggtgttttggcagaatctggctggctacaagagacaggaagccctgagaccatacctgagcagcgaggaagatcggaagaagggaaagaaattcgctcggtaccagctgggcgacctgctgctgcacctggaaaagaagcacggcgaggactggggaaaggtgtacgacgaggcctgggagcggattgacaagaaagtggaaggcctgagcaagcacatcaagctggaagaggaacggagaagcgaggacgcccagagcaaggccgccctgaccgactggctgcgggctaaggccagcttcgtgatcgagggcctgaaggaggccgacaaggacgagttctgcagatgcgagctgaagctgcagaagtggtacggggacctgcggggaaagcccttcgccatcgaagccgagaacagcatcctggacatcagcggcttcagcaagcagtacaactgtgccttcatctggcagaaggacggcgtgaagaagctgaacctgtacctgatcatcaactacttcaagggcggcaagctgcggttcaagaagatcaaacctgaagccttcgaagccaacagattctacaccgtgatcaacaaaaagagcggcgagatcgtgcccatggaggtgaacttcaacttcgacgaccccaacctgatcatcctgcctctggcctttggcaagagacagggcagagaattcatctggaacgacctgctgtccctggaaaccggcagcctgaagctggccaacggaagagtgatcgagaagacactgtacaacagaagaacccggcaggatgagcctgccctgttcgtggccctgaccttcgagcggcgggaggtcctggactcctccaatatcaaaccaatgaacctgatcggcgtggcaagaggcgaaaacatccccgccgtgatcgccctgaccgaccccgagggctgcccactgagccggtttaaggatagcctgggaaacccaacccacatcctgagaatcggcgagagctataaggagaagcagcggaccatccaggccaagaaggaggtggagcagcggagagccggcggctacagccggaagtacgccagcaaagccaagaatctggcagacgatatggtgagaaacaccgctagagatctgctgtactacgccgtgacccaggatgccatgctgatcttcgccaacctgagccggggcttcggccggcagggcaagcggaccttcatggccgagagacagtacacacggatggaggactggctgaccgccaagctggcctacgagggcctgagcaagacctacctgtccaagacactggcccagtacacctccaagacatgcagcaactgtgggtttaccatcaccagcgccgactacgacagggtgctggagaagctgaagaagacagcaacaggctggatgaccacaattaacggcaaggagctgaaggtggagggccagattacctactacaacagatacaagagacagaacgtagtcaaggacctgtccgtcgagctggatagactgagcgaagaatctgtgaacaacgacatctcctcctggacaaagggcagaagcggagaagctctgagcctcctgaagaaaagattctcccatagacccgtgcaggagaagttcgtgtgcctgaactgcggcttcgagacacacgcagccgagcaagccgccctgaacatcgccagatcctggctgttcctgcggagccaggagtacaagaaataccagacaaacaagacaaccggcaacaccgataagagagccttcgtcgagacctggcagtccttttaccggaagaagcttaaggaggtgtggaaacctgccgtgcggtctggcggatctggcggaggctccgtgcaggagcccgtgaccttcaaggacgtggccgtggacttcacccaggaggagtggggccagctggacctggtgcagaggaccctgtacagggacgtgatgctggagacctacggccacctgctgagcgtgggcaaccagatcgccaagcccgaggtgatcagcctgctggagcagggcgaggagccctggagcgtggagcaggcctgcccccagaggacctgcagcgagtgggtgaggaacggcggcccaagcagcggcgcccctcctcccagcggcggcagcccagccggctccccaacctctaccgaggagggcacctctgagtccgccacccccgagagcggccctggcacctccaccgagcccagcgagggcagcgcacccggcagccctgccggcagccccacctccacagaggagggaaccagcaccgagcccagcgaaggcagcgccccaggcaccagcaccgagcctagtgagcaggagattaaacggatcaacaagatcagaagaagacttgtgaaagacagcaacaccaagaaggccggcaagacaggccccatgaaaaccctgctggttagagtgatgacacccgatctgagagagcggctggaaaacctgagaaagaagcctgaaaatatcccccagcccatcagcaatacatctagagccaacctgaataagctgctgaccgattacaccgaaatgaagaaggcgatcctgcatgtgtactgggaagagttccagaaggaccctgtgggcctgatgagccgggtggcccagcctgccagcaagaagatcgatcagaacaagctgaaacctgagatggacgagaagggcaacctgaccaccgccggctttgcctgctctcagtgtggccagcccctgttcgtgtacaagctggagcaggtgtctgagaagggcaaggcttacaccaactacttcggacggtgcaatgtggccgagcacgaaaagctgatcctgctggcccagctgaagcccgagaaggatagcgacgaagccgtgacatatagcctgggaaagtttgggcagagggccctggatttctacagcattcatgtgaccaaggagtccacccaccccgtgaagcccctggcccagatcgccggaaacagatacgcctccggacctgtgggaaaggccctgagcgacgcatgtatgggcacaatcgcctccttcctgtctaagtaccaggacatcatcatcgaacaccagaaggtggtgaagggcaaccagaagagactggagagcctgcgggagctggccggcaaggaaaacctggaataccctagcgtgaccctgccacctcagcctcacaccaaggagggcgttgatgcctacaacgaagtgatcgcccgggtgcgaatgtgggtgaacctgaacctgtggcagaagctgaagctaagcagagatgatgccaagcctctgctgagactgaagggattcccttcctttcctctggtcgagagacaggccaacgaagtggactggtgggacatggtgtgtaacgtgaagaagctgatcaacgagaaaaaggaggatggcaaggtgttttggcagaatctggctggctacaagagacaggaagccctgagaccatacctgagcagcgaggaagatcggaagaagggaaagaaattcgctcggtaccagctgggcgacctgctgctgcacctggaaaagaagcacggcgaggactggggaaaggtgtacgacgaggcctgggagcggattgacaagaaagtggaaggcctgagcaagcacatcaagctggaagaggaacggagaagcgaggacgcccagagcaaggccgccctgaccgactggctgcgggctaaggccagcttcgtgatcgagggcctgaaggaggccgacaaggacgagttctgcagatgcgagctgaagctgcagaagtggtacggggacctgcggggaaagcccttcgccatcgaagccgagaacagcatcctggacatcagcggcttcagcaagcagtacaactgtgccttcatctggcagaaggacggcgtgaagaagctgaacctgtacctgatcatcaactacttcaagggcggcaagctgcggttcaagaagatcaaacctgaagccttcgaagccaacagattctacaccgtgatcaacaaaaagagcggcgagatcgtgcccatggaggtgaacttcaacttcgacgaccccaacctgatcatcctgcctctggcctttggcaagagacagggcagagaattcatctggaacgacctgctgtccctggaaaccggcagcctgaagctggccaacggaagagtgatcgagaagacactgtacaacagaagaacccggcaggatgagcctgccctgttcgtggccctgaccttcgagcggcgggaggtcctggactcctccaatatcaaaccaatgaacctgatcggcgtggcaagaggcgaaaacatccccgccgtgatcgccctgaccgaccccgagggctgcccactgagccggtttaaggatagcctgggaaacccaacccacatcctgagaatcggcgagagctataaggagaagcagcggaccatccaggccaagaaggaggtggagcagcggagagccggcggctacagccggaagtacgccagcaaagccaagaatctggcagacgatatggtgagaaacaccgctagagatctgctgtactacgccgtgacccaggatgccatgctgatcttcgccaacctgagccggggcttcggccggcagggcaagcggaccttcatggccgagagacagtacacacggatggaggactggctgaccgccaagctggcctacgagggcctgagcaagacctacctgtccaagacactggcccagtacacctccaagacatgcagcaactgtgggtttaccatcaccagcgccgactacgacagggtgctggagaagctgaagaagacagcaacaggctggatgaccacaattaacggcaaggagctgaaggtggagggccagattacctactacaacagatacaagagacagaacgtagtcaaggacctgtccgtcgagctggatagactgagcgaagaatctgtgaacaacgacatctcctcctggacaaagggcagaagcggagaagctctgagcctcctgaagaaaagattctcccatagacccgtgcaggagaagttcgtgtgcctgaactgcggcttcgagacacacgcagccgagcaagccgccctgaacatcgccagatcctggctgttcctgcggagccaggagtacaagaaataccagacaaacaagacaaccggcaacaccgataagagagccttcgtcgagacctggcagtccttttaccggaagaagcttaaggaggtgtggaaacctgccgtgcggtctggcggatctggcggaggctcctgtgcaggagcccgtgaccttcaaggacgtggccgtggacttcacccaggaggagtggggccagctggacctggtgcagaggaccctgtacagggacgtgatgctggagacctacggccacctgctgagcgtgggcaaccagatcgccaagcccgaggtgatcagcctgctggagcagggcgaggagccctggagcgtggagcaggcctgcccccagaggacctgcagcgagtgggtgaggaacggatctggctccggcagcggccccaagaaaaagagaaaagtctaagctgccttctgcggggcttgccttctggccatgcccttcttctctcccttgcacctgtacctcttggtctttgaataaagcctgagtaggaaggctagcaaaaaaaaaaaaaaaaaaaaaaaaaaaaaaaaaaaaaaaaaaaaaaaaaaaaaaaaaaaaaaaaaaaaaaaaaaaaaaaa

SEQ ID NO: 15583 - RNA, 9485 nt, synthetic construct
  source 1..9485: mol_type = other RNA
aggaaataagagagaaaagaagagtaagaagaaatataagagccaccatggcccctaagaagaagcgtaaagtgagccggatggaacgcctcgtctacgaggtgcggcagaagtgcagaaacatcgaggacatctgcatctcctgcggatctctgaacgtgaccctggagcacccactgttcatcggcggcatgtgccagaactgtaaaaactgttttctggagtgtgcctatcaatacgacgatgacggctaccagagctactgcaccatctgttgcggcggaagagaggtgctgatgtgtggaaataacaactgctgccggtgcttctgcgtggaatgcgtggacctgctggtgggccccggcgccgcccaggccgctattaaggaagatccttggaactgctacatgtgcggccacaagggcacatacggcctgctgagacggagagaggactggcctagcagactgcagatgttcttcgccaataaccacgaccaggagttcgacccccctaaggtgtaccctcccgtccccgccgagaagagaaagcccatccgggtcctgagcctgttcgatggcatcgccaccggtctgctggtgctgaaggacctgggcatccaggtggataggtacattgcctccgaggtgtgcgaggactccatcaccgtgggaatggtgcgtcatcagggcaagatcatgtacgtgggcgacgtgcggagcgtgacacagaagcatatccaggagtggggccctttcgacctggtgatcggcggcagcccttgcaatgacctgagcatcgtgaacccagcccggaagggcctgtacgagggaaccggcagactgttcttcgagttttacagactgctgcacgacgcccggcctaaggaaggcgacgaccggcccttcttttggctgttcgagaatgtggtggccatgggagtcagcgacaagcgggatattagccggttcctggagagcaaccccgtgatgatcgatgccaaggaagtgagcgccgcccaccgggccagatacttctggggcaatctgcctggcatgaacagacccctggccagcaccgtgaacgacaagctggagctgcaggagtgcctggagcacggccggatcgccaagttcagcaaggtgagaaccatcaccacccgaagcaacagcatcaaacaaggcaaggaccagcactttcctgtgttcatgaacgagaaggaggacatcctgtggtgtaccgagatggagagagtgttcgggttcccagtccactacacagatgtcagcaacatgtctagactggccagacagagactgctgggaagaagctggtccgtccctgtgatcagacacctgttcgcccctctgaaggagtacttcgcctgcgtgagcagcggcaacagcaacgccaacagccggggccccagcttctctagcggcctggtgccactgtccctgagagggagccacatgggccccatggagatctacaaaaccgtgagcgcctggaagcggcagcctgtgcgcgtgctgagcctgtttcggaatatcgataaagtcctgaaaagcctgggattcctggagagcggctctggctccggcggtggcaccctgaagtacgtggaggatgtgacaaacgtggtcagacgggatgtggagaagtggggccccttcgatctggtgtacggcagcacccaacccctgggcagctcttgtgaccggtgccctggctggtacatgtttcagttccaccggatcctgcagtacgccctgccgagacaggagtcccagcggccattcttttggattttcatggacaacttgctgctgaccgaggatgaccaggaaactaccactcggttcctgcagaccgaagccgtgaccctgcaggacgtgagaggccgggactaccagaacgccatgcgggtgtggtccaacatccctggactgaaaagcaagcacgcacctctgacccctaaagaagaggagtacctgcaggcccaggtgcggagcagaagcaagctggacgcccctaaggtggatctgctggtgaagaattgcctcctgcccctgagagagtacttcaagtatttcagccagaatagtctgcccctgggaggcagcggcggcggcgccctggtgacatttgaggacgtcgccgtgcggttcacccaggaggaatgggctctgctggatccttctcagaaaatcctgtaccgggacgtgatgagagagacataccggaatctgacctccgtgggcatcaactgggaatgttgggaccttgaagcctgcttcagaagcctgggaagaaacctgagagtgcaggtggtgaagagaaagtgcgagctgaccaacagcggcccctgcgccgagggcggcccaagcagcggcgcccctcctcccagcggcggcagcccagccggctccccaacctctaccgaggagggcacctctgagtccgccacccccgagagcggccctggcacctccaccgagcccagcgagggcagcgcacccggcagccctgccggcagccccacctccacagaggagggaaccagcaccgagcccagcgaaggcagcgccccaggcaccagcaccgagcctagtgagcaggagattaaacggatcaacaagatcagaagaagacttgtgaaagacagcaacaccaagaaggccggcaagacaggccccatgaaaaccctgctggttagagtgatgacacccgatctgagagagcggctggaaaacctgagaaagaagcctgaaaatatcccccagcccatcagcaatacatctagagccaacctgaataagctgctgaccgattacaccgaaatgaagaaggcgatcctgcatgtgtactgggaagagttccagaaggaccctgtgggcctgatgagccgggtggcccagcctgccagcaagaagatcgatcagaacaagctgaaacctgagatggacgagaagggcaacctgaccaccgccggctttgcctgctctcagtgtggccagcccctgttcgtgtacaagctggagcaggtgtctgagaagggcaaggcttacaccaactacttcggacggtgcaatgtggccgagcacgaaaagctgatcctgctggcccagctgaagcccgagaaggatagcgacgaagccgtgacatatagcctgggaaagtttgggcagagggccctggatttctacagcattcatgtgaccaaggagtccacccaccccgtgaagcccctggcccagatcgccggaaacagatacgcctccggacctgtgggaaaggccctgagcgacgcatgtatgggcacaatcgcctccttcctgtctaagtaccaggacatcatcatcgaacaccagaaggtggtgaagggcaaccagaagagactggagagcctgcgggagctggccggcaaggaaaacctggaataccctagcgtgaccctgccacctcagcctcacaccaaggagggcgttgatgcctacaacgaagtgatcgcccgggtgcgaatgtgggtgaacctgaacctgtggcagaagctgaagctaagcagagatgatgccaagcctctgctgagactgaagggattcccttcctttcctctggtcgagagacaggccaacgaagtggactggtgggacatggtgtgtaacgtgaagaagctgatcaacgagaaaaaggaggatggcaaggtgttttggcagaatctggctggctacaagagacaggaagccctgagaccatacctgagcagcgaggaagatcggaagaagggaaagaaattcgctcggtaccagctgggcgacctgctgctgcacctggaaaagaagcacggcgaggactggggaaaggtgtacgacgaggcctgggagcggattgacaagaaagtggaaggcctgagcaagcacatcaagctggaagaggaacggagaagcgaggacgcccagagcaaggccgccctgaccgactggctgcgggctaaggccagcttcgtgatcgagggcctgaaggaggccgacaaggacgagttctgcagatgcgagctgaagctgcagaagtggtacggggacctgcggggaaagcccttcgccatcgaagccgagaacagcatcctggacatcagcggcttcagcaagcagtacaactgtgccttcatctggcagaaggacggcgtgaagaagctgaacctgtacctgatcatcaactacttcaagggcggcaagctgcggttcaagaagatcaaacctgaagccttcgaagccaacagattctacaccgtgatcaacaaaaagagcggcgagatcgtgcccatggaggtgaacttcaacttcgacgaccccaacctgatcatcctgcctctggcctttggcaagagacagggcagagaattcatctggaacgacctgctgtccctggaaaccggcagcctgaagctggccaacggaagagtgatcgagaagacactgtacaacagaagaacccggcaggatgagcctgccctgttcgtggccctgaccttcgagcggcgggaggtcctggactcctccaatatcaaaccaatgaacctgatcggcgtggcaagaggcgaaaacatccccgccgtgatcgccctgaccgaccccgagggctgcccactgagccggtttaaggatagcctgggaaacccaacccacatcctgagaatcggcgagagctataaggagaagcagcggaccatccaggccaagaaggaggtggagcagcggagagccggcggctacagccggaagtacgccagcaaagccaagaatctggcagacgatatggtgagaaacaccgctagagatctgctgtactacgccgtgacccaggatgccatgctgatcttcgccaacctgagccggggcttcggccggcagggcaagcggaccttcatggccgagagacagtacacacggatggaggactggctgaccgccaagctggcctacgagggcctgagcaagacctacctgtccaagacactggcccagtacacctccaagacatgcagcaactgtgggtttaccatcaccagcgccgactacgacagggtgctggagaagctgaagaagacagcaacaggctggatgaccacaattaacggcaaggagctgaaggtggagggccagattacctactacaacagatacaagagacagaacgtagtcaaggacctgtccgtcgagctggatagactgagcgaagaatctgtgaacaacgacatctcctcctggacaaagggcagaagcggagaagctctgagcctcctgaagaaaagattctcccatagacccgtgcaggagaagttcgtgtgcctgaactgcggcttcgagacacacgcagccgagcaagccgccctgaacatcgccagatcctggctgttcctgcggagccaggagtacaagaaataccagacaaacaagacaaccggcaacaccgataagagagccttcgtcgagacctggcagtccttttaccggaagaagcttaaggaggtgtggaaacctgccgtgcggtctggcggatctggcggaggctccctggtgaagttcgaggaggtggccgtggtgttcagcgaggacgagtggaacctgctgagcgaccagcagaggggcctgtacatggaggtgatgaaggagaactacgagcacctgatctacctgggctacgaggtgcccgtgatcctgagcctgctgcaggacggcggcggcatcagcagcgacgccggcagccagagcaagagccagcaggtggccgtggccgagggcagcaacgtgaacagcggcggcccaagcagcggcgcccctcctcccagcggcggcagcccagccggctccccaacctctaccgaggagggcacctctgagtccgccacccccgagagcggccctggcacctccaccgagcccagcgagggcagcgcacccggcagccctgccggcagccccacctccacagaggagggaaccagcaccgagcccagcgaaggcagcgccccaggcaccagcaccgagcctagtgagcaggagattaaacggatcaacaagatcagaagaagacttgtgaaagacagcaacaccaagaaggccggcaagacaggccccatgaaaaccctgctggttagagtgatgacacccgatctgagagagcggctggaaaacctgagaaagaagcctgaaaatatcccccagcccatcagcaatacatctagagccaacctgaataagctgctgaccgattacaccgaaatgaagaaggcgatcctgcatgtgtactgggaagagttccagaaggaccctgtgggcctgatgagccgggtggcccagcctgccagcaagaagatcgatcagaacaagctgaaacctgagatggacgagaagggcaacctgaccaccgccggctttgcctgctctcagtgtggccagcccctgttcgtgtacaagctggagcaggtgtctgagaagggcaaggcttacaccaactacttcggacggtgcaatgtggccgagcacgaaaagctgatcctgctggcccagctgaagcccgagaaggatagcgacgaagccgtgacatatagcctgggaaagtttgggcagagggccctggatttctacagcattcatgtgaccaaggagtccacccaccccgtgaagcccctggcccagatcgccggaaacagatacgcctccggacctgtgggaaaggccctgagcgacgcatgtatgggcacaatcgcctccttcctgtctaagtaccaggacatcatcatcgaacaccagaaggtggtgaagggcaaccagaagagactggagagcctgcgggagctggccggcaaggaaaacctggaataccctagcgtgaccctgccacctcagcctcacaccaaggagggcgttgatgcctacaacgaagtgatcgcccgggtgcgaatgtgggtgaacctgaacctgtggcagaagctgaagctaagcagagatgatgccaagcctctgctgagactgaagggattcccttcctttcctctggtcgagagacaggccaacgaagtggactggtgggacatggtgtgtaacgtgaagaagctgatcaacgagaaaaaggaggatggcaaggtgttttggcagaatctggctggctacaagagacaggaagccctgagaccatacctgagcagcgaggaagatcggaagaagggaaagaaattcgctcggtaccagctgggcgacctgctgctgcacctggaaaagaagcacggcgaggactggggaaaggtgtacgacgaggcctgggagcggattgacaagaaagtggaaggcctgagcaagcacatcaagctggaagaggaacggagaagcgaggacgcccagagcaaggccgccctgaccgactggctgcgggctaaggccagcttcgtgatcgagggcctgaaggaggccgacaaggacgagttctgcagatgcgagctgaagctgcagaagtggtacggggacctgcggggaaagcccttcgccatcgaagccgagaacagcatcctggacatcagcggcttcagcaagcagtacaactgtgccttcatctggcagaaggacggcgtgaagaagctgaacctgtacctgatcatcaactacttcaagggcggcaagctgcggttcaagaagatcaaacctgaagccttcgaagccaacagattctacaccgtgatcaacaaaaagagcggcgagatcgtgcccatggaggtgaacttcaacttcgacgaccccaacctgatcatcctgcctctggcctttggcaagagacagggcagagaattcatctggaacgacctgctgtccctggaaaccggcagcctgaagctggccaacggaagagtgatcgagaagacactgtacaacagaagaacccggcaggatgagcctgccctgttcgtggccctgaccttcgagcggcgggaggtcctggactcctccaatatcaaaccaatgaacctgatcggcgtggcaagaggcgaaaacatccccgccgtgatcgccctgaccgaccccgagggctgcccactgagccggtttaaggatagcctgggaaacccaacccacatcctgagaatcggcgagagctataaggagaagcagcggaccatccaggccaagaaggaggtggagcagcggagagccggcggctacagccggaagtacgccagcaaagccaagaatctggcagacgatatggtgagaaacaccgctagagatctgctgtactacgccgtgacccaggatgccatgctgatcttcgccaacctgagccggggcttcggccggcagggcaagcggaccttcatggccgagagacagtacacacggatggaggactggctgaccgccaagctggcctacgagggcctgagcaagacctacctgtccaagacactggcccagtacacctccaagacatgcagcaactgtgggtttaccatcaccagcgccgactacgacagggtgctggagaagctgaagaagacagcaacaggctggatgaccacaattaacggcaaggagctgaaggtggagggccagattacctactacaacagatacaagagacagaacgtagtcaaggacctgtccgtcgagctggatagactgagcgaagaatctgtgaacaacgacatctcctcctggacaaagggcagaagcggagaagctctgagcctcctgaagaaaagattctcccatagacccgtgcaggagaagttcgtgtgcctgaactgcggcttcgagacacacgcagccgagcaagccgccctgaacatcgccagatcctggctgttcctgcggagccaggagtacaagaaataccagacaaacaagacaaccggcaacaccgataagagagccttcgtcgagacctggcagtccttttaccggaagaagcttaaggaggtgtggaaacctgccgtgcggtctggcggatctggcggaggctcctctggtgaagttcgaggaggtggccgtggtgttcagcgaggacgagtggaacctgctgagcgaccagcagaggggcctgtacatggaggtgatgaaggagaactacgagcacctgatctacctgggctacgaggtgcccgtgatcctgagcctgctgcaggacggcggcggcatcagcagcgacgccggcagccagagcaagagccagcaggtggccgtggccgagggcagcaacgtgaacagcggatctggctccggcagcggccccaagaaaaagagaaaagtctaagctgccttctgcggggcttgccttctggccatgcccttcttctctcccttgcacctgtacctcttggtctttgaataaagcctgagtaggaaggctagcaaaaaaaaaaaaaaaaaaaaaaaaaaaaaaaaaaaaaaaaaaaaaaaaaaaaaaaaaaaaaaaaaaaaaaaaaaaaaaaa

SEQ ID NO: 15584 - RNA, 9485 nt, synthetic construct
  source 1..9485: mol_type = other RNA
aggaaataagagagaaaagaagagtaagaagaaatataagagccaccatggcccctaagaagaagcgtaaagtgagccggatggaacgcctcgtctacgaggtgcggcagaagtgcagaaacatcgaggacatctgcatctcctgcggatctctgaacgtgaccctggagcacccactgttcatcggcggcatgtgccagaactgtaaaaactgttttctggagtgtgcctatcaatacgacgatgacggctaccagagctactgcaccatctgttgcggcggaagagaggtgctgatgtgtggaaataacaactgctgccggtgcttctgcgtggaatgcgtggacctgctggtgggccccggcgccgcccaggccgctattaaggaagatccttggaactgctacatgtgcggccacaagggcacatacggcctgctgagacggagagaggactggcctagcagactgcagatgttcttcgccaataaccacgaccaggagttcgacccccctaaggtgtaccctcccgtccccgccgagaagagaaagcccatccgggtcctgagcctgttcgatggcatcgccaccggtctgctggtgctgaaggacctgggcatccaggtggataggtacattgcctccgaggtgtgcgaggactccatcaccgtgggaatggtgcgtcatcagggcaagatcatgtacgtgggcgacgtgcggagcgtgacacagaagcatatccaggagtggggccctttcgacctggtgatcggcggcagcccttgcaatgacctgagcatcgtgaacccagcccggaagggcctgtacgagggaaccggcagactgttcttcgagttttacagactgctgcacgacgcccggcctaaggaaggcgacgaccggcccttcttttggctgttcgagaatgtggtggccatgggagtcagcgacaagcgggatattagccggttcctggagagcaaccccgtgatgatcgatgccaaggaagtgagcgccgcccaccgggccagatacttctggggcaatctgcctggcatgaacagacccctggccagcaccgtgaacgacaagctggagctgcaggagtgcctggagcacggccggatcgccaagttcagcaaggtgagaaccatcaccacccgaagcaacagcatcaaacaaggcaaggaccagcactttcctgtgttcatgaacgagaaggaggacatcctgtggtgtaccgagatggagagagtgttcgggttcccagtccactacacagatgtcagcaacatgtctagactggccagacagagactgctgggaagaagctggtccgtccctgtgatcagacacctgttcgcccctctgaaggagtacttcgcctgcgtgagcagcggcaacagcaacgccaacagccggggccccagcttctctagcggcctggtgccactgtccctgagagggagccacatgggccccatggagatctacaaaaccgtgagcgcctggaagcggcagcctgtgcgcgtgctgagcctgtttcggaatatcgataaagtcctgaaaagcctgggattcctggagagcggctctggctccggcggtggcaccctgaagtacgtggaggatgtgacaaacgtggtcagacgggatgtggagaagtggggccccttcgatctggtgtacggcagcacccaacccctgggcagctcttgtgaccggtgccctggctggtacatgtttcagttccaccggatcctgcagtacgccctgccgagacaggagtcccagcggccattcttttggattttcatggacaacttgctgctgaccgaggatgaccaggaaactaccactcggttcctgcagaccgaagccgtgaccctgcaggacgtgagaggccgggactaccagaacgccatgcgggtgtggtccaacatccctggactgaaaagcaagcacgcacctctgacccctaaagaagaggagtacctgcaggcccaggtgcggagcagaagcaagctggacgcccctaaggtggatctgctggtgaagaattgcctcctgcccctgagagagtacttcaagtatttcagccagaatagtctgcccctgggaggcagcggcggcggcgccctggtgacatttgaggacgtcgccgtgcggttcacccaggaggaatgggctctgctggatccttctcagaaaatcctgtaccgggacgtgatgagagagacataccggaatctgacctccgtgggcatcaactgggaatgttgggaccttgaagcctgcttcagaagcctgggaagaaacctgagagtgcaggtggtgaagagaaagtgcgagctgaccaacagcggcccctgcgccgagggcggcccaagcagcggcgcccctcctcccagcggcggcagcccagccggctccccaacctctaccgaggagggcacctctgagtccgccacccccgagagcggccctggcacctccaccgagcccagcgagggcagcgcacccggcagccctgccggcagccccacctccacagaggagggaaccagcaccgagcccagcgaaggcagcgccccaggcaccagcaccgagcctagtgagcaggagattaaacggatcaacaagatcagaagaagacttgtgaaagacagcaacaccaagaaggccggcaagacaggccccatgaaaaccctgctggttagagtgatgacacccgatctgagagagcggctggaaaacctgagaaagaagcctgaaaatatcccccagcccatcagcaatacatctagagccaacctgaataagctgctgaccgattacaccgaaatgaagaaggcgatcctgcatgtgtactgggaagagttccagaaggaccctgtgggcctgatgagccgggtggcccagcctgccagcaagaagatcgatcagaacaagctgaaacctgagatggacgagaagggcaacctgaccaccgccggctttgcctgctctcagtgtggccagcccctgttcgtgtacaagctggagcaggtgtctgagaagggcaaggcttacaccaactacttcggacggtgcaatgtggccgagcacgaaaagctgatcctgctggcccagctgaagcccgagaaggatagcgacgaagccgtgacatatagcctgggaaagtttgggcagagggccctggatttctacagcattcatgtgaccaaggagtccacccaccccgtgaagcccctggcccagatcgccggaaacagatacgcctccggacctgtgggaaaggccctgagcgacgcatgtatgggcacaatcgcctccttcctgtctaagtaccaggacatcatcatcgaacaccagaaggtggtgaagggcaaccagaagagactggagagcctgcgggagctggccggcaaggaaaacctggaataccctagcgtgaccctgccacctcagcctcacaccaaggagggcgttgatgcctacaacgaagtgatcgcccgggtgcgaatgtgggtgaacctgaacctgtggcagaagctgaagctaagcagagatgatgccaagcctctgctgagactgaagggattcccttcctttcctctggtcgagagacaggccaacgaagtggactggtgggacatggtgtgtaacgtgaagaagctgatcaacgagaaaaaggaggatggcaaggtgttttggcagaatctggctggctacaagagacaggaagccctgagaccatacctgagcagcgaggaagatcggaagaagggaaagaaattcgctcggtaccagctgggcgacctgctgctgcacctggaaaagaagcacggcgaggactggggaaaggtgtacgacgaggcctgggagcggattgacaagaaagtggaaggcctgagcaagcacatcaagctggaagaggaacggagaagcgaggacgcccagagcaaggccgccctgaccgactggctgcgggctaaggccagcttcgtgatcgagggcctgaaggaggccgacaaggacgagttctgcagatgcgagctgaagctgcagaagtggtacggggacctgcggggaaagcccttcgccatcgaagccgagaacagcatcctggacatcagcggcttcagcaagcagtacaactgtgccttcatctggcagaaggacggcgtgaagaagctgaacctgtacctgatcatcaactacttcaagggcggcaagctgcggttcaagaagatcaaacctgaagccttcgaagccaacagattctacaccgtgatcaacaaaaagagcggcgagatcgtgcccatggaggtgaacttcaacttcgacgaccccaacctgatcatcctgcctctggcctttggcaagagacagggcagagaattcatctggaacgacctgctgtccctggaaaccggcagcctgaagctggccaacggaagagtgatcgagaagacactgtacaacagaagaacccggcaggatgagcctgccctgttcgtggccctgaccttcgagcggcgggaggtcctggactcctccaatatcaaaccaatgaacctgatcggcgtggcaagaggcgaaaacatccccgccgtgatcgccctgaccgaccccgagggctgcccactgagccggtttaaggatagcctgggaaacccaacccacatcctgagaatcggcgagagctataaggagaagcagcggaccatccaggccaagaaggaggtggagcagcggagagccggcggctacagccggaagtacgccagcaaagccaagaatctggcagacgatatggtgagaaacaccgctagagatctgctgtactacgccgtgacccaggatgccatgctgatcttcgccaacctgagccggggcttcggccggcagggcaagcggaccttcatggccgagagacagtacacacggatggaggactggctgaccgccaagctggcctacgagggcctgagcaagacctacctgtccaagacactggcccagtacacctccaagacatgcagcaactgtgggtttaccatcaccagcgccgactacgacagggtgctggagaagctgaagaagacagcaacaggctggatgaccacaattaacggcaaggagctgaaggtggagggccagattacctactacaacagatacaagagacagaacgtagtcaaggacctgtccgtcgagctggatagactgagcgaagaatctgtgaacaacgacatctcctcctggacaaagggcagaagcggagaagctctgagcctcctgaagaaaagattctcccatagacccgtgcaggagaagttcgtgtgcctgaactgcggcttcgagacacacgcagccgagcaagccgccctgaacatcgccagatcctggctgttcctgcggagccaggagtacaagaaataccagacaaacaagacaaccggcaacaccgataagagagccttcgtcgagacctggcagtccttttaccggaagaagcttaaggaggtgtggaaacctgccgtgcggtctggcggatctggcggaggctccctggcccccgaggaccacggcagcagctacgagggcagcgtgagcttcagggacgtggccatcgacttcagcagggaggagtggaggcacctggacctgagccagaggaacctgtacagggacgtgatgctggagacctacagccacctgctgagcgtgggctaccaggtgcccgaggccgaggtggtgatgctggagcagggcaacgagccctggagcctgcagggcgagaggccccaccagggcggcccaagcagcggcgcccctcctcccagcggcggcagcccagccggctccccaacctctaccgaggagggcacctctgagtccgccacccccgagagcggccctggcacctccaccgagcccagcgagggcagcgcacccggcagccctgccggcagccccacctccacagaggagggaaccagcaccgagcccagcgaaggcagcgccccaggcaccagcaccgagcctagtgagcaggagattaaacggatcaacaagatcagaagaagacttgtgaaagacagcaacaccaagaaggccggcaagacaggccccatgaaaaccctgctggttagagtgatgacacccgatctgagagagcggctggaaaacctgagaaagaagcctgaaaatatcccccagcccatcagcaatacatctagagccaacctgaataagctgctgaccgattacaccgaaatgaagaaggcgatcctgcatgtgtactgggaagagttccagaaggaccctgtgggcctgatgagccgggtggcccagcctgccagcaagaagatcgatcagaacaagctgaaacctgagatggacgagaagggcaacctgaccaccgccggctttgcctgctctcagtgtggccagcccctgttcgtgtacaagctggagcaggtgtctgagaagggcaaggcttacaccaactacttcggacggtgcaatgtggccgagcacgaaaagctgatcctgctggcccagctgaagcccgagaaggatagcgacgaagccgtgacatatagcctgggaaagtttgggcagagggccctggatttctacagcattcatgtgaccaaggagtccacccaccccgtgaagcccctggcccagatcgccggaaacagatacgcctccggacctgtgggaaaggccctgagcgacgcatgtatgggcacaatcgcctccttcctgtctaagtaccaggacatcatcatcgaacaccagaaggtggtgaagggcaaccagaagagactggagagcctgcgggagctggccggcaaggaaaacctggaataccctagcgtgaccctgccacctcagcctcacaccaaggagggcgttgatgcctacaacgaagtgatcgcccgggtgcgaatgtgggtgaacctgaacctgtggcagaagctgaagctaagcagagatgatgccaagcctctgctgagactgaagggattcccttcctttcctctggtcgagagacaggccaacgaagtggactggtgggacatggtgtgtaacgtgaagaagctgatcaacgagaaaaaggaggatggcaaggtgttttggcagaatctggctggctacaagagacaggaagccctgagaccatacctgagcagcgaggaagatcggaagaagggaaagaaattcgctcggtaccagctgggcgacctgctgctgcacctggaaaagaagcacggcgaggactggggaaaggtgtacgacgaggcctgggagcggattgacaagaaagtggaaggcctgagcaagcacatcaagctggaagaggaacggagaagcgaggacgcccagagcaaggccgccctgaccgactggctgcgggctaaggccagcttcgtgatcgagggcctgaaggaggccgacaaggacgagttctgcagatgcgagctgaagctgcagaagtggtacggggacctgcggggaaagcccttcgccatcgaagccgagaacagcatcctggacatcagcggcttcagcaagcagtacaactgtgccttcatctggcagaaggacggcgtgaagaagctgaacctgtacctgatcatcaactacttcaagggcggcaagctgcggttcaagaagatcaaacctgaagccttcgaagccaacagattctacaccgtgatcaacaaaaagagcggcgagatcgtgcccatggaggtgaacttcaacttcgacgaccccaacctgatcatcctgcctctggcctttggcaagagacagggcagagaattcatctggaacgacctgctgtccctggaaaccggcagcctgaagctggccaacggaagagtgatcgagaagacactgtacaacagaagaacccggcaggatgagcctgccctgttcgtggccctgaccttcgagcggcgggaggtcctggactcctccaatatcaaaccaatgaacctgatcggcgtggcaagaggcgaaaacatccccgccgtgatcgccctgaccgaccccgagggctgcccactgagccggtttaaggatagcctgggaaacccaacccacatcctgagaatcggcgagagctataaggagaagcagcggaccatccaggccaagaaggaggtggagcagcggagagccggcggctacagccggaagtacgccagcaaagccaagaatctggcagacgatatggtgagaaacaccgctagagatctgctgtactacgccgtgacccaggatgccatgctgatcttcgccaacctgagccggggcttcggccggcagggcaagcggaccttcatggccgagagacagtacacacggatggaggactggctgaccgccaagctggcctacgagggcctgagcaagacctacctgtccaagacactggcccagtacacctccaagacatgcagcaactgtgggtttaccatcaccagcgccgactacgacagggtgctggagaagctgaagaagacagcaacaggctggatgaccacaattaacggcaaggagctgaaggtggagggccagattacctactacaacagatacaagagacagaacgtagtcaaggacctgtccgtcgagctggatagactgagcgaagaatctgtgaacaacgacatctcctcctggacaaagggcagaagcggagaagctctgagcctcctgaagaaaagattctcccatagacccgtgcaggagaagttcgtgtgcctgaactgcggcttcgagacacacgcagccgagcaagccgccctgaacatcgccagatcctggctgttcctgcggagccaggagtacaagaaataccagacaaacaagacaaccggcaacaccgataagagagccttcgtcgagacctggcagtccttttaccggaagaagcttaaggaggtgtggaaacctgccgtgcggtctggcggatctggcggaggctcctctggcccccgaggaccacggcagcagctacgagggcagcgtgagcttcagggacgtggccatcgacttcagcagggaggagtggaggcacctggacctgagccagaggaacctgtacagggacgtgatgctggagacctacagccacctgctgagcgtgggctaccaggtgcccgaggccgaggtggtgatgctggagcagggcaacgagccctggagcctgcagggcgagaggccccaccagggatctggctccggcagcggccccaagaaaaagagaaaagtctaagctgccttctgcggggcttgccttctggccatgcccttcttctctcccttgcacctgtacctcttggtctttgaataaagcctgagtaggaaggctagcaaaaaaaaaaaaaaaaaaaaaaaaaaaaaaaaaaaaaaaaaaaaaaaaaaaaaaaaaaaaaaaaaaaaaaaaaaaaaaaa

SEQ ID NO: 15585 - RNA, 9485 nt, synthetic construct
  source 1..9485: mol_type = other RNA
aggaaataagagagaaaagaagagtaagaagaaatataagagccaccatggcccctaagaagaagcgtaaagtgagccggatggaacgcctcgtctacgaggtgcggcagaagtgcagaaacatcgaggacatctgcatctcctgcggatctctgaacgtgaccctggagcacccactgttcatcggcggcatgtgccagaactgtaaaaactgttttctggagtgtgcctatcaatacgacgatgacggctaccagagctactgcaccatctgttgcggcggaagagaggtgctgatgtgtggaaataacaactgctgccggtgcttctgcgtggaatgcgtggacctgctggtgggccccggcgccgcccaggccgctattaaggaagatccttggaactgctacatgtgcggccacaagggcacatacggcctgctgagacggagagaggactggcctagcagactgcagatgttcttcgccaataaccacgaccaggagttcgacccccctaaggtgtaccctcccgtccccgccgagaagagaaagcccatccgggtcctgagcctgttcgatggcatcgccaccggtctgctggtgctgaaggacctgggcatccaggtggataggtacattgcctccgaggtgtgcgaggactccatcaccgtgggaatggtgcgtcatcagggcaagatcatgtacgtgggcgacgtgcggagcgtgacacagaagcatatccaggagtggggccctttcgacctggtgatcggcggcagcccttgcaatgacctgagcatcgtgaacccagcccggaagggcctgtacgagggaaccggcagactgttcttcgagttttacagactgctgcacgacgcccggcctaaggaaggcgacgaccggcccttcttttggctgttcgagaatgtggtggccatgggagtcagcgacaagcgggatattagccggttcctggagagcaaccccgtgatgatcgatgccaaggaagtgagcgccgcccaccgggccagatacttctggggcaatctgcctggcatgaacagacccctggccagcaccgtgaacgacaagctggagctgcaggagtgcctggagcacggccggatcgccaagttcagcaaggtgagaaccatcaccacccgaagcaacagcatcaaacaaggcaaggaccagcactttcctgtgttcatgaacgagaaggaggacatcctgtggtgtaccgagatggagagagtgttcgggttcccagtccactacacagatgtcagcaacatgtctagactggccagacagagactgctgggaagaagctggtccgtccctgtgatcagacacctgttcgcccctctgaaggagtacttcgcctgcgtgagcagcggcaacagcaacgccaacagccggggccccagcttctctagcggcctggtgccactgtccctgagagggagccacatgggccccatggagatctacaaaaccgtgagcgcctggaagcggcagcctgtgcgcgtgctgagcctgtttcggaatatcgataaagtcctgaaaagcctgggattcctggagagcggctctggctccggcggtggcaccctgaagtacgtggaggatgtgacaaacgtggtcagacgggatgtggagaagtggggccccttcgatctggtgtacggcagcacccaacccctgggcagctcttgtgaccggtgccctggctggtacatgtttcagttccaccggatcctgcagtacgccctgccgagacaggagtcccagcggccattcttttggattttcatggacaacttgctgctgaccgaggatgaccaggaaactaccactcggttcctgcagaccgaagccgtgaccctgcaggacgtgagaggccgggactaccagaacgccatgcgggtgtggtccaacatccctggactgaaaagcaagcacgcacctctgacccctaaagaagaggagtacctgcaggcccaggtgcggagcagaagcaagctggacgcccctaaggtggatctgctggtgaagaattgcctcctgcccctgagagagtacttcaagtatttcagccagaatagtctgcccctgggaggcagcggcggcggcgccctggtgacatttgaggacgtcgccgtgcggttcacccaggaggaatgggctctgctggatccttctcagaaaatcctgtaccgggacgtgatgagagagacataccggaatctgacctccgtgggcatcaactgggaatgttgggaccttgaagcctgcttcagaagcctgggaagaaacctgagagtgcaggtggtgaagagaaagtgcgagctgaccaacagcggcccctgcgccgagggcggcccaagcagcggcgcccctcctcccagcggcggcagcccagccggctccccaacctctaccgaggagggcacctctgagtccgccacccccgagagcggccctggcacctccaccgagcccagcgagggcagcgcacccggcagccctgccggcagccccacctccacagaggagggaaccagcaccgagcccagcgaaggcagcgccccaggcaccagcaccgagcctagtgagcaggagattaaacggatcaacaagatcagaagaagacttgtgaaagacagcaacaccaagaaggccggcaagacaggccccatgaaaaccctgctggttagagtgatgacacccgatctgagagagcggctggaaaacctgagaaagaagcctgaaaatatcccccagcccatcagcaatacatctagagccaacctgaataagctgctgaccgattacaccgaaatgaagaaggcgatcctgcatgtgtactgggaagagttccagaaggaccctgtgggcctgatgagccgggtggcccagcctgccagcaagaagatcgatcagaacaagctgaaacctgagatggacgagaagggcaacctgaccaccgccggctttgcctgctctcagtgtggccagcccctgttcgtgtacaagctggagcaggtgtctgagaagggcaaggcttacaccaactacttcggacggtgcaatgtggccgagcacgaaaagctgatcctgctggcccagctgaagcccgagaaggatagcgacgaagccgtgacatatagcctgggaaagtttgggcagagggccctggatttctacagcattcatgtgaccaaggagtccacccaccccgtgaagcccctggcccagatcgccggaaacagatacgcctccggacctgtgggaaaggccctgagcgacgcatgtatgggcacaatcgcctccttcctgtctaagtaccaggacatcatcatcgaacaccagaaggtggtgaagggcaaccagaagagactggagagcctgcgggagctggccggcaaggaaaacctggaataccctagcgtgaccctgccacctcagcctcacaccaaggagggcgttgatgcctacaacgaagtgatcgcccgggtgcgaatgtgggtgaacctgaacctgtggcagaagctgaagctaagcagagatgatgccaagcctctgctgagactgaagggattcccttcctttcctctggtcgagagacaggccaacgaagtggactggtgggacatggtgtgtaacgtgaagaagctgatcaacgagaaaaaggaggatggcaaggtgttttggcagaatctggctggctacaagagacaggaagccctgagaccatacctgagcagcgaggaagatcggaagaagggaaagaaattcgctcggtaccagctgggcgacctgctgctgcacctggaaaagaagcacggcgaggactggggaaaggtgtacgacgaggcctgggagcggattgacaagaaagtggaaggcctgagcaagcacatcaagctggaagaggaacggagaagcgaggacgcccagagcaaggccgccctgaccgactggctgcgggctaaggccagcttcgtgatcgagggcctgaaggaggccgacaaggacgagttctgcagatgcgagctgaagctgcagaagtggtacggggacctgcggggaaagcccttcgccatcgaagccgagaacagcatcctggacatcagcggcttcagcaagcagtacaactgtgccttcatctggcagaaggacggcgtgaagaagctgaacctgtacctgatcatcaactacttcaagggcggcaagctgcggttcaagaagatcaaacctgaagccttcgaagccaacagattctacaccgtgatcaacaaaaagagcggcgagatcgtgcccatggaggtgaacttcaacttcgacgaccccaacctgatcatcctgcctctggcctttggcaagagacagggcagagaattcatctggaacgacctgctgtccctggaaaccggcagcctgaagctggccaacggaagagtgatcgagaagacactgtacaacagaagaacccggcaggatgagcctgccctgttcgtggccctgaccttcgagcggcgggaggtcctggactcctccaatatcaaaccaatgaacctgatcggcgtggcaagaggcgaaaacatccccgccgtgatcgccctgaccgaccccgagggctgcccactgagccggtttaaggatagcctgggaaacccaacccacatcctgagaatcggcgagagctataaggagaagcagcggaccatccaggccaagaaggaggtggagcagcggagagccggcggctacagccggaagtacgccagcaaagccaagaatctggcagacgatatggtgagaaacaccgctagagatctgctgtactacgccgtgacccaggatgccatgctgatcttcgccaacctgagccggggcttcggccggcagggcaagcggaccttcatggccgagagacagtacacacggatggaggactggctgaccgccaagctggcctacgagggcctgagcaagacctacctgtccaagacactggcccagtacacctccaagacatgcagcaactgtgggtttaccatcaccagcgccgactacgacagggtgctggagaagctgaagaagacagcaacaggctggatgaccacaattaacggcaaggagctgaaggtggagggccagattacctactacaacagatacaagagacagaacgtagtcaaggacctgtccgtcgagctggatagactgagcgaagaatctgtgaacaacgacatctcctcctggacaaagggcagaagcggagaagctctgagcctcctgaagaaaagattctcccatagacccgtgcaggagaagttcgtgtgcctgaactgcggcttcgagacacacgcagccgagcaagccgccctgaacatcgccagatcctggctgttcctgcggagccaggagtacaagaaataccagacaaacaagacaaccggcaacaccgataagagagccttcgtcgagacctggcagtccttttaccggaagaagcttaaggaggtgtggaaacctgccgtgcggtctggcggatctggcggaggctccagcaaggtgcccgtgaccttcggcgacctggccatctacttcagccaggaggagtgggagtggctgagccccatccagaaggacctgtacgaggacgtgatgctggagaactaccagaacctggtgagcgtgggcctgagcttcaggaggcccaacgtgatcaccctgctggagaagggcagggccccctggatggtggagcccgtgaggaagaggaggggcatggacagcggcagcaagtgcggcggcccaagcagcggcgcccctcctcccagcggcggcagcccagccggctccccaacctctaccgaggagggcacctctgagtccgccacccccgagagcggccctggcacctccaccgagcccagcgagggcagcgcacccggcagccctgccggcagccccacctccacagaggagggaaccagcaccgagcccagcgaaggcagcgccccaggcaccagcaccgagcctagtgagcaggagattaaacggatcaacaagatcagaagaagacttgtgaaagacagcaacaccaagaaggccggcaagacaggccccatgaaaaccctgctggttagagtgatgacacccgatctgagagagcggctggaaaacctgagaaagaagcctgaaaatatcccccagcccatcagcaatacatctagagccaacctgaataagctgctgaccgattacaccgaaatgaagaaggcgatcctgcatgtgtactgggaagagttccagaaggaccctgtgggcctgatgagccgggtggcccagcctgccagcaagaagatcgatcagaacaagctgaaacctgagatggacgagaagggcaacctgaccaccgccggctttgcctgctctcagtgtggccagcccctgttcgtgtacaagctggagcaggtgtctgagaagggcaaggcttacaccaactacttcggacggtgcaatgtggccgagcacgaaaagctgatcctgctggcccagctgaagcccgagaaggatagcgacgaagccgtgacatatagcctgggaaagtttgggcagagggccctggatttctacagcattcatgtgaccaaggagtccacccaccccgtgaagcccctggcccagatcgccggaaacagatacgcctccggacctgtgggaaaggccctgagcgacgcatgtatgggcacaatcgcctccttcctgtctaagtaccaggacatcatcatcgaacaccagaaggtggtgaagggcaaccagaagagactggagagcctgcgggagctggccggcaaggaaaacctggaataccctagcgtgaccctgccacctcagcctcacaccaaggagggcgttgatgcctacaacgaagtgatcgcccgggtgcgaatgtgggtgaacctgaacctgtggcagaagctgaagctaagcagagatgatgccaagcctctgctgagactgaagggattcccttcctttcctctggtcgagagacaggccaacgaagtggactggtgggacatggtgtgtaacgtgaagaagctgatcaacgagaaaaaggaggatggcaaggtgttttggcagaatctggctggctacaagagacaggaagccctgagaccatacctgagcagcgaggaagatcggaagaagggaaagaaattcgctcggtaccagctgggcgacctgctgctgcacctggaaaagaagcacggcgaggactggggaaaggtgtacgacgaggcctgggagcggattgacaagaaagtggaaggcctgagcaagcacatcaagctggaagaggaacggagaagcgaggacgcccagagcaaggccgccctgaccgactggctgcgggctaaggccagcttcgtgatcgagggcctgaaggaggccgacaaggacgagttctgcagatgcgagctgaagctgcagaagtggtacggggacctgcggggaaagcccttcgccatcgaagccgagaacagcatcctggacatcagcggcttcagcaagcagtacaactgtgccttcatctggcagaaggacggcgtgaagaagctgaacctgtacctgatcatcaactacttcaagggcggcaagctgcggttcaagaagatcaaacctgaagccttcgaagccaacagattctacaccgtgatcaacaaaaagagcggcgagatcgtgcccatggaggtgaacttcaacttcgacgaccccaacctgatcatcctgcctctggcctttggcaagagacagggcagagaattcatctggaacgacctgctgtccctggaaaccggcagcctgaagctggccaacggaagagtgatcgagaagacactgtacaacagaagaacccggcaggatgagcctgccctgttcgtggccctgaccttcgagcggcgggaggtcctggactcctccaatatcaaaccaatgaacctgatcggcgtggcaagaggcgaaaacatccccgccgtgatcgccctgaccgaccccgagggctgcccactgagccggtttaaggatagcctgggaaacccaacccacatcctgagaatcggcgagagctataaggagaagcagcggaccatccaggccaagaaggaggtggagcagcggagagccggcggctacagccggaagtacgccagcaaagccaagaatctggcagacgatatggtgagaaacaccgctagagatctgctgtactacgccgtgacccaggatgccatgctgatcttcgccaacctgagccggggcttcggccggcagggcaagcggaccttcatggccgagagacagtacacacggatggaggactggctgaccgccaagctggcctacgagggcctgagcaagacctacctgtccaagacactggcccagtacacctccaagacatgcagcaactgtgggtttaccatcaccagcgccgactacgacagggtgctggagaagctgaagaagacagcaacaggctggatgaccacaattaacggcaaggagctgaaggtggagggccagattacctactacaacagatacaagagacagaacgtagtcaaggacctgtccgtcgagctggatagactgagcgaagaatctgtgaacaacgacatctcctcctggacaaagggcagaagcggagaagctctgagcctcctgaagaaaagattctcccatagacccgtgcaggagaagttcgtgtgcctgaactgcggcttcgagacacacgcagccgagcaagccgccctgaacatcgccagatcctggctgttcctgcggagccaggagtacaagaaataccagacaaacaagacaaccggcaacaccgataagagagccttcgtcgagacctggcagtccttttaccggaagaagcttaaggaggtgtggaaacctgccgtgcggtctggcggatctggcggaggctcctagcaaggtgcccgtgaccttcggcgacctggccatctacttcagccaggaggagtgggagtggctgagccccatccagaaggacctgtacgaggacgtgatgctggagaactaccagaacctggtgagcgtgggcctgagcttcaggaggcccaacgtgatcaccctgctggagaagggcagggccccctggatggtggagcccgtgaggaagaggaggggcatggacagcggcagcaagtgcggatctggctccggcagcggccccaagaaaaagagaaaagtctaagctgccttctgcggggcttgccttctggccatgcccttcttctctcccttgcacctgtacctcttggtctttgaataaagcctgagtaggaaggctagcaaaaaaaaaaaaaaaaaaaaaaaaaaaaaaaaaaaaaaaaaaaaaaaaaaaaaaaaaaaaaaaaaaaaaaaaaaaaaaaa

SEQ ID NO: 15586 - RNA, 9485 nt, synthetic construct
  source 1..9485: mol_type = other RNA
aggaaataagagagaaaagaagagtaagaagaaatataagagccaccatggcccctaagaagaagcgtaaagtgagccggatggaacgcctcgtctacgaggtgcggcagaagtgcagaaacatcgaggacatctgcatctcctgcggatctctgaacgtgaccctggagcacccactgttcatcggcggcatgtgccagaactgtaaaaactgttttctggagtgtgcctatcaatacgacgatgacggctaccagagctactgcaccatctgttgcggcggaagagaggtgctgatgtgtggaaataacaactgctgccggtgcttctgcgtggaatgcgtggacctgctggtgggccccggcgccgcccaggccgctattaaggaagatccttggaactgctacatgtgcggccacaagggcacatacggcctgctgagacggagagaggactggcctagcagactgcagatgttcttcgccaataaccacgaccaggagttcgacccccctaaggtgtaccctcccgtccccgccgagaagagaaagcccatccgggtcctgagcctgttcgatggcatcgccaccggtctgctggtgctgaaggacctgggcatccaggtggataggtacattgcctccgaggtgtgcgaggactccatcaccgtgggaatggtgcgtcatcagggcaagatcatgtacgtgggcgacgtgcggagcgtgacacagaagcatatccaggagtggggccctttcgacctggtgatcggcggcagcccttgcaatgacctgagcatcgtgaacccagcccggaagggcctgtacgagggaaccggcagactgttcttcgagttttacagactgctgcacgacgcccggcctaaggaaggcgacgaccggcccttcttttggctgttcgagaatgtggtggccatgggagtcagcgacaagcgggatattagccggttcctggagagcaaccccgtgatgatcgatgccaaggaagtgagcgccgcccaccgggccagatacttctggggcaatctgcctggcatgaacagacccctggccagcaccgtgaacgacaagctggagctgcaggagtgcctggagcacggccggatcgccaagttcagcaaggtgagaaccatcaccacccgaagcaacagcatcaaacaaggcaaggaccagcactttcctgtgttcatgaacgagaaggaggacatcctgtggtgtaccgagatggagagagtgttcgggttcccagtccactacacagatgtcagcaacatgtctagactggccagacagagactgctgggaagaagctggtccgtccctgtgatcagacacctgttcgcccctctgaaggagtacttcgcctgcgtgagcagcggcaacagcaacgccaacagccggggccccagcttctctagcggcctggtgccactgtccctgagagggagccacatgggccccatggagatctacaaaaccgtgagcgcctggaagcggcagcctgtgcgcgtgctgagcctgtttcggaatatcgataaagtcctgaaaagcctgggattcctggagagcggctctggctccggcggtggcaccctgaagtacgtggaggatgtgacaaacgtggtcagacgggatgtggagaagtggggccccttcgatctggtgtacggcagcacccaacccctgggcagctcttgtgaccggtgccctggctggtacatgtttcagttccaccggatcctgcagtacgccctgccgagacaggagtcccagcggccattcttttggattttcatggacaacttgctgctgaccgaggatgaccaggaaactaccactcggttcctgcagaccgaagccgtgaccctgcaggacgtgagaggccgggactaccagaacgccatgcgggtgtggtccaacatccctggactgaaaagcaagcacgcacctctgacccctaaagaagaggagtacctgcaggcccaggtgcggagcagaagcaagctggacgcccctaaggtggatctgctggtgaagaattgcctcctgcccctgagagagtacttcaagtatttcagccagaatagtctgcccctgggaggcagcggcggcggcgccctggtgacatttgaggacgtcgccgtgcggttcacccaggaggaatgggctctgctggatccttctcagaaaatcctgtaccgggacgtgatgagagagacataccggaatctgacctccgtgggcatcaactgggaatgttgggaccttgaagcctgcttcagaagcctgggaagaaacctgagagtgcaggtggtgaagagaaagtgcgagctgaccaacagcggcccctgcgccgagggcggcccaagcagcggcgcccctcctcccagcggcggcagcccagccggctccccaacctctaccgaggagggcacctctgagtccgccacccccgagagcggccctggcacctccaccgagcccagcgagggcagcgcacccggcagccctgccggcagccccacctccacagaggagggaaccagcaccgagcccagcgaaggcagcgccccaggcaccagcaccgagcctagtgagcaggagattaaacggatcaacaagatcagaagaagacttgtgaaagacagcaacaccaagaaggccggcaagacaggccccatgaaaaccctgctggttagagtgatgacacccgatctgagagagcggctggaaaacctgagaaagaagcctgaaaatatcccccagcccatcagcaatacatctagagccaacctgaataagctgctgaccgattacaccgaaatgaagaaggcgatcctgcatgtgtactgggaagagttccagaaggaccctgtgggcctgatgagccgggtggcccagcctgccagcaagaagatcgatcagaacaagctgaaacctgagatggacgagaagggcaacctgaccaccgccggctttgcctgctctcagtgtggccagcccctgttcgtgtacaagctggagcaggtgtctgagaagggcaaggcttacaccaactacttcggacggtgcaatgtggccgagcacgaaaagctgatcctgctggcccagctgaagcccgagaaggatagcgacgaagccgtgacatatagcctgggaaagtttgggcagagggccctggatttctacagcattcatgtgaccaaggagtccacccaccccgtgaagcccctggcccagatcgccggaaacagatacgcctccggacctgtgggaaaggccctgagcgacgcatgtatgggcacaatcgcctccttcctgtctaagtaccaggacatcatcatcgaacaccagaaggtggtgaagggcaaccagaagagactggagagcctgcgggagctggccggcaaggaaaacctggaataccctagcgtgaccctgccacctcagcctcacaccaaggagggcgttgatgcctacaacgaagtgatcgcccgggtgcgaatgtgggtgaacctgaacctgtggcagaagctgaagctaagcagagatgatgccaagcctctgctgagactgaagggattcccttcctttcctctggtcgagagacaggccaacgaagtggactggtgggacatggtgtgtaacgtgaagaagctgatcaacgagaaaaaggaggatggcaaggtgttttggcagaatctggctggctacaagagacaggaagccctgagaccatacctgagcagcgaggaagatcggaagaagggaaagaaattcgctcggtaccagctgggcgacctgctgctgcacctggaaaagaagcacggcgaggactggggaaaggtgtacgacgaggcctgggagcggattgacaagaaagtggaaggcctgagcaagcacatcaagctggaagaggaacggagaagcgaggacgcccagagcaaggccgccctgaccgactggctgcgggctaaggccagcttcgtgatcgagggcctgaaggaggccgacaaggacgagttctgcagatgcgagctgaagctgcagaagtggtacggggacctgcggggaaagcccttcgccatcgaagccgagaacagcatcctggacatcagcggcttcagcaagcagtacaactgtgccttcatctggcagaaggacggcgtgaagaagctgaacctgtacctgatcatcaactacttcaagggcggcaagctgcggttcaagaagatcaaacctgaagccttcgaagccaacagattctacaccgtgatcaacaaaaagagcggcgagatcgtgcccatggaggtgaacttcaacttcgacgaccccaacctgatcatcctgcctctggcctttggcaagagacagggcagagaattcatctggaacgacctgctgtccctggaaaccggcagcctgaagctggccaacggaagagtgatcgagaagacactgtacaacagaagaacccggcaggatgagcctgccctgttcgtggccctgaccttcgagcggcgggaggtcctggactcctccaatatcaaaccaatgaacctgatcggcgtggcaagaggcgaaaacatccccgccgtgatcgccctgaccgaccccgagggctgcccactgagccggtttaaggatagcctgggaaacccaacccacatcctgagaatcggcgagagctataaggagaagcagcggaccatccaggccaagaaggaggtggagcagcggagagccggcggctacagccggaagtacgccagcaaagccaagaatctggcagacgatatggtgagaaacaccgctagagatctgctgtactacgccgtgacccaggatgccatgctgatcttcgccaacctgagccggggcttcggccggcagggcaagcggaccttcatggccgagagacagtacacacggatggaggactggctgaccgccaagctggcctacgagggcctgagcaagacctacctgtccaagacactggcccagtacacctccaagacatgcagcaactgtgggtttaccatcaccagcgccgactacgacagggtgctggagaagctgaagaagacagcaacaggctggatgaccacaattaacggcaaggagctgaaggtggagggccagattacctactacaacagatacaagagacagaacgtagtcaaggacctgtccgtcgagctggatagactgagcgaagaatctgtgaacaacgacatctcctcctggacaaagggcagaagcggagaagctctgagcctcctgaagaaaagattctcccatagacccgtgcaggagaagttcgtgtgcctgaactgcggcttcgagacacacgcagccgagcaagccgccctgaacatcgccagatcctggctgttcctgcggagccaggagtacaagaaataccagacaaacaagacaaccggcaacaccgataagagagccttcgtcgagacctggcagtccttttaccggaagaagcttaaggaggtgtggaaacctgccgtgcggtctggcggatctggcggaggctccagcgtggccttcgaggacgtggccgtgaacttcacccaggaggagtgggccctgctgagccccagccagaagaacctgtacagggacgtgatgctggagaccttcaggaacctggccagcgtgggcatccagtggaaggaccagaacatcgagaacctgtaccagaacctgggcatcaagctgaggagcctggtggagaggctgtgcggcccccaggagggcagcgagcacagggagaccttcggcggcccaagcagcggcgcccctcctcccagcggcggcagcccagccggctccccaacctctaccgaggagggcacctctgagtccgccacccccgagagcggccctggcacctccaccgagcccagcgagggcagcgcacccggcagccctgccggcagccccacctccacagaggagggaaccagcaccgagcccagcgaaggcagcgccccaggcaccagcaccgagcctagtgagcaggagattaaacggatcaacaagatcagaagaagacttgtgaaagacagcaacaccaagaaggccggcaagacaggccccatgaaaaccctgctggttagagtgatgacacccgatctgagagagcggctggaaaacctgagaaagaagcctgaaaatatcccccagcccatcagcaatacatctagagccaacctgaataagctgctgaccgattacaccgaaatgaagaaggcgatcctgcatgtgtactgggaagagttccagaaggaccctgtgggcctgatgagccgggtggcccagcctgccagcaagaagatcgatcagaacaagctgaaacctgagatggacgagaagggcaacctgaccaccgccggctttgcctgctctcagtgtggccagcccctgttcgtgtacaagctggagcaggtgtctgagaagggcaaggcttacaccaactacttcggacggtgcaatgtggccgagcacgaaaagctgatcctgctggcccagctgaagcccgagaaggatagcgacgaagccgtgacatatagcctgggaaagtttgggcagagggccctggatttctacagcattcatgtgaccaaggagtccacccaccccgtgaagcccctggcccagatcgccggaaacagatacgcctccggacctgtgggaaaggccctgagcgacgcatgtatgggcacaatcgcctccttcctgtctaagtaccaggacatcatcatcgaacaccagaaggtggtgaagggcaaccagaagagactggagagcctgcgggagctggccggcaaggaaaacctggaataccctagcgtgaccctgccacctcagcctcacaccaaggagggcgttgatgcctacaacgaagtgatcgcccgggtgcgaatgtgggtgaacctgaacctgtggcagaagctgaagctaagcagagatgatgccaagcctctgctgagactgaagggattcccttcctttcctctggtcgagagacaggccaacgaagtggactggtgggacatggtgtgtaacgtgaagaagctgatcaacgagaaaaaggaggatggcaaggtgttttggcagaatctggctggctacaagagacaggaagccctgagaccatacctgagcagcgaggaagatcggaagaagggaaagaaattcgctcggtaccagctgggcgacctgctgctgcacctggaaaagaagcacggcgaggactggggaaaggtgtacgacgaggcctgggagcggattgacaagaaagtggaaggcctgagcaagcacatcaagctggaagaggaacggagaagcgaggacgcccagagcaaggccgccctgaccgactggctgcgggctaaggccagcttcgtgatcgagggcctgaaggaggccgacaaggacgagttctgcagatgcgagctgaagctgcagaagtggtacggggacctgcggggaaagcccttcgccatcgaagccgagaacagcatcctggacatcagcggcttcagcaagcagtacaactgtgccttcatctggcagaaggacggcgtgaagaagctgaacctgtacctgatcatcaactacttcaagggcggcaagctgcggttcaagaagatcaaacctgaagccttcgaagccaacagattctacaccgtgatcaacaaaaagagcggcgagatcgtgcccatggaggtgaacttcaacttcgacgaccccaacctgatcatcctgcctctggcctttggcaagagacagggcagagaattcatctggaacgacctgctgtccctggaaaccggcagcctgaagctggccaacggaagagtgatcgagaagacactgtacaacagaagaacccggcaggatgagcctgccctgttcgtggccctgaccttcgagcggcgggaggtcctggactcctccaatatcaaaccaatgaacctgatcggcgtggcaagaggcgaaaacatccccgccgtgatcgccctgaccgaccccgagggctgcccactgagccggtttaaggatagcctgggaaacccaacccacatcctgagaatcggcgagagctataaggagaagcagcggaccatccaggccaagaaggaggtggagcagcggagagccggcggctacagccggaagtacgccagcaaagccaagaatctggcagacgatatggtgagaaacaccgctagagatctgctgtactacgccgtgacccaggatgccatgctgatcttcgccaacctgagccggggcttcggccggcagggcaagcggaccttcatggccgagagacagtacacacggatggaggactggctgaccgccaagctggcctacgagggcctgagcaagacctacctgtccaagacactggcccagtacacctccaagacatgcagcaactgtgggtttaccatcaccagcgccgactacgacagggtgctggagaagctgaagaagacagcaacaggctggatgaccacaattaacggcaaggagctgaaggtggagggccagattacctactacaacagatacaagagacagaacgtagtcaaggacctgtccgtcgagctggatagactgagcgaagaatctgtgaacaacgacatctcctcctggacaaagggcagaagcggagaagctctgagcctcctgaagaaaagattctcccatagacccgtgcaggagaagttcgtgtgcctgaactgcggcttcgagacacacgcagccgagcaagccgccctgaacatcgccagatcctggctgttcctgcggagccaggagtacaagaaataccagacaaacaagacaaccggcaacaccgataagagagccttcgtcgagacctggcagtccttttaccggaagaagcttaaggaggtgtggaaacctgccgtgcggtctggcggatctggcggaggctcctagcgtggccttcgaggacgtggccgtgaacttcacccaggaggagtgggccctgctgagccccagccagaagaacctgtacagggacgtgatgctggagaccttcaggaacctggccagcgtgggcatccagtggaaggaccagaacatcgagaacctgtaccagaacctgggcatcaagctgaggagcctggtggagaggctgtgcggcccccaggagggcagcgagcacagggagaccttcggatctggctccggcagcggccccaagaaaaagagaaaagtctaagctgccttctgcggggcttgccttctggccatgcccttcttctctcccttgcacctgtacctcttggtctttgaataaagcctgagtaggaaggctagcaaaaaaaaaaaaaaaaaaaaaaaaaaaaaaaaaaaaaaaaaaaaaaaaaaaaaaaaaaaaaaaaaaaaaaaaaaaaaaaa

SEQ ID NO: 15587 - RNA, 9485 nt, synthetic construct
  source 1..9485: mol_type = other RNA
aggaaataagagagaaaagaagagtaagaagaaatataagagccaccatggcccctaagaagaagcgtaaagtgagccggatggaacgcctcgtctacgaggtgcggcagaagtgcagaaacatcgaggacatctgcatctcctgcggatctctgaacgtgaccctggagcacccactgttcatcggcggcatgtgccagaactgtaaaaactgttttctggagtgtgcctatcaatacgacgatgacggctaccagagctactgcaccatctgttgcggcggaagagaggtgctgatgtgtggaaataacaactgctgccggtgcttctgcgtggaatgcgtggacctgctggtgggccccggcgccgcccaggccgctattaaggaagatccttggaactgctacatgtgcggccacaagggcacatacggcctgctgagacggagagaggactggcctagcagactgcagatgttcttcgccaataaccacgaccaggagttcgacccccctaaggtgtaccctcccgtccccgccgagaagagaaagcccatccgggtcctgagcctgttcgatggcatcgccaccggtctgctggtgctgaaggacctgggcatccaggtggataggtacattgcctccgaggtgtgcgaggactccatcaccgtgggaatggtgcgtcatcagggcaagatcatgtacgtgggcgacgtgcggagcgtgacacagaagcatatccaggagtggggccctttcgacctggtgatcggcggcagcccttgcaatgacctgagcatcgtgaacccagcccggaagggcctgtacgagggaaccggcagactgttcttcgagttttacagactgctgcacgacgcccggcctaaggaaggcgacgaccggcccttcttttggctgttcgagaatgtggtggccatgggagtcagcgacaagcgggatattagccggttcctggagagcaaccccgtgatgatcgatgccaaggaagtgagcgccgcccaccgggccagatacttctggggcaatctgcctggcatgaacagacccctggccagcaccgtgaacgacaagctggagctgcaggagtgcctggagcacggccggatcgccaagttcagcaaggtgagaaccatcaccacccgaagcaacagcatcaaacaaggcaaggaccagcactttcctgtgttcatgaacgagaaggaggacatcctgtggtgtaccgagatggagagagtgttcgggttcccagtccactacacagatgtcagcaacatgtctagactggccagacagagactgctgggaagaagctggtccgtccctgtgatcagacacctgttcgcccctctgaaggagtacttcgcctgcgtgagcagcggcaacagcaacgccaacagccggggccccagcttctctagcggcctggtgccactgtccctgagagggagccacatgggccccatggagatctacaaaaccgtgagcgcctggaagcggcagcctgtgcgcgtgctgagcctgtttcggaatatcgataaagtcctgaaaagcctgggattcctggagagcggctctggctccggcggtggcaccctgaagtacgtggaggatgtgacaaacgtggtcagacgggatgtggagaagtggggccccttcgatctggtgtacggcagcacccaacccctgggcagctcttgtgaccggtgccctggctggtacatgtttcagttccaccggatcctgcagtacgccctgccgagacaggagtcccagcggccattcttttggattttcatggacaacttgctgctgaccgaggatgaccaggaaactaccactcggttcctgcagaccgaagccgtgaccctgcaggacgtgagaggccgggactaccagaacgccatgcgggtgtggtccaacatccctggactgaaaagcaagcacgcacctctgacccctaaagaagaggagtacctgcaggcccaggtgcggagcagaagcaagctggacgcccctaaggtggatctgctggtgaagaattgcctcctgcccctgagagagtacttcaagtatttcagccagaatagtctgcccctgggaggcagcggcggcggcgccctggtgacatttgaggacgtcgccgtgcggttcacccaggaggaatgggctctgctggatccttctcagaaaatcctgtaccgggacgtgatgagagagacataccggaatctgacctccgtgggcatcaactgggaatgttgggaccttgaagcctgcttcagaagcctgggaagaaacctgagagtgcaggtggtgaagagaaagtgcgagctgaccaacagcggcccctgcgccgagggcggcccaagcagcggcgcccctcctcccagcggcggcagcccagccggctccccaacctctaccgaggagggcacctctgagtccgccacccccgagagcggccctggcacctccaccgagcccagcgagggcagcgcacccggcagccctgccggcagccccacctccacagaggagggaaccagcaccgagcccagcgaaggcagcgccccaggcaccagcaccgagcctagtgagcaggagattaaacggatcaacaagatcagaagaagacttgtgaaagacagcaacaccaagaaggccggcaagacaggccccatgaaaaccctgctggttagagtgatgacacccgatctgagagagcggctggaaaacctgagaaagaagcctgaaaatatcccccagcccatcagcaatacatctagagccaacctgaataagctgctgaccgattacaccgaaatgaagaaggcgatcctgcatgtgtactgggaagagttccagaaggaccctgtgggcctgatgagccgggtggcccagcctgccagcaagaagatcgatcagaacaagctgaaacctgagatggacgagaagggcaacctgaccaccgccggctttgcctgctctcagtgtggccagcccctgttcgtgtacaagctggagcaggtgtctgagaagggcaaggcttacaccaactacttcggacggtgcaatgtggccgagcacgaaaagctgatcctgctggcccagctgaagcccgagaaggatagcgacgaagccgtgacatatagcctgggaaagtttgggcagagggccctggatttctacagcattcatgtgaccaaggagtccacccaccccgtgaagcccctggcccagatcgccggaaacagatacgcctccggacctgtgggaaaggccctgagcgacgcatgtatgggcacaatcgcctccttcctgtctaagtaccaggacatcatcatcgaacaccagaaggtggtgaagggcaaccagaagagactggagagcctgcgggagctggccggcaaggaaaacctggaataccctagcgtgaccctgccacctcagcctcacaccaaggagggcgttgatgcctacaacgaagtgatcgcccgggtgcgaatgtgggtgaacctgaacctgtggcagaagctgaagctaagcagagatgatgccaagcctctgctgagactgaagggattcccttcctttcctctggtcgagagacaggccaacgaagtggactggtgggacatggtgtgtaacgtgaagaagctgatcaacgagaaaaaggaggatggcaaggtgttttggcagaatctggctggctacaagagacaggaagccctgagaccatacctgagcagcgaggaagatcggaagaagggaaagaaattcgctcggtaccagctgggcgacctgctgctgcacctggaaaagaagcacggcgaggactggggaaaggtgtacgacgaggcctgggagcggattgacaagaaagtggaaggcctgagcaagcacatcaagctggaagaggaacggagaagcgaggacgcccagagcaaggccgccctgaccgactggctgcgggctaaggccagcttcgtgatcgagggcctgaaggaggccgacaaggacgagttctgcagatgcgagctgaagctgcagaagtggtacggggacctgcggggaaagcccttcgccatcgaagccgagaacagcatcctggacatcagcggcttcagcaagcagtacaactgtgccttcatctggcagaaggacggcgtgaagaagctgaacctgtacctgatcatcaactacttcaagggcggcaagctgcggttcaagaagatcaaacctgaagccttcgaagccaacagattctacaccgtgatcaacaaaaagagcggcgagatcgtgcccatggaggtgaacttcaacttcgacgaccccaacctgatcatcctgcctctggcctttggcaagagacagggcagagaattcatctggaacgacctgctgtccctggaaaccggcagcctgaagctggccaacggaagagtgatcgagaagacactgtacaacagaagaacccggcaggatgagcctgccctgttcgtggccctgaccttcgagcggcgggaggtcctggactcctccaatatcaaaccaatgaacctgatcggcgtggcaagaggcgaaaacatccccgccgtgatcgccctgaccgaccccgagggctgcccactgagccggtttaaggatagcctgggaaacccaacccacatcctgagaatcggcgagagctataaggagaagcagcggaccatccaggccaagaaggaggtggagcagcggagagccggcggctacagccggaagtacgccagcaaagccaagaatctggcagacgatatggtgagaaacaccgctagagatctgctgtactacgccgtgacccaggatgccatgctgatcttcgccaacctgagccggggcttcggccggcagggcaagcggaccttcatggccgagagacagtacacacggatggaggactggctgaccgccaagctggcctacgagggcctgagcaagacctacctgtccaagacactggcccagtacacctccaagacatgcagcaactgtgggtttaccatcaccagcgccgactacgacagggtgctggagaagctgaagaagacagcaacaggctggatgaccacaattaacggcaaggagctgaaggtggagggccagattacctactacaacagatacaagagacagaacgtagtcaaggacctgtccgtcgagctggatagactgagcgaagaatctgtgaacaacgacatctcctcctggacaaagggcagaagcggagaagctctgagcctcctgaagaaaagattctcccatagacccgtgcaggagaagttcgtgtgcctgaactgcggcttcgagacacacgcagccgagcaagccgccctgaacatcgccagatcctggctgttcctgcggagccaggagtacaagaaataccagacaaacaagacaaccggcaacaccgataagagagccttcgtcgagacctggcagtccttttaccggaagaagcttaaggaggtgtggaaacctgccgtgcggtctggcggatctggcggaggctccagccagagcctggtgaccttcggcgacgtggccgtggagttcagccccgaggagtgggcctggctggacagcgcccagaggagcctgtacaggagcgtgatgctggagaactacaggagcctggtgagcctgggcctgtgcgtgagcaagcccaagatgatcagcagcctggagcagaggaaggagccctgggccgccaagaggaccctgaccaggggcggctgccccgacagcagggccctgggcggcccaagcagcggcgcccctcctcccagcggcggcagcccagccggctccccaacctctaccgaggagggcacctctgagtccgccacccccgagagcggccctggcacctccaccgagcccagcgagggcagcgcacccggcagccctgccggcagccccacctccacagaggagggaaccagcaccgagcccagcgaaggcagcgccccaggcaccagcaccgagcctagtgagcaggagattaaacggatcaacaagatcagaagaagacttgtgaaagacagcaacaccaagaaggccggcaagacaggccccatgaaaaccctgctggttagagtgatgacacccgatctgagagagcggctggaaaacctgagaaagaagcctgaaaatatcccccagcccatcagcaatacatctagagccaacctgaataagctgctgaccgattacaccgaaatgaagaaggcgatcctgcatgtgtactgggaagagttccagaaggaccctgtgggcctgatgagccgggtggcccagcctgccagcaagaagatcgatcagaacaagctgaaacctgagatggacgagaagggcaacctgaccaccgccggctttgcctgctctcagtgtggccagcccctgttcgtgtacaagctggagcaggtgtctgagaagggcaaggcttacaccaactacttcggacggtgcaatgtggccgagcacgaaaagctgatcctgctggcccagctgaagcccgagaaggatagcgacgaagccgtgacatatagcctgggaaagtttgggcagagggccctggatttctacagcattcatgtgaccaaggagtccacccaccccgtgaagcccctggcccagatcgccggaaacagatacgcctccggacctgtgggaaaggccctgagcgacgcatgtatgggcacaatcgcctccttcctgtctaagtaccaggacatcatcatcgaacaccagaaggtggtgaagggcaaccagaagagactggagagcctgcgggagctggccggcaaggaaaacctggaataccctagcgtgaccctgccacctcagcctcacaccaaggagggcgttgatgcctacaacgaagtgatcgcccgggtgcgaatgtgggtgaacctgaacctgtggcagaagctgaagctaagcagagatgatgccaagcctctgctgagactgaagggattcccttcctttcctctggtcgagagacaggccaacgaagtggactggtgggacatggtgtgtaacgtgaagaagctgatcaacgagaaaaaggaggatggcaaggtgttttggcagaatctggctggctacaagagacaggaagccctgagaccatacctgagcagcgaggaagatcggaagaagggaaagaaattcgctcggtaccagctgggcgacctgctgctgcacctggaaaagaagcacggcgaggactggggaaaggtgtacgacgaggcctgggagcggattgacaagaaagtggaaggcctgagcaagcacatcaagctggaagaggaacggagaagcgaggacgcccagagcaaggccgccctgaccgactggctgcgggctaaggccagcttcgtgatcgagggcctgaaggaggccgacaaggacgagttctgcagatgcgagctgaagctgcagaagtggtacggggacctgcggggaaagcccttcgccatcgaagccgagaacagcatcctggacatcagcggcttcagcaagcagtacaactgtgccttcatctggcagaaggacggcgtgaagaagctgaacctgtacctgatcatcaactacttcaagggcggcaagctgcggttcaagaagatcaaacctgaagccttcgaagccaacagattctacaccgtgatcaacaaaaagagcggcgagatcgtgcccatggaggtgaacttcaacttcgacgaccccaacctgatcatcctgcctctggcctttggcaagagacagggcagagaattcatctggaacgacctgctgtccctggaaaccggcagcctgaagctggccaacggaagagtgatcgagaagacactgtacaacagaagaacccggcaggatgagcctgccctgttcgtggccctgaccttcgagcggcgggaggtcctggactcctccaatatcaaaccaatgaacctgatcggcgtggcaagaggcgaaaacatccccgccgtgatcgccctgaccgaccccgagggctgcccactgagccggtttaaggatagcctgggaaacccaacccacatcctgagaatcggcgagagctataaggagaagcagcggaccatccaggccaagaaggaggtggagcagcggagagccggcggctacagccggaagtacgccagcaaagccaagaatctggcagacgatatggtgagaaacaccgctagagatctgctgtactacgccgtgacccaggatgccatgctgatcttcgccaacctgagccggggcttcggccggcagggcaagcggaccttcatggccgagagacagtacacacggatggaggactggctgaccgccaagctggcctacgagggcctgagcaagacctacctgtccaagacactggcccagtacacctccaagacatgcagcaactgtgggtttaccatcaccagcgccgactacgacagggtgctggagaagctgaagaagacagcaacaggctggatgaccacaattaacggcaaggagctgaaggtggagggccagattacctactacaacagatacaagagacagaacgtagtcaaggacctgtccgtcgagctggatagactgagcgaagaatctgtgaacaacgacatctcctcctggacaaagggcagaagcggagaagctctgagcctcctgaagaaaagattctcccatagacccgtgcaggagaagttcgtgtgcctgaactgcggcttcgagacacacgcagccgagcaagccgccctgaacatcgccagatcctggctgttcctgcggagccaggagtacaagaaataccagacaaacaagacaaccggcaacaccgataagagagccttcgtcgagacctggcagtccttttaccggaagaagcttaaggaggtgtggaaacctgccgtgcggtctggcggatctggcggaggctcctagccagagcctggtgaccttcggcgacgtggccgtggagttcagccccgaggagtgggcctggctggacagcgcccagaggagcctgtacaggagcgtgatgctggagaactacaggagcctggtgagcctgggcctgtgcgtgagcaagcccaagatgatcagcagcctggagcagaggaaggagccctgggccgccaagaggaccctgaccaggggcggctgccccgacagcagggccctgggatctggctccggcagcggccccaagaaaaagagaaaagtctaagctgccttctgcggggcttgccttctggccatgcccttcttctctcccttgcacctgtacctcttggtctttgaataaagcctgagtaggaaggctagcaaaaaaaaaaaaaaaaaaaaaaaaaaaaaaaaaaaaaaaaaaaaaaaaaaaaaaaaaaaaaaaaaaaaaaaaaaaaaaaa

SEQ ID NO: 15588 - RNA, 9485 nt, synthetic construct
  source 1..9485: mol_type = other RNA
aggaaataagagagaaaagaagagtaagaagaaatataagagccaccatggcccctaagaagaagcgtaaagtgagccggatggaacgcctcgtctacgaggtgcggcagaagtgcagaaacatcgaggacatctgcatctcctgcggatctctgaacgtgaccctggagcacccactgttcatcggcggcatgtgccagaactgtaaaaactgttttctggagtgtgcctatcaatacgacgatgacggctaccagagctactgcaccatctgttgcggcggaagagaggtgctgatgtgtggaaataacaactgctgccggtgcttctgcgtggaatgcgtggacctgctggtgggccccggcgccgcccaggccgctattaaggaagatccttggaactgctacatgtgcggccacaagggcacatacggcctgctgagacggagagaggactggcctagcagactgcagatgttcttcgccaataaccacgaccaggagttcgacccccctaaggtgtaccctcccgtccccgccgagaagagaaagcccatccgggtcctgagcctgttcgatggcatcgccaccggtctgctggtgctgaaggacctgggcatccaggtggataggtacattgcctccgaggtgtgcgaggactccatcaccgtgggaatggtgcgtcatcagggcaagatcatgtacgtgggcgacgtgcggagcgtgacacagaagcatatccaggagtggggccctttcgacctggtgatcggcggcagcccttgcaatgacctgagcatcgtgaacccagcccggaagggcctgtacgagggaaccggcagactgttcttcgagttttacagactgctgcacgacgcccggcctaaggaaggcgacgaccggcccttcttttggctgttcgagaatgtggtggccatgggagtcagcgacaagcgggatattagccggttcctggagagcaaccccgtgatgatcgatgccaaggaagtgagcgccgcccaccgggccagatacttctggggcaatctgcctggcatgaacagacccctggccagcaccgtgaacgacaagctggagctgcaggagtgcctggagcacggccggatcgccaagttcagcaaggtgagaaccatcaccacccgaagcaacagcatcaaacaaggcaaggaccagcactttcctgtgttcatgaacgagaaggaggacatcctgtggtgtaccgagatggagagagtgttcgggttcccagtccactacacagatgtcagcaacatgtctagactggccagacagagactgctgggaagaagctggtccgtccctgtgatcagacacctgttcgcccctctgaaggagtacttcgcctgcgtgagcagcggcaacagcaacgccaacagccggggccccagcttctctagcggcctggtgccactgtccctgagagggagccacatgggccccatggagatctacaaaaccgtgagcgcctggaagcggcagcctgtgcgcgtgctgagcctgtttcggaatatcgataaagtcctgaaaagcctgggattcctggagagcggctctggctccggcggtggcaccctgaagtacgtggaggatgtgacaaacgtggtcagacgggatgtggagaagtggggccccttcgatctggtgtacggcagcacccaacccctgggcagctcttgtgaccggtgccctggctggtacatgtttcagttccaccggatcctgcagtacgccctgccgagacaggagtcccagcggccattcttttggattttcatggacaacttgctgctgaccgaggatgaccaggaaactaccactcggttcctgcagaccgaagccgtgaccctgcaggacgtgagaggccgggactaccagaacgccatgcgggtgtggtccaacatccctggactgaaaagcaagcacgcacctctgacccctaaagaagaggagtacctgcaggcccaggtgcggagcagaagcaagctggacgcccctaaggtggatctgctggtgaagaattgcctcctgcccctgagagagtacttcaagtatttcagccagaatagtctgcccctgggaggcagcggcggcggcgccctggtgacatttgaggacgtcgccgtgcggttcacccaggaggaatgggctctgctggatccttctcagaaaatcctgtaccgggacgtgatgagagagacataccggaatctgacctccgtgggcatcaactgggaatgttgggaccttgaagcctgcttcagaagcctgggaagaaacctgagagtgcaggtggtgaagagaaagtgcgagctgaccaacagcggcccctgcgccgagggcggcccaagcagcggcgcccctcctcccagcggcggcagcccagccggctccccaacctctaccgaggagggcacctctgagtccgccacccccgagagcggccctggcacctccaccgagcccagcgagggcagcgcacccggcagccctgccggcagccccacctccacagaggagggaaccagcaccgagcccagcgaaggcagcgccccaggcaccagcaccgagcctagtgagcaggagattaaacggatcaacaagatcagaagaagacttgtgaaagacagcaacaccaagaaggccggcaagacaggccccatgaaaaccctgctggttagagtgatgacacccgatctgagagagcggctggaaaacctgagaaagaagcctgaaaatatcccccagcccatcagcaatacatctagagccaacctgaataagctgctgaccgattacaccgaaatgaagaaggcgatcctgcatgtgtactgggaagagttccagaaggaccctgtgggcctgatgagccgggtggcccagcctgccagcaagaagatcgatcagaacaagctgaaacctgagatggacgagaagggcaacctgaccaccgccggctttgcctgctctcagtgtggccagcccctgttcgtgtacaagctggagcaggtgtctgagaagggcaaggcttacaccaactacttcggacggtgcaatgtggccgagcacgaaaagctgatcctgctggcccagctgaagcccgagaaggatagcgacgaagccgtgacatatagcctgggaaagtttgggcagagggccctggatttctacagcattcatgtgaccaaggagtccacccaccccgtgaagcccctggcccagatcgccggaaacagatacgcctccggacctgtgggaaaggccctgagcgacgcatgtatgggcacaatcgcctccttcctgtctaagtaccaggacatcatcatcgaacaccagaaggtggtgaagggcaaccagaagagactggagagcctgcgggagctggccggcaaggaaaacctggaataccctagcgtgaccctgccacctcagcctcacaccaaggagggcgttgatgcctacaacgaagtgatcgcccgggtgcgaatgtgggtgaacctgaacctgtggcagaagctgaagctaagcagagatgatgccaagcctctgctgagactgaagggattcccttcctttcctctggtcgagagacaggccaacgaagtggactggtgggacatggtgtgtaacgtgaagaagctgatcaacgagaaaaaggaggatggcaaggtgttttggcagaatctggctggctacaagagacaggaagccctgagaccatacctgagcagcgaggaagatcggaagaagggaaagaaattcgctcggtaccagctgggcgacctgctgctgcacctggaaaagaagcacggcgaggactggggaaaggtgtacgacgaggcctgggagcggattgacaagaaagtggaaggcctgagcaagcacatcaagctggaagaggaacggagaagcgaggacgcccagagcaaggccgccctgaccgactggctgcgggctaaggccagcttcgtgatcgagggcctgaaggaggccgacaaggacgagttctgcagatgcgagctgaagctgcagaagtggtacggggacctgcggggaaagcccttcgccatcgaagccgagaacagcatcctggacatcagcggcttcagcaagcagtacaactgtgccttcatctggcagaaggacggcgtgaagaagctgaacctgtacctgatcatcaactacttcaagggcggcaagctgcggttcaagaagatcaaacctgaagccttcgaagccaacagattctacaccgtgatcaacaaaaagagcggcgagatcgtgcccatggaggtgaacttcaacttcgacgaccccaacctgatcatcctgcctctggcctttggcaagagacagggcagagaattcatctggaacgacctgctgtccctggaaaccggcagcctgaagctggccaacggaagagtgatcgagaagacactgtacaacagaagaacccggcaggatgagcctgccctgttcgtggccctgaccttcgagcggcgggaggtcctggactcctccaatatcaaaccaatgaacctgatcggcgtggcaagaggcgaaaacatccccgccgtgatcgccctgaccgaccccgagggctgcccactgagccggtttaaggatagcctgggaaacccaacccacatcctgagaatcggcgagagctataaggagaagcagcggaccatccaggccaagaaggaggtggagcagcggagagccggcggctacagccggaagtacgccagcaaagccaagaatctggcagacgatatggtgagaaacaccgctagagatctgctgtactacgccgtgacccaggatgccatgctgatcttcgccaacctgagccggggcttcggccggcagggcaagcggaccttcatggccgagagacagtacacacggatggaggactggctgaccgccaagctggcctacgagggcctgagcaagacctacctgtccaagacactggcccagtacacctccaagacatgcagcaactgtgggtttaccatcaccagcgccgactacgacagggtgctggagaagctgaagaagacagcaacaggctggatgaccacaattaacggcaaggagctgaaggtggagggccagattacctactacaacagatacaagagacagaacgtagtcaaggacctgtccgtcgagctggatagactgagcgaagaatctgtgaacaacgacatctcctcctggacaaagggcagaagcggagaagctctgagcctcctgaagaaaagattctcccatagacccgtgcaggagaagttcgtgtgcctgaactgcggcttcgagacacacgcagccgagcaagccgccctgaacatcgccagatcctggctgttcctgcggagccaggagtacaagaaataccagacaaacaagacaaccggcaacaccgataagagagccttcgtcgagacctggcagtccttttaccggaagaagcttaaggaggtgtggaaacctgccgtgcggtctggcggatctggcggaggctccgagcaggtgaccttcaaggacgtggccatcgagttcagcaagaccgagtggaagaggctggaccccgcccagagggccctgtacagggaggtgatgctggagaactacaggaacctggtgagcgtgggcaccagcccccccgacgtgaccgtgatcagcatgctggagcagggcgaggagccctggaccgccgagagcagggtgcagaggcccgaggtgcccggcggcagggagtggacccagggcggcccaagcagcggcgcccctcctcccagcggcggcagcccagccggctccccaacctctaccgaggagggcacctctgagtccgccacccccgagagcggccctggcacctccaccgagcccagcgagggcagcgcacccggcagccctgccggcagccccacctccacagaggagggaaccagcaccgagcccagcgaaggcagcgccccaggcaccagcaccgagcctagtgagcaggagattaaacggatcaacaagatcagaagaagacttgtgaaagacagcaacaccaagaaggccggcaagacaggccccatgaaaaccctgctggttagagtgatgacacccgatctgagagagcggctggaaaacctgagaaagaagcctgaaaatatcccccagcccatcagcaatacatctagagccaacctgaataagctgctgaccgattacaccgaaatgaagaaggcgatcctgcatgtgtactgggaagagttccagaaggaccctgtgggcctgatgagccgggtggcccagcctgccagcaagaagatcgatcagaacaagctgaaacctgagatggacgagaagggcaacctgaccaccgccggctttgcctgctctcagtgtggccagcccctgttcgtgtacaagctggagcaggtgtctgagaagggcaaggcttacaccaactacttcggacggtgcaatgtggccgagcacgaaaagctgatcctgctggcccagctgaagcccgagaaggatagcgacgaagccgtgacatatagcctgggaaagtttgggcagagggccctggatttctacagcattcatgtgaccaaggagtccacccaccccgtgaagcccctggcccagatcgccggaaacagatacgcctccggacctgtgggaaaggccctgagcgacgcatgtatgggcacaatcgcctccttcctgtctaagtaccaggacatcatcatcgaacaccagaaggtggtgaagggcaaccagaagagactggagagcctgcgggagctggccggcaaggaaaacctggaataccctagcgtgaccctgccacctcagcctcacaccaaggagggcgttgatgcctacaacgaagtgatcgcccgggtgcgaatgtgggtgaacctgaacctgtggcagaagctgaagctaagcagagatgatgccaagcctctgctgagactgaagggattcccttcctttcctctggtcgagagacaggccaacgaagtggactggtgggacatggtgtgtaacgtgaagaagctgatcaacgagaaaaaggaggatggcaaggtgttttggcagaatctggctggctacaagagacaggaagccctgagaccatacctgagcagcgaggaagatcggaagaagggaaagaaattcgctcggtaccagctgggcgacctgctgctgcacctggaaaagaagcacggcgaggactggggaaaggtgtacgacgaggcctgggagcggattgacaagaaagtggaaggcctgagcaagcacatcaagctggaagaggaacggagaagcgaggacgcccagagcaaggccgccctgaccgactggctgcgggctaaggccagcttcgtgatcgagggcctgaaggaggccgacaaggacgagttctgcagatgcgagctgaagctgcagaagtggtacggggacctgcggggaaagcccttcgccatcgaagccgagaacagcatcctggacatcagcggcttcagcaagcagtacaactgtgccttcatctggcagaaggacggcgtgaagaagctgaacctgtacctgatcatcaactacttcaagggcggcaagctgcggttcaagaagatcaaacctgaagccttcgaagccaacagattctacaccgtgatcaacaaaaagagcggcgagatcgtgcccatggaggtgaacttcaacttcgacgaccccaacctgatcatcctgcctctggcctttggcaagagacagggcagagaattcatctggaacgacctgctgtccctggaaaccggcagcctgaagctggccaacggaagagtgatcgagaagacactgtacaacagaagaacccggcaggatgagcctgccctgttcgtggccctgaccttcgagcggcgggaggtcctggactcctccaatatcaaaccaatgaacctgatcggcgtggcaagaggcgaaaacatccccgccgtgatcgccctgaccgaccccgagggctgcccactgagccggtttaaggatagcctgggaaacccaacccacatcctgagaatcggcgagagctataaggagaagcagcggaccatccaggccaagaaggaggtggagcagcggagagccggcggctacagccggaagtacgccagcaaagccaagaatctggcagacgatatggtgagaaacaccgctagagatctgctgtactacgccgtgacccaggatgccatgctgatcttcgccaacctgagccggggcttcggccggcagggcaagcggaccttcatggccgagagacagtacacacggatggaggactggctgaccgccaagctggcctacgagggcctgagcaagacctacctgtccaagacactggcccagtacacctccaagacatgcagcaactgtgggtttaccatcaccagcgccgactacgacagggtgctggagaagctgaagaagacagcaacaggctggatgaccacaattaacggcaaggagctgaaggtggagggccagattacctactacaacagatacaagagacagaacgtagtcaaggacctgtccgtcgagctggatagactgagcgaagaatctgtgaacaacgacatctcctcctggacaaagggcagaagcggagaagctctgagcctcctgaagaaaagattctcccatagacccgtgcaggagaagttcgtgtgcctgaactgcggcttcgagacacacgcagccgagcaagccgccctgaacatcgccagatcctggctgttcctgcggagccaggagtacaagaaataccagacaaacaagacaaccggcaacaccgataagagagccttcgtcgagacctggcagtccttttaccggaagaagcttaaggaggtgtggaaacctgccgtgcggtctggcggatctggcggaggctcctgagcaggtgaccttcaaggacgtggccatcgagttcagcaagaccgagtggaagaggctggaccccgcccagagggccctgtacagggaggtgatgctggagaactacaggaacctggtgagcgtgggcaccagcccccccgacgtgaccgtgatcagcatgctggagcagggcgaggagccctggaccgccgagagcagggtgcagaggcccgaggtgcccggcggcagggagtggacccagggatctggctccggcagcggccccaagaaaaagagaaaagtctaagctgccttctgcggggcttgccttctggccatgcccttcttctctcccttgcacctgtacctcttggtctttgaataaagcctgagtaggaaggctagcaaaaaaaaaaaaaaaaaaaaaaaaaaaaaaaaaaaaaaaaaaaaaaaaaaaaaaaaaaaaaaaaaaaaaaaaaaaaaaaa

SEQ ID NO: 15589 - RNA, 9485 nt, synthetic construct
  source 1..9485: mol_type = other RNA
aggaaataagagagaaaagaagagtaagaagaaatataagagccaccatggcccctaagaagaagcgtaaagtgagccggatggaacgcctcgtctacgaggtgcggcagaagtgcagaaacatcgaggacatctgcatctcctgcggatctctgaacgtgaccctggagcacccactgttcatcggcggcatgtgccagaactgtaaaaactgttttctggagtgtgcctatcaatacgacgatgacggctaccagagctactgcaccatctgttgcggcggaagagaggtgctgatgtgtggaaataacaactgctgccggtgcttctgcgtggaatgcgtggacctgctggtgggccccggcgccgcccaggccgctattaaggaagatccttggaactgctacatgtgcggccacaagggcacatacggcctgctgagacggagagaggactggcctagcagactgcagatgttcttcgccaataaccacgaccaggagttcgacccccctaaggtgtaccctcccgtccccgccgagaagagaaagcccatccgggtcctgagcctgttcgatggcatcgccaccggtctgctggtgctgaaggacctgggcatccaggtggataggtacattgcctccgaggtgtgcgaggactccatcaccgtgggaatggtgcgtcatcagggcaagatcatgtacgtgggcgacgtgcggagcgtgacacagaagcatatccaggagtggggccctttcgacctggtgatcggcggcagcccttgcaatgacctgagcatcgtgaacccagcccggaagggcctgtacgagggaaccggcagactgttcttcgagttttacagactgctgcacgacgcccggcctaaggaaggcgacgaccggcccttcttttggctgttcgagaatgtggtggccatgggagtcagcgacaagcgggatattagccggttcctggagagcaaccccgtgatgatcgatgccaaggaagtgagcgccgcccaccgggccagatacttctggggcaatctgcctggcatgaacagacccctggccagcaccgtgaacgacaagctggagctgcaggagtgcctggagcacggccggatcgccaagttcagcaaggtgagaaccatcaccacccgaagcaacagcatcaaacaaggcaaggaccagcactttcctgtgttcatgaacgagaaggaggacatcctgtggtgtaccgagatggagagagtgttcgggttcccagtccactacacagatgtcagcaacatgtctagactggccagacagagactgctgggaagaagctggtccgtccctgtgatcagacacctgttcgcccctctgaaggagtacttcgcctgcgtgagcagcggcaacagcaacgccaacagccggggccccagcttctctagcggcctggtgccactgtccctgagagggagccacatgggccccatggagatctacaaaaccgtgagcgcctggaagcggcagcctgtgcgcgtgctgagcctgtttcggaatatcgataaagtcctgaaaagcctgggattcctggagagcggctctggctccggcggtggcaccctgaagtacgtggaggatgtgacaaacgtggtcagacgggatgtggagaagtggggccccttcgatctggtgtacggcagcacccaacccctgggcagctcttgtgaccggtgccctggctggtacatgtttcagttccaccggatcctgcagtacgccctgccgagacaggagtcccagcggccattcttttggattttcatggacaacttgctgctgaccgaggatgaccaggaaactaccactcggttcctgcagaccgaagccgtgaccctgcaggacgtgagaggccgggactaccagaacgccatgcgggtgtggtccaacatccctggactgaaaagcaagcacgcacctctgacccctaaagaagaggagtacctgcaggcccaggtgcggagcagaagcaagctggacgcccctaaggtggatctgctggtgaagaattgcctcctgcccctgagagagtacttcaagtatttcagccagaatagtctgcccctgggaggcagcggcggcggcgccctggtgacatttgaggacgtcgccgtgcggttcacccaggaggaatgggctctgctggatccttctcagaaaatcctgtaccgggacgtgatgagagagacataccggaatctgacctccgtgggcatcaactgggaatgttgggaccttgaagcctgcttcagaagcctgggaagaaacctgagagtgcaggtggtgaagagaaagtgcgagctgaccaacagcggcccctgcgccgagggcggcccaagcagcggcgcccctcctcccagcggcggcagcccagccggctccccaacctctaccgaggagggcacctctgagtccgccacccccgagagcggccctggcacctccaccgagcccagcgagggcagcgcacccggcagccctgccggcagccccacctccacagaggagggaaccagcaccgagcccagcgaaggcagcgccccaggcaccagcaccgagcctagtgagcaggagattaaacggatcaacaagatcagaagaagacttgtgaaagacagcaacaccaagaaggccggcaagacaggccccatgaaaaccctgctggttagagtgatgacacccgatctgagagagcggctggaaaacctgagaaagaagcctgaaaatatcccccagcccatcagcaatacatctagagccaacctgaataagctgctgaccgattacaccgaaatgaagaaggcgatcctgcatgtgtactgggaagagttccagaaggaccctgtgggcctgatgagccgggtggcccagcctgccagcaagaagatcgatcagaacaagctgaaacctgagatggacgagaagggcaacctgaccaccgccggctttgcctgctctcagtgtggccagcccctgttcgtgtacaagctggagcaggtgtctgagaagggcaaggcttacaccaactacttcggacggtgcaatgtggccgagcacgaaaagctgatcctgctggcccagctgaagcccgagaaggatagcgacgaagccgtgacatatagcctgggaaagtttgggcagagggccctggatttctacagcattcatgtgaccaaggagtccacccaccccgtgaagcccctggcccagatcgccggaaacagatacgcctccggacctgtgggaaaggccctgagcgacgcatgtatgggcacaatcgcctccttcctgtctaagtaccaggacatcatcatcgaacaccagaaggtggtgaagggcaaccagaagagactggagagcctgcgggagctggccggcaaggaaaacctggaataccctagcgtgaccctgccacctcagcctcacaccaaggagggcgttgatgcctacaacgaagtgatcgcccgggtgcgaatgtgggtgaacctgaacctgtggcagaagctgaagctaagcagagatgatgccaagcctctgctgagactgaagggattcccttcctttcctctggtcgagagacaggccaacgaagtggactggtgggacatggtgtgtaacgtgaagaagctgatcaacgagaaaaaggaggatggcaaggtgttttggcagaatctggctggctacaagagacaggaagccctgagaccatacctgagcagcgaggaagatcggaagaagggaaagaaattcgctcggtaccagctgggcgacctgctgctgcacctggaaaagaagcacggcgaggactggggaaaggtgtacgacgaggcctgggagcggattgacaagaaagtggaaggcctgagcaagcacatcaagctggaagaggaacggagaagcgaggacgcccagagcaaggccgccctgaccgactggctgcgggctaaggccagcttcgtgatcgagggcctgaaggaggccgacaaggacgagttctgcagatgcgagctgaagctgcagaagtggtacggggacctgcggggaaagcccttcgccatcgaagccgagaacagcatcctggacatcagcggcttcagcaagcagtacaactgtgccttcatctggcagaaggacggcgtgaagaagctgaacctgtacctgatcatcaactacttcaagggcggcaagctgcggttcaagaagatcaaacctgaagccttcgaagccaacagattctacaccgtgatcaacaaaaagagcggcgagatcgtgcccatggaggtgaacttcaacttcgacgaccccaacctgatcatcctgcctctggcctttggcaagagacagggcagagaattcatctggaacgacctgctgtccctggaaaccggcagcctgaagctggccaacggaagagtgatcgagaagacactgtacaacagaagaacccggcaggatgagcctgccctgttcgtggccctgaccttcgagcggcgggaggtcctggactcctccaatatcaaaccaatgaacctgatcggcgtggcaagaggcgaaaacatccccgccgtgatcgccctgaccgaccccgagggctgcccactgagccggtttaaggatagcctgggaaacccaacccacatcctgagaatcggcgagagctataaggagaagcagcggaccatccaggccaagaaggaggtggagcagcggagagccggcggctacagccggaagtacgccagcaaagccaagaatctggcagacgatatggtgagaaacaccgctagagatctgctgtactacgccgtgacccaggatgccatgctgatcttcgccaacctgagccggggcttcggccggcagggcaagcggaccttcatggccgagagacagtacacacggatggaggactggctgaccgccaagctggcctacgagggcctgagcaagacctacctgtccaagacactggcccagtacacctccaagacatgcagcaactgtgggtttaccatcaccagcgccgactacgacagggtgctggagaagctgaagaagacagcaacaggctggatgaccacaattaacggcaaggagctgaaggtggagggccagattacctactacaacagatacaagagacagaacgtagtcaaggacctgtccgtcgagctggatagactgagcgaagaatctgtgaacaacgacatctcctcctggacaaagggcagaagcggagaagctctgagcctcctgaagaaaagattctcccatagacccgtgcaggagaagttcgtgtgcctgaactgcggcttcgagacacacgcagccgagcaagccgccctgaacatcgccagatcctggctgttcctgcggagccaggagtacaagaaataccagacaaacaagacaaccggcaacaccgataagagagccttcgtcgagacctggcagtccttttaccggaagaagcttaaggaggtgtggaaacctgccgtgcggtctggcggatctggcggaggctccgccagggccagcctgagcttcgaggacgtggccgtgggcttcagctgggaggagtggcagctgctggcccccagccagaaggacctgtacagggaggtgatgctggagaactacaggaacctggtgagcgtgggctaccaggccagcaagcccgacagcctgttccacctggagcagggcgagcccccctggaccgtggtgggcgccgcccagagccagacctgccaggagatctgggagatcggcggcccaagcagcggcgcccctcctcccagcggcggcagcccagccggctccccaacctctaccgaggagggcacctctgagtccgccacccccgagagcggccctggcacctccaccgagcccagcgagggcagcgcacccggcagccctgccggcagccccacctccacagaggagggaaccagcaccgagcccagcgaaggcagcgccccaggcaccagcaccgagcctagtgagcaggagattaaacggatcaacaagatcagaagaagacttgtgaaagacagcaacaccaagaaggccggcaagacaggccccatgaaaaccctgctggttagagtgatgacacccgatctgagagagcggctggaaaacctgagaaagaagcctgaaaatatcccccagcccatcagcaatacatctagagccaacctgaataagctgctgaccgattacaccgaaatgaagaaggcgatcctgcatgtgtactgggaagagttccagaaggaccctgtgggcctgatgagccgggtggcccagcctgccagcaagaagatcgatcagaacaagctgaaacctgagatggacgagaagggcaacctgaccaccgccggctttgcctgctctcagtgtggccagcccctgttcgtgtacaagctggagcaggtgtctgagaagggcaaggcttacaccaactacttcggacggtgcaatgtggccgagcacgaaaagctgatcctgctggcccagctgaagcccgagaaggatagcgacgaagccgtgacatatagcctgggaaagtttgggcagagggccctggatttctacagcattcatgtgaccaaggagtccacccaccccgtgaagcccctggcccagatcgccggaaacagatacgcctccggacctgtgggaaaggccctgagcgacgcatgtatgggcacaatcgcctccttcctgtctaagtaccaggacatcatcatcgaacaccagaaggtggtgaagggcaaccagaagagactggagagcctgcgggagctggccggcaaggaaaacctggaataccctagcgtgaccctgccacctcagcctcacaccaaggagggcgttgatgcctacaacgaagtgatcgcccgggtgcgaatgtgggtgaacctgaacctgtggcagaagctgaagctaagcagagatgatgccaagcctctgctgagactgaagggattcccttcctttcctctggtcgagagacaggccaacgaagtggactggtgggacatggtgtgtaacgtgaagaagctgatcaacgagaaaaaggaggatggcaaggtgttttggcagaatctggctggctacaagagacaggaagccctgagaccatacctgagcagcgaggaagatcggaagaagggaaagaaattcgctcggtaccagctgggcgacctgctgctgcacctggaaaagaagcacggcgaggactggggaaaggtgtacgacgaggcctgggagcggattgacaagaaagtggaaggcctgagcaagcacatcaagctggaagaggaacggagaagcgaggacgcccagagcaaggccgccctgaccgactggctgcgggctaaggccagcttcgtgatcgagggcctgaaggaggccgacaaggacgagttctgcagatgcgagctgaagctgcagaagtggtacggggacctgcggggaaagcccttcgccatcgaagccgagaacagcatcctggacatcagcggcttcagcaagcagtacaactgtgccttcatctggcagaaggacggcgtgaagaagctgaacctgtacctgatcatcaactacttcaagggcggcaagctgcggttcaagaagatcaaacctgaagccttcgaagccaacagattctacaccgtgatcaacaaaaagagcggcgagatcgtgcccatggaggtgaacttcaacttcgacgaccccaacctgatcatcctgcctctggcctttggcaagagacagggcagagaattcatctggaacgacctgctgtccctggaaaccggcagcctgaagctggccaacggaagagtgatcgagaagacactgtacaacagaagaacccggcaggatgagcctgccctgttcgtggccctgaccttcgagcggcgggaggtcctggactcctccaatatcaaaccaatgaacctgatcggcgtggcaagaggcgaaaacatccccgccgtgatcgccctgaccgaccccgagggctgcccactgagccggtttaaggatagcctgggaaacccaacccacatcctgagaatcggcgagagctataaggagaagcagcggaccatccaggccaagaaggaggtggagcagcggagagccggcggctacagccggaagtacgccagcaaagccaagaatctggcagacgatatggtgagaaacaccgctagagatctgctgtactacgccgtgacccaggatgccatgctgatcttcgccaacctgagccggggcttcggccggcagggcaagcggaccttcatggccgagagacagtacacacggatggaggactggctgaccgccaagctggcctacgagggcctgagcaagacctacctgtccaagacactggcccagtacacctccaagacatgcagcaactgtgggtttaccatcaccagcgccgactacgacagggtgctggagaagctgaagaagacagcaacaggctggatgaccacaattaacggcaaggagctgaaggtggagggccagattacctactacaacagatacaagagacagaacgtagtcaaggacctgtccgtcgagctggatagactgagcgaagaatctgtgaacaacgacatctcctcctggacaaagggcagaagcggagaagctctgagcctcctgaagaaaagattctcccatagacccgtgcaggagaagttcgtgtgcctgaactgcggcttcgagacacacgcagccgagcaagccgccctgaacatcgccagatcctggctgttcctgcggagccaggagtacaagaaataccagacaaacaagacaaccggcaacaccgataagagagccttcgtcgagacctggcagtccttttaccggaagaagcttaaggaggtgtggaaacctgccgtgcggtctggcggatctggcggaggctcctgccagggccagcctgagcttcgaggacgtggccgtgggcttcagctgggaggagtggcagctgctggcccccagccagaaggacctgtacagggaggtgatgctggagaactacaggaacctggtgagcgtgggctaccaggccagcaagcccgacagcctgttccacctggagcagggcgagcccccctggaccgtggtgggcgccgcccagagccagacctgccaggagatctgggagatcggatctggctccggcagcggccccaagaaaaagagaaaagtctaagctgccttctgcggggcttgccttctggccatgcccttcttctctcccttgcacctgtacctcttggtctttgaataaagcctgagtaggaaggctagcaaaaaaaaaaaaaaaaaaaaaaaaaaaaaaaaaaaaaaaaaaaaaaaaaaaaaaaaaaaaaaaaaaaaaaaaaaaaaaaa

SEQ ID NO: 15590 - RNA, 9485 nt, synthetic construct
  source 1..9485: mol_type = other RNA
aggaaataagagagaaaagaagagtaagaagaaatataagagccaccatggcccctaagaagaagcgtaaagtgagccggatggaacgcctcgtctacgaggtgcggcagaagtgcagaaacatcgaggacatctgcatctcctgcggatctctgaacgtgaccctggagcacccactgttcatcggcggcatgtgccagaactgtaaaaactgttttctggagtgtgcctatcaatacgacgatgacggctaccagagctactgcaccatctgttgcggcggaagagaggtgctgatgtgtggaaataacaactgctgccggtgcttctgcgtggaatgcgtggacctgctggtgggccccggcgccgcccaggccgctattaaggaagatccttggaactgctacatgtgcggccacaagggcacatacggcctgctgagacggagagaggactggcctagcagactgcagatgttcttcgccaataaccacgaccaggagttcgacccccctaaggtgtaccctcccgtccccgccgagaagagaaagcccatccgggtcctgagcctgttcgatggcatcgccaccggtctgctggtgctgaaggacctgggcatccaggtggataggtacattgcctccgaggtgtgcgaggactccatcaccgtgggaatggtgcgtcatcagggcaagatcatgtacgtgggcgacgtgcggagcgtgacacagaagcatatccaggagtggggccctttcgacctggtgatcggcggcagcccttgcaatgacctgagcatcgtgaacccagcccggaagggcctgtacgagggaaccggcagactgttcttcgagttttacagactgctgcacgacgcccggcctaaggaaggcgacgaccggcccttcttttggctgttcgagaatgtggtggccatgggagtcagcgacaagcgggatattagccggttcctggagagcaaccccgtgatgatcgatgccaaggaagtgagcgccgcccaccgggccagatacttctggggcaatctgcctggcatgaacagacccctggccagcaccgtgaacgacaagctggagctgcaggagtgcctggagcacggccggatcgccaagttcagcaaggtgagaaccatcaccacccgaagcaacagcatcaaacaaggcaaggaccagcactttcctgtgttcatgaacgagaaggaggacatcctgtggtgtaccgagatggagagagtgttcgggttcccagtccactacacagatgtcagcaacatgtctagactggccagacagagactgctgggaagaagctggtccgtccctgtgatcagacacctgttcgcccctctgaaggagtacttcgcctgcgtgagcagcggcaacagcaacgccaacagccggggccccagcttctctagcggcctggtgccactgtccctgagagggagccacatgggccccatggagatctacaaaaccgtgagcgcctggaagcggcagcctgtgcgcgtgctgagcctgtttcggaatatcgataaagtcctgaaaagcctgggattcctggagagcggctctggctccggcggtggcaccctgaagtacgtggaggatgtgacaaacgtggtcagacgggatgtggagaagtggggccccttcgatctggtgtacggcagcacccaacccctgggcagctcttgtgaccggtgccctggctggtacatgtttcagttccaccggatcctgcagtacgccctgccgagacaggagtcccagcggccattcttttggattttcatggacaacttgctgctgaccgaggatgaccaggaaactaccactcggttcctgcagaccgaagccgtgaccctgcaggacgtgagaggccgggactaccagaacgccatgcgggtgtggtccaacatccctggactgaaaagcaagcacgcacctctgacccctaaagaagaggagtacctgcaggcccaggtgcggagcagaagcaagctggacgcccctaaggtggatctgctggtgaagaattgcctcctgcccctgagagagtacttcaagtatttcagccagaatagtctgcccctgggaggcagcggcggcggcgccctggtgacatttgaggacgtcgccgtgcggttcacccaggaggaatgggctctgctggatccttctcagaaaatcctgtaccgggacgtgatgagagagacataccggaatctgacctccgtgggcatcaactgggaatgttgggaccttgaagcctgcttcagaagcctgggaagaaacctgagagtgcaggtggtgaagagaaagtgcgagctgaccaacagcggcccctgcgccgagggcggcccaagcagcggcgcccctcctcccagcggcggcagcccagccggctccccaacctctaccgaggagggcacctctgagtccgccacccccgagagcggccctggcacctccaccgagcccagcgagggcagcgcacccggcagccctgccggcagccccacctccacagaggagggaaccagcaccgagcccagcgaaggcagcgccccaggcaccagcaccgagcctagtgagcaggagattaaacggatcaacaagatcagaagaagacttgtgaaagacagcaacaccaagaaggccggcaagacaggccccatgaaaaccctgctggttagagtgatgacacccgatctgagagagcggctggaaaacctgagaaagaagcctgaaaatatcccccagcccatcagcaatacatctagagccaacctgaataagctgctgaccgattacaccgaaatgaagaaggcgatcctgcatgtgtactgggaagagttccagaaggaccctgtgggcctgatgagccgggtggcccagcctgccagcaagaagatcgatcagaacaagctgaaacctgagatggacgagaagggcaacctgaccaccgccggctttgcctgctctcagtgtggccagcccctgttcgtgtacaagctggagcaggtgtctgagaagggcaaggcttacaccaactacttcggacggtgcaatgtggccgagcacgaaaagctgatcctgctggcccagctgaagcccgagaaggatagcgacgaagccgtgacatatagcctgggaaagtttgggcagagggccctggatttctacagcattcatgtgaccaaggagtccacccaccccgtgaagcccctggcccagatcgccggaaacagatacgcctccggacctgtgggaaaggccctgagcgacgcatgtatgggcacaatcgcctccttcctgtctaagtaccaggacatcatcatcgaacaccagaaggtggtgaagggcaaccagaagagactggagagcctgcgggagctggccggcaaggaaaacctggaataccctagcgtgaccctgccacctcagcctcacaccaaggagggcgttgatgcctacaacgaagtgatcgcccgggtgcgaatgtgggtgaacctgaacctgtggcagaagctgaagctaagcagagatgatgccaagcctctgctgagactgaagggattcccttcctttcctctggtcgagagacaggccaacgaagtggactggtgggacatggtgtgtaacgtgaagaagctgatcaacgagaaaaaggaggatggcaaggtgttttggcagaatctggctggctacaagagacaggaagccctgagaccatacctgagcagcgaggaagatcggaagaagggaaagaaattcgctcggtaccagctgggcgacctgctgctgcacctggaaaagaagcacggcgaggactggggaaaggtgtacgacgaggcctgggagcggattgacaagaaagtggaaggcctgagcaagcacatcaagctggaagaggaacggagaagcgaggacgcccagagcaaggccgccctgaccgactggctgcgggctaaggccagcttcgtgatcgagggcctgaaggaggccgacaaggacgagttctgcagatgcgagctgaagctgcagaagtggtacggggacctgcggggaaagcccttcgccatcgaagccgagaacagcatcctggacatcagcggcttcagcaagcagtacaactgtgccttcatctggcagaaggacggcgtgaagaagctgaacctgtacctgatcatcaactacttcaagggcggcaagctgcggttcaagaagatcaaacctgaagccttcgaagccaacagattctacaccgtgatcaacaaaaagagcggcgagatcgtgcccatggaggtgaacttcaacttcgacgaccccaacctgatcatcctgcctctggcctttggcaagagacagggcagagaattcatctggaacgacctgctgtccctggaaaccggcagcctgaagctggccaacggaagagtgatcgagaagacactgtacaacagaagaacccggcaggatgagcctgccctgttcgtggccctgaccttcgagcggcgggaggtcctggactcctccaatatcaaaccaatgaacctgatcggcgtggcaagaggcgaaaacatccccgccgtgatcgccctgaccgaccccgagggctgcccactgagccggtttaaggatagcctgggaaacccaacccacatcctgagaatcggcgagagctataaggagaagcagcggaccatccaggccaagaaggaggtggagcagcggagagccggcggctacagccggaagtacgccagcaaagccaagaatctggcagacgatatggtgagaaacaccgctagagatctgctgtactacgccgtgacccaggatgccatgctgatcttcgccaacctgagccggggcttcggccggcagggcaagcggaccttcatggccgagagacagtacacacggatggaggactggctgaccgccaagctggcctacgagggcctgagcaagacctacctgtccaagacactggcccagtacacctccaagacatgcagcaactgtgggtttaccatcaccagcgccgactacgacagggtgctggagaagctgaagaagacagcaacaggctggatgaccacaattaacggcaaggagctgaaggtggagggccagattacctactacaacagatacaagagacagaacgtagtcaaggacctgtccgtcgagctggatagactgagcgaagaatctgtgaacaacgacatctcctcctggacaaagggcagaagcggagaagctctgagcctcctgaagaaaagattctcccatagacccgtgcaggagaagttcgtgtgcctgaactgcggcttcgagacacacgcagccgagcaagccgccctgaacatcgccagatcctggctgttcctgcggagccaggagtacaagaaataccagacaaacaagacaaccggcaacaccgataagagagccttcgtcgagacctggcagtccttttaccggaagaagcttaaggaggtgtggaaacctgccgtgcggtctggcggatctggcggaggctccatggccttcgaggacgtggccgtgtacttcagccaggaggagtggatgttcctggacgccgcccagagggccctgtacaggcacgtgatgctggagaacttcgccctggtggacagcatcggcctgagcgtgagcaggcccagggtgatcatccagctgcagaggggcgaggagccctgggtgcccaacaggaccaaccccggccccggcaggagcacctgcaggaggcccagcctgggcagcggcggcccaagcagcggcgcccctcctcccagcggcggcagcccagccggctccccaacctctaccgaggagggcacctctgagtccgccacccccgagagcggccctggcacctccaccgagcccagcgagggcagcgcacccggcagccctgccggcagccccacctccacagaggagggaaccagcaccgagcccagcgaaggcagcgccccaggcaccagcaccgagcctagtgagcaggagattaaacggatcaacaagatcagaagaagacttgtgaaagacagcaacaccaagaaggccggcaagacaggccccatgaaaaccctgctggttagagtgatgacacccgatctgagagagcggctggaaaacctgagaaagaagcctgaaaatatcccccagcccatcagcaatacatctagagccaacctgaataagctgctgaccgattacaccgaaatgaagaaggcgatcctgcatgtgtactgggaagagttccagaaggaccctgtgggcctgatgagccgggtggcccagcctgccagcaagaagatcgatcagaacaagctgaaacctgagatggacgagaagggcaacctgaccaccgccggctttgcctgctctcagtgtggccagcccctgttcgtgtacaagctggagcaggtgtctgagaagggcaaggcttacaccaactacttcggacggtgcaatgtggccgagcacgaaaagctgatcctgctggcccagctgaagcccgagaaggatagcgacgaagccgtgacatatagcctgggaaagtttgggcagagggccctggatttctacagcattcatgtgaccaaggagtccacccaccccgtgaagcccctggcccagatcgccggaaacagatacgcctccggacctgtgggaaaggccctgagcgacgcatgtatgggcacaatcgcctccttcctgtctaagtaccaggacatcatcatcgaacaccagaaggtggtgaagggcaaccagaagagactggagagcctgcgggagctggccggcaaggaaaacctggaataccctagcgtgaccctgccacctcagcctcacaccaaggagggcgttgatgcctacaacgaagtgatcgcccgggtgcgaatgtgggtgaacctgaacctgtggcagaagctgaagctaagcagagatgatgccaagcctctgctgagactgaagggattcccttcctttcctctggtcgagagacaggccaacgaagtggactggtgggacatggtgtgtaacgtgaagaagctgatcaacgagaaaaaggaggatggcaaggtgttttggcagaatctggctggctacaagagacaggaagccctgagaccatacctgagcagcgaggaagatcggaagaagggaaagaaattcgctcggtaccagctgggcgacctgctgctgcacctggaaaagaagcacggcgaggactggggaaaggtgtacgacgaggcctgggagcggattgacaagaaagtggaaggcctgagcaagcacatcaagctggaagaggaacggagaagcgaggacgcccagagcaaggccgccctgaccgactggctgcgggctaaggccagcttcgtgatcgagggcctgaaggaggccgacaaggacgagttctgcagatgcgagctgaagctgcagaagtggtacggggacctgcggggaaagcccttcgccatcgaagccgagaacagcatcctggacatcagcggcttcagcaagcagtacaactgtgccttcatctggcagaaggacggcgtgaagaagctgaacctgtacctgatcatcaactacttcaagggcggcaagctgcggttcaagaagatcaaacctgaagccttcgaagccaacagattctacaccgtgatcaacaaaaagagcggcgagatcgtgcccatggaggtgaacttcaacttcgacgaccccaacctgatcatcctgcctctggcctttggcaagagacagggcagagaattcatctggaacgacctgctgtccctggaaaccggcagcctgaagctggccaacggaagagtgatcgagaagacactgtacaacagaagaacccggcaggatgagcctgccctgttcgtggccctgaccttcgagcggcgggaggtcctggactcctccaatatcaaaccaatgaacctgatcggcgtggcaagaggcgaaaacatccccgccgtgatcgccctgaccgaccccgagggctgcccactgagccggtttaaggatagcctgggaaacccaacccacatcctgagaatcggcgagagctataaggagaagcagcggaccatccaggccaagaaggaggtggagcagcggagagccggcggctacagccggaagtacgccagcaaagccaagaatctggcagacgatatggtgagaaacaccgctagagatctgctgtactacgccgtgacccaggatgccatgctgatcttcgccaacctgagccggggcttcggccggcagggcaagcggaccttcatggccgagagacagtacacacggatggaggactggctgaccgccaagctggcctacgagggcctgagcaagacctacctgtccaagacactggcccagtacacctccaagacatgcagcaactgtgggtttaccatcaccagcgccgactacgacagggtgctggagaagctgaagaagacagcaacaggctggatgaccacaattaacggcaaggagctgaaggtggagggccagattacctactacaacagatacaagagacagaacgtagtcaaggacctgtccgtcgagctggatagactgagcgaagaatctgtgaacaacgacatctcctcctggacaaagggcagaagcggagaagctctgagcctcctgaagaaaagattctcccatagacccgtgcaggagaagttcgtgtgcctgaactgcggcttcgagacacacgcagccgagcaagccgccctgaacatcgccagatcctggctgttcctgcggagccaggagtacaagaaataccagacaaacaagacaaccggcaacaccgataagagagccttcgtcgagacctggcagtccttttaccggaagaagcttaaggaggtgtggaaacctgccgtgcggtctggcggatctggcggaggctcctatggccttcgaggacgtggccgtgtacttcagccaggaggagtggatgttcctggacgccgcccagagggccctgtacaggcacgtgatgctggagaacttcgccctggtggacagcatcggcctgagcgtgagcaggcccagggtgatcatccagctgcagaggggcgaggagccctgggtgcccaacaggaccaaccccggccccggcaggagcacctgcaggaggcccagcctgggcagcggatctggctccggcagcggccccaagaaaaagagaaaagtctaagctgccttctgcggggcttgccttctggccatgcccttcttctctcccttgcacctgtacctcttggtctttgaataaagcctgagtaggaaggctagcaaaaaaaaaaaaaaaaaaaaaaaaaaaaaaaaaaaaaaaaaaaaaaaaaaaaaaaaaaaaaaaaaaaaaaaaaaaaaaaa

SEQ ID NO: 15591 - RNA, 9485 nt, synthetic construct
  source 1..9485: mol_type = other RNA
aggaaataagagagaaaagaagagtaagaagaaatataagagccaccatggcccctaagaagaagcgtaaagtgagccggatggaacgcctcgtctacgaggtgcggcagaagtgcagaaacatcgaggacatctgcatctcctgcggatctctgaacgtgaccctggagcacccactgttcatcggcggcatgtgccagaactgtaaaaactgttttctggagtgtgcctatcaatacgacgatgacggctaccagagctactgcaccatctgttgcggcggaagagaggtgctgatgtgtggaaataacaactgctgccggtgcttctgcgtggaatgcgtggacctgctggtgggccccggcgccgcccaggccgctattaaggaagatccttggaactgctacatgtgcggccacaagggcacatacggcctgctgagacggagagaggactggcctagcagactgcagatgttcttcgccaataaccacgaccaggagttcgacccccctaaggtgtaccctcccgtccccgccgagaagagaaagcccatccgggtcctgagcctgttcgatggcatcgccaccggtctgctggtgctgaaggacctgggcatccaggtggataggtacattgcctccgaggtgtgcgaggactccatcaccgtgggaatggtgcgtcatcagggcaagatcatgtacgtgggcgacgtgcggagcgtgacacagaagcatatccaggagtggggccctttcgacctggtgatcggcggcagcccttgcaatgacctgagcatcgtgaacccagcccggaagggcctgtacgagggaaccggcagactgttcttcgagttttacagactgctgcacgacgcccggcctaaggaaggcgacgaccggcccttcttttggctgttcgagaatgtggtggccatgggagtcagcgacaagcgggatattagccggttcctggagagcaaccccgtgatgatcgatgccaaggaagtgagcgccgcccaccgggccagatacttctggggcaatctgcctggcatgaacagacccctggccagcaccgtgaacgacaagctggagctgcaggagtgcctggagcacggccggatcgccaagttcagcaaggtgagaaccatcaccacccgaagcaacagcatcaaacaaggcaaggaccagcactttcctgtgttcatgaacgagaaggaggacatcctgtggtgtaccgagatggagagagtgttcgggttcccagtccactacacagatgtcagcaacatgtctagactggccagacagagactgctgggaagaagctggtccgtccctgtgatcagacacctgttcgcccctctgaaggagtacttcgcctgcgtgagcagcggcaacagcaacgccaacagccggggccccagcttctctagcggcctggtgccactgtccctgagagggagccacatgggccccatggagatctacaaaaccgtgagcgcctggaagcggcagcctgtgcgcgtgctgagcctgtttcggaatatcgataaagtcctgaaaagcctgggattcctggagagcggctctggctccggcggtggcaccctgaagtacgtggaggatgtgacaaacgtggtcagacgggatgtggagaagtggggccccttcgatctggtgtacggcagcacccaacccctgggcagctcttgtgaccggtgccctggctggtacatgtttcagttccaccggatcctgcagtacgccctgccgagacaggagtcccagcggccattcttttggattttcatggacaacttgctgctgaccgaggatgaccaggaaactaccactcggttcctgcagaccgaagccgtgaccctgcaggacgtgagaggccgggactaccagaacgccatgcgggtgtggtccaacatccctggactgaaaagcaagcacgcacctctgacccctaaagaagaggagtacctgcaggcccaggtgcggagcagaagcaagctggacgcccctaaggtggatctgctggtgaagaattgcctcctgcccctgagagagtacttcaagtatttcagccagaatagtctgcccctgggaggcagcggcggcggcgccctggtgacatttgaggacgtcgccgtgcggttcacccaggaggaatgggctctgctggatccttctcagaaaatcctgtaccgggacgtgatgagagagacataccggaatctgacctccgtgggcatcaactgggaatgttgggaccttgaagcctgcttcagaagcctgggaagaaacctgagagtgcaggtggtgaagagaaagtgcgagctgaccaacagcggcccctgcgccgagggcggcccaagcagcggcgcccctcctcccagcggcggcagcccagccggctccccaacctctaccgaggagggcacctctgagtccgccacccccgagagcggccctggcacctccaccgagcccagcgagggcagcgcacccggcagccctgccggcagccccacctccacagaggagggaaccagcaccgagcccagcgaaggcagcgccccaggcaccagcaccgagcctagtgagcaggagattaaacggatcaacaagatcagaagaagacttgtgaaagacagcaacaccaagaaggccggcaagacaggccccatgaaaaccctgctggttagagtgatgacacccgatctgagagagcggctggaaaacctgagaaagaagcctgaaaatatcccccagcccatcagcaatacatctagagccaacctgaataagctgctgaccgattacaccgaaatgaagaaggcgatcctgcatgtgtactgggaagagttccagaaggaccctgtgggcctgatgagccgggtggcccagcctgccagcaagaagatcgatcagaacaagctgaaacctgagatggacgagaagggcaacctgaccaccgccggctttgcctgctctcagtgtggccagcccctgttcgtgtacaagctggagcaggtgtctgagaagggcaaggcttacaccaactacttcggacggtgcaatgtggccgagcacgaaaagctgatcctgctggcccagctgaagcccgagaaggatagcgacgaagccgtgacatatagcctgggaaagtttgggcagagggccctggatttctacagcattcatgtgaccaaggagtccacccaccccgtgaagcccctggcccagatcgccggaaacagatacgcctccggacctgtgggaaaggccctgagcgacgcatgtatgggcacaatcgcctccttcctgtctaagtaccaggacatcatcatcgaacaccagaaggtggtgaagggcaaccagaagagactggagagcctgcgggagctggccggcaaggaaaacctggaataccctagcgtgaccctgccacctcagcctcacaccaaggagggcgttgatgcctacaacgaagtgatcgcccgggtgcgaatgtgggtgaacctgaacctgtggcagaagctgaagctaagcagagatgatgccaagcctctgctgagactgaagggattcccttcctttcctctggtcgagagacaggccaacgaagtggactggtgggacatggtgtgtaacgtgaagaagctgatcaacgagaaaaaggaggatggcaaggtgttttggcagaatctggctggctacaagagacaggaagccctgagaccatacctgagcagcgaggaagatcggaagaagggaaagaaattcgctcggtaccagctgggcgacctgctgctgcacctggaaaagaagcacggcgaggactggggaaaggtgtacgacgaggcctgggagcggattgacaagaaagtggaaggcctgagcaagcacatcaagctggaagaggaacggagaagcgaggacgcccagagcaaggccgccctgaccgactggctgcgggctaaggccagcttcgtgatcgagggcctgaaggaggccgacaaggacgagttctgcagatgcgagctgaagctgcagaagtggtacggggacctgcggggaaagcccttcgccatcgaagccgagaacagcatcctggacatcagcggcttcagcaagcagtacaactgtgccttcatctggcagaaggacggcgtgaagaagctgaacctgtacctgatcatcaactacttcaagggcggcaagctgcggttcaagaagatcaaacctgaagccttcgaagccaacagattctacaccgtgatcaacaaaaagagcggcgagatcgtgcccatggaggtgaacttcaacttcgacgaccccaacctgatcatcctgcctctggcctttggcaagagacagggcagagaattcatctggaacgacctgctgtccctggaaaccggcagcctgaagctggccaacggaagagtgatcgagaagacactgtacaacagaagaacccggcaggatgagcctgccctgttcgtggccctgaccttcgagcggcgggaggtcctggactcctccaatatcaaaccaatgaacctgatcggcgtggcaagaggcgaaaacatccccgccgtgatcgccctgaccgaccccgagggctgcccactgagccggtttaaggatagcctgggaaacccaacccacatcctgagaatcggcgagagctataaggagaagcagcggaccatccaggccaagaaggaggtggagcagcggagagccggcggctacagccggaagtacgccagcaaagccaagaatctggcagacgatatggtgagaaacaccgctagagatctgctgtactacgccgtgacccaggatgccatgctgatcttcgccaacctgagccggggcttcggccggcagggcaagcggaccttcatggccgagagacagtacacacggatggaggactggctgaccgccaagctggcctacgagggcctgagcaagacctacctgtccaagacactggcccagtacacctccaagacatgcagcaactgtgggtttaccatcaccagcgccgactacgacagggtgctggagaagctgaagaagacagcaacaggctggatgaccacaattaacggcaaggagctgaaggtggagggccagattacctactacaacagatacaagagacagaacgtagtcaaggacctgtccgtcgagctggatagactgagcgaagaatctgtgaacaacgacatctcctcctggacaaagggcagaagcggagaagctctgagcctcctgaagaaaagattctcccatagacccgtgcaggagaagttcgtgtgcctgaactgcggcttcgagacacacgcagccgagcaagccgccctgaacatcgccagatcctggctgttcctgcggagccaggagtacaagaaataccagacaaacaagacaaccggcaacaccgataagagagccttcgtcgagacctggcagtccttttaccggaagaagcttaaggaggtgtggaaacctgccgtgcggtctggcggatctggcggaggctccatgagccagggcagcgtgaccttcagggacgtggccatcgacttcagccaggaggagtggaagtggctgcagcccgcccagagggacctgtacaggtgcgtgatgctggagaactacggccacctggtgagcctgggcctgagcatcagcaagcccgacgtggtgagcctgctggagcagggcaaggagccctggctgggcaagagggaggtgaagagggacctgttcagcggctggagcgccggcggcccaagcagcggcgcccctcctcccagcggcggcagcccagccggctccccaacctctaccgaggagggcacctctgagtccgccacccccgagagcggccctggcacctccaccgagcccagcgagggcagcgcacccggcagccctgccggcagccccacctccacagaggagggaaccagcaccgagcccagcgaaggcagcgccccaggcaccagcaccgagcctagtgagcaggagattaaacggatcaacaagatcagaagaagacttgtgaaagacagcaacaccaagaaggccggcaagacaggccccatgaaaaccctgctggttagagtgatgacacccgatctgagagagcggctggaaaacctgagaaagaagcctgaaaatatcccccagcccatcagcaatacatctagagccaacctgaataagctgctgaccgattacaccgaaatgaagaaggcgatcctgcatgtgtactgggaagagttccagaaggaccctgtgggcctgatgagccgggtggcccagcctgccagcaagaagatcgatcagaacaagctgaaacctgagatggacgagaagggcaacctgaccaccgccggctttgcctgctctcagtgtggccagcccctgttcgtgtacaagctggagcaggtgtctgagaagggcaaggcttacaccaactacttcggacggtgcaatgtggccgagcacgaaaagctgatcctgctggcccagctgaagcccgagaaggatagcgacgaagccgtgacatatagcctgggaaagtttgggcagagggccctggatttctacagcattcatgtgaccaaggagtccacccaccccgtgaagcccctggcccagatcgccggaaacagatacgcctccggacctgtgggaaaggccctgagcgacgcatgtatgggcacaatcgcctccttcctgtctaagtaccaggacatcatcatcgaacaccagaaggtggtgaagggcaaccagaagagactggagagcctgcgggagctggccggcaaggaaaacctggaataccctagcgtgaccctgccacctcagcctcacaccaaggagggcgttgatgcctacaacgaagtgatcgcccgggtgcgaatgtgggtgaacctgaacctgtggcagaagctgaagctaagcagagatgatgccaagcctctgctgagactgaagggattcccttcctttcctctggtcgagagacaggccaacgaagtggactggtgggacatggtgtgtaacgtgaagaagctgatcaacgagaaaaaggaggatggcaaggtgttttggcagaatctggctggctacaagagacaggaagccctgagaccatacctgagcagcgaggaagatcggaagaagggaaagaaattcgctcggtaccagctgggcgacctgctgctgcacctggaaaagaagcacggcgaggactggggaaaggtgtacgacgaggcctgggagcggattgacaagaaagtggaaggcctgagcaagcacatcaagctggaagaggaacggagaagcgaggacgcccagagcaaggccgccctgaccgactggctgcgggctaaggccagcttcgtgatcgagggcctgaaggaggccgacaaggacgagttctgcagatgcgagctgaagctgcagaagtggtacggggacctgcggggaaagcccttcgccatcgaagccgagaacagcatcctggacatcagcggcttcagcaagcagtacaactgtgccttcatctggcagaaggacggcgtgaagaagctgaacctgtacctgatcatcaactacttcaagggcggcaagctgcggttcaagaagatcaaacctgaagccttcgaagccaacagattctacaccgtgatcaacaaaaagagcggcgagatcgtgcccatggaggtgaacttcaacttcgacgaccccaacctgatcatcctgcctctggcctttggcaagagacagggcagagaattcatctggaacgacctgctgtccctggaaaccggcagcctgaagctggccaacggaagagtgatcgagaagacactgtacaacagaagaacccggcaggatgagcctgccctgttcgtggccctgaccttcgagcggcgggaggtcctggactcctccaatatcaaaccaatgaacctgatcggcgtggcaagaggcgaaaacatccccgccgtgatcgccctgaccgaccccgagggctgcccactgagccggtttaaggatagcctgggaaacccaacccacatcctgagaatcggcgagagctataaggagaagcagcggaccatccaggccaagaaggaggtggagcagcggagagccggcggctacagccggaagtacgccagcaaagccaagaatctggcagacgatatggtgagaaacaccgctagagatctgctgtactacgccgtgacccaggatgccatgctgatcttcgccaacctgagccggggcttcggccggcagggcaagcggaccttcatggccgagagacagtacacacggatggaggactggctgaccgccaagctggcctacgagggcctgagcaagacctacctgtccaagacactggcccagtacacctccaagacatgcagcaactgtgggtttaccatcaccagcgccgactacgacagggtgctggagaagctgaagaagacagcaacaggctggatgaccacaattaacggcaaggagctgaaggtggagggccagattacctactacaacagatacaagagacagaacgtagtcaaggacctgtccgtcgagctggatagactgagcgaagaatctgtgaacaacgacatctcctcctggacaaagggcagaagcggagaagctctgagcctcctgaagaaaagattctcccatagacccgtgcaggagaagttcgtgtgcctgaactgcggcttcgagacacacgcagccgagcaagccgccctgaacatcgccagatcctggctgttcctgcggagccaggagtacaagaaataccagacaaacaagacaaccggcaacaccgataagagagccttcgtcgagacctggcagtccttttaccggaagaagcttaaggaggtgtggaaacctgccgtgcggtctggcggatctggcggaggctcctatgagccagggcagcgtgaccttcagggacgtggccatcgacttcagccaggaggagtggaagtggctgcagcccgcccagagggacctgtacaggtgcgtgatgctggagaactacggccacctggtgagcctgggcctgagcatcagcaagcccgacgtggtgagcctgctggagcagggcaaggagccctggctgggcaagagggaggtgaagagggacctgttcagcggctggagcgccggatctggctccggcagcggccccaagaaaaagagaaaagtctaagctgccttctgcggggcttgccttctggccatgcccttcttctctcccttgcacctgtacctcttggtctttgaataaagcctgagtaggaaggctagcaaaaaaaaaaaaaaaaaaaaaaaaaaaaaaaaaaaaaaaaaaaaaaaaaaaaaaaaaaaaaaaaaaaaaaaaaaaaaaaa

SEQ ID NO: 15592 - RNA, 9485 nt, synthetic construct
  source 1..9485: mol_type = other RNA
aggaaataagagagaaaagaagagtaagaagaaatataagagccaccatggcccctaagaagaagcgtaaagtgagccggatggaacgcctcgtctacgaggtgcggcagaagtgcagaaacatcgaggacatctgcatctcctgcggatctctgaacgtgaccctggagcacccactgttcatcggcggcatgtgccagaactgtaaaaactgttttctggagtgtgcctatcaatacgacgatgacggctaccagagctactgcaccatctgttgcggcggaagagaggtgctgatgtgtggaaataacaactgctgccggtgcttctgcgtggaatgcgtggacctgctggtgggccccggcgccgcccaggccgctattaaggaagatccttggaactgctacatgtgcggccacaagggcacatacggcctgctgagacggagagaggactggcctagcagactgcagatgttcttcgccaataaccacgaccaggagttcgacccccctaaggtgtaccctcccgtccccgccgagaagagaaagcccatccgggtcctgagcctgttcgatggcatcgccaccggtctgctggtgctgaaggacctgggcatccaggtggataggtacattgcctccgaggtgtgcgaggactccatcaccgtgggaatggtgcgtcatcagggcaagatcatgtacgtgggcgacgtgcggagcgtgacacagaagcatatccaggagtggggccctttcgacctggtgatcggcggcagcccttgcaatgacctgagcatcgtgaacccagcccggaagggcctgtacgagggaaccggcagactgttcttcgagttttacagactgctgcacgacgcccggcctaaggaaggcgacgaccggcccttcttttggctgttcgagaatgtggtggccatgggagtcagcgacaagcgggatattagccggttcctggagagcaaccccgtgatgatcgatgccaaggaagtgagcgccgcccaccgggccagatacttctggggcaatctgcctggcatgaacagacccctggccagcaccgtgaacgacaagctggagctgcaggagtgcctggagcacggccggatcgccaagttcagcaaggtgagaaccatcaccacccgaagcaacagcatcaaacaaggcaaggaccagcactttcctgtgttcatgaacgagaaggaggacatcctgtggtgtaccgagatggagagagtgttcgggttcccagtccactacacagatgtcagcaacatgtctagactggccagacagagactgctgggaagaagctggtccgtccctgtgatcagacacctgttcgcccctctgaaggagtacttcgcctgcgtgagcagcggcaacagcaacgccaacagccggggccccagcttctctagcggcctggtgccactgtccctgagagggagccacatgggccccatggagatctacaaaaccgtgagcgcctggaagcggcagcctgtgcgcgtgctgagcctgtttcggaatatcgataaagtcctgaaaagcctgggattcctggagagcggctctggctccggcggtggcaccctgaagtacgtggaggatgtgacaaacgtggtcagacgggatgtggagaagtggggccccttcgatctggtgtacggcagcacccaacccctgggcagctcttgtgaccggtgccctggctggtacatgtttcagttccaccggatcctgcagtacgccctgccgagacaggagtcccagcggccattcttttggattttcatggacaacttgctgctgaccgaggatgaccaggaaactaccactcggttcctgcagaccgaagccgtgaccctgcaggacgtgagaggccgggactaccagaacgccatgcgggtgtggtccaacatccctggactgaaaagcaagcacgcacctctgacccctaaagaagaggagtacctgcaggcccaggtgcggagcagaagcaagctggacgcccctaaggtggatctgctggtgaagaattgcctcctgcccctgagagagtacttcaagtatttcagccagaatagtctgcccctgggaggcagcggcggcggcgccctggtgacatttgaggacgtcgccgtgcggttcacccaggaggaatgggctctgctggatccttctcagaaaatcctgtaccgggacgtgatgagagagacataccggaatctgacctccgtgggcatcaactgggaatgttgggaccttgaagcctgcttcagaagcctgggaagaaacctgagagtgcaggtggtgaagagaaagtgcgagctgaccaacagcggcccctgcgccgagggcggcccaagcagcggcgcccctcctcccagcggcggcagcccagccggctccccaacctctaccgaggagggcacctctgagtccgccacccccgagagcggccctggcacctccaccgagcccagcgagggcagcgcacccggcagccctgccggcagccccacctccacagaggagggaaccagcaccgagcccagcgaaggcagcgccccaggcaccagcaccgagcctagtgagcaggagattaaacggatcaacaagatcagaagaagacttgtgaaagacagcaacaccaagaaggccggcaagacaggccccatgaaaaccctgctggttagagtgatgacacccgatctgagagagcggctggaaaacctgagaaagaagcctgaaaatatcccccagcccatcagcaatacatctagagccaacctgaataagctgctgaccgattacaccgaaatgaagaaggcgatcctgcatgtgtactgggaagagttccagaaggaccctgtgggcctgatgagccgggtggcccagcctgccagcaagaagatcgatcagaacaagctgaaacctgagatggacgagaagggcaacctgaccaccgccggctttgcctgctctcagtgtggccagcccctgttcgtgtacaagctggagcaggtgtctgagaagggcaaggcttacaccaactacttcggacggtgcaatgtggccgagcacgaaaagctgatcctgctggcccagctgaagcccgagaaggatagcgacgaagccgtgacatatagcctgggaaagtttgggcagagggccctggatttctacagcattcatgtgaccaaggagtccacccaccccgtgaagcccctggcccagatcgccggaaacagatacgcctccggacctgtgggaaaggccctgagcgacgcatgtatgggcacaatcgcctccttcctgtctaagtaccaggacatcatcatcgaacaccagaaggtggtgaagggcaaccagaagagactggagagcctgcgggagctggccggcaaggaaaacctggaataccctagcgtgaccctgccacctcagcctcacaccaaggagggcgttgatgcctacaacgaagtgatcgcccgggtgcgaatgtgggtgaacctgaacctgtggcagaagctgaagctaagcagagatgatgccaagcctctgctgagactgaagggattcccttcctttcctctggtcgagagacaggccaacgaagtggactggtgggacatggtgtgtaacgtgaagaagctgatcaacgagaaaaaggaggatggcaaggtgttttggcagaatctggctggctacaagagacaggaagccctgagaccatacctgagcagcgaggaagatcggaagaagggaaagaaattcgctcggtaccagctgggcgacctgctgctgcacctggaaaagaagcacggcgaggactggggaaaggtgtacgacgaggcctgggagcggattgacaagaaagtggaaggcctgagcaagcacatcaagctggaagaggaacggagaagcgaggacgcccagagcaaggccgccctgaccgactggctgcgggctaaggccagcttcgtgatcgagggcctgaaggaggccgacaaggacgagttctgcagatgcgagctgaagctgcagaagtggtacggggacctgcggggaaagcccttcgccatcgaagccgagaacagcatcctggacatcagcggcttcagcaagcagtacaactgtgccttcatctggcagaaggacggcgtgaagaagctgaacctgtacctgatcatcaactacttcaagggcggcaagctgcggttcaagaagatcaaacctgaagccttcgaagccaacagattctacaccgtgatcaacaaaaagagcggcgagatcgtgcccatggaggtgaacttcaacttcgacgaccccaacctgatcatcctgcctctggcctttggcaagagacagggcagagaattcatctggaacgacctgctgtccctggaaaccggcagcctgaagctggccaacggaagagtgatcgagaagacactgtacaacagaagaacccggcaggatgagcctgccctgttcgtggccctgaccttcgagcggcgggaggtcctggactcctccaatatcaaaccaatgaacctgatcggcgtggcaagaggcgaaaacatccccgccgtgatcgccctgaccgaccccgagggctgcccactgagccggtttaaggatagcctgggaaacccaacccacatcctgagaatcggcgagagctataaggagaagcagcggaccatccaggccaagaaggaggtggagcagcggagagccggcggctacagccggaagtacgccagcaaagccaagaatctggcagacgatatggtgagaaacaccgctagagatctgctgtactacgccgtgacccaggatgccatgctgatcttcgccaacctgagccggggcttcggccggcagggcaagcggaccttcatggccgagagacagtacacacggatggaggactggctgaccgccaagctggcctacgagggcctgagcaagacctacctgtccaagacactggcccagtacacctccaagacatgcagcaactgtgggtttaccatcaccagcgccgactacgacagggtgctggagaagctgaagaagacagcaacaggctggatgaccacaattaacggcaaggagctgaaggtggagggccagattacctactacaacagatacaagagacagaacgtagtcaaggacctgtccgtcgagctggatagactgagcgaagaatctgtgaacaacgacatctcctcctggacaaagggcagaagcggagaagctctgagcctcctgaagaaaagattctcccatagacccgtgcaggagaagttcgtgtgcctgaactgcggcttcgagacacacgcagccgagcaagccgccctgaacatcgccagatcctggctgttcctgcggagccaggagtacaagaaataccagacaaacaagacaaccggcaacaccgataagagagccttcgtcgagacctggcagtccttttaccggaagaagcttaaggaggtgtggaaacctgccgtgcggtctggcggatctggcggaggctccgcccaccacctggtgatgttcagggacgtggccgtggacttcagccaggaggagtgggagtgcctgaacccctaccagaggaacctgtacagggacgtgatcctggagaactacagcaacctggtgagcgtgggctgcagcatcagcaagcccgacgtgatcaccctgctggagcagggcaaggagccctggatggtggtgagggacgagaggaggaggagcctggacctggagagcaggtacggcggcccaagcagcggcgcccctcctcccagcggcggcagcccagccggctccccaacctctaccgaggagggcacctctgagtccgccacccccgagagcggccctggcacctccaccgagcccagcgagggcagcgcacccggcagccctgccggcagccccacctccacagaggagggaaccagcaccgagcccagcgaaggcagcgccccaggcaccagcaccgagcctagtgagcaggagattaaacggatcaacaagatcagaagaagacttgtgaaagacagcaacaccaagaaggccggcaagacaggccccatgaaaaccctgctggttagagtgatgacacccgatctgagagagcggctggaaaacctgagaaagaagcctgaaaatatcccccagcccatcagcaatacatctagagccaacctgaataagctgctgaccgattacaccgaaatgaagaaggcgatcctgcatgtgtactgggaagagttccagaaggaccctgtgggcctgatgagccgggtggcccagcctgccagcaagaagatcgatcagaacaagctgaaacctgagatggacgagaagggcaacctgaccaccgccggctttgcctgctctcagtgtggccagcccctgttcgtgtacaagctggagcaggtgtctgagaagggcaaggcttacaccaactacttcggacggtgcaatgtggccgagcacgaaaagctgatcctgctggcccagctgaagcccgagaaggatagcgacgaagccgtgacatatagcctgggaaagtttgggcagagggccctggatttctacagcattcatgtgaccaaggagtccacccaccccgtgaagcccctggcccagatcgccggaaacagatacgcctccggacctgtgggaaaggccctgagcgacgcatgtatgggcacaatcgcctccttcctgtctaagtaccaggacatcatcatcgaacaccagaaggtggtgaagggcaaccagaagagactggagagcctgcgggagctggccggcaaggaaaacctggaataccctagcgtgaccctgccacctcagcctcacaccaaggagggcgttgatgcctacaacgaagtgatcgcccgggtgcgaatgtgggtgaacctgaacctgtggcagaagctgaagctaagcagagatgatgccaagcctctgctgagactgaagggattcccttcctttcctctggtcgagagacaggccaacgaagtggactggtgggacatggtgtgtaacgtgaagaagctgatcaacgagaaaaaggaggatggcaaggtgttttggcagaatctggctggctacaagagacaggaagccctgagaccatacctgagcagcgaggaagatcggaagaagggaaagaaattcgctcggtaccagctgggcgacctgctgctgcacctggaaaagaagcacggcgaggactggggaaaggtgtacgacgaggcctgggagcggattgacaagaaagtggaaggcctgagcaagcacatcaagctggaagaggaacggagaagcgaggacgcccagagcaaggccgccctgaccgactggctgcgggctaaggccagcttcgtgatcgagggcctgaaggaggccgacaaggacgagttctgcagatgcgagctgaagctgcagaagtggtacggggacctgcggggaaagcccttcgccatcgaagccgagaacagcatcctggacatcagcggcttcagcaagcagtacaactgtgccttcatctggcagaaggacggcgtgaagaagctgaacctgtacctgatcatcaactacttcaagggcggcaagctgcggttcaagaagatcaaacctgaagccttcgaagccaacagattctacaccgtgatcaacaaaaagagcggcgagatcgtgcccatggaggtgaacttcaacttcgacgaccccaacctgatcatcctgcctctggcctttggcaagagacagggcagagaattcatctggaacgacctgctgtccctggaaaccggcagcctgaagctggccaacggaagagtgatcgagaagacactgtacaacagaagaacccggcaggatgagcctgccctgttcgtggccctgaccttcgagcggcgggaggtcctggactcctccaatatcaaaccaatgaacctgatcggcgtggcaagaggcgaaaacatccccgccgtgatcgccctgaccgaccccgagggctgcccactgagccggtttaaggatagcctgggaaacccaacccacatcctgagaatcggcgagagctataaggagaagcagcggaccatccaggccaagaaggaggtggagcagcggagagccggcggctacagccggaagtacgccagcaaagccaagaatctggcagacgatatggtgagaaacaccgctagagatctgctgtactacgccgtgacccaggatgccatgctgatcttcgccaacctgagccggggcttcggccggcagggcaagcggaccttcatggccgagagacagtacacacggatggaggactggctgaccgccaagctggcctacgagggcctgagcaagacctacctgtccaagacactggcccagtacacctccaagacatgcagcaactgtgggtttaccatcaccagcgccgactacgacagggtgctggagaagctgaagaagacagcaacaggctggatgaccacaattaacggcaaggagctgaaggtggagggccagattacctactacaacagatacaagagacagaacgtagtcaaggacctgtccgtcgagctggatagactgagcgaagaatctgtgaacaacgacatctcctcctggacaaagggcagaagcggagaagctctgagcctcctgaagaaaagattctcccatagacccgtgcaggagaagttcgtgtgcctgaactgcggcttcgagacacacgcagccgagcaagccgccctgaacatcgccagatcctggctgttcctgcggagccaggagtacaagaaataccagacaaacaagacaaccggcaacaccgataagagagccttcgtcgagacctggcagtccttttaccggaagaagcttaaggaggtgtggaaacctgccgtgcggtctggcggatctggcggaggctcctgcccaccacctggtgatgttcagggacgtggccgtggacttcagccaggaggagtgggagtgcctgaacccctaccagaggaacctgtacagggacgtgatcctggagaactacagcaacctggtgagcgtgggctgcagcatcagcaagcccgacgtgatcaccctgctggagcagggcaaggagccctggatggtggtgagggacgagaggaggaggagcctggacctggagagcaggtacggatctggctccggcagcggccccaagaaaaagagaaaagtctaagctgccttctgcggggcttgccttctggccatgcccttcttctctcccttgcacctgtacctcttggtctttgaataaagcctgagtaggaaggctagcaaaaaaaaaaaaaaaaaaaaaaaaaaaaaaaaaaaaaaaaaaaaaaaaaaaaaaaaaaaaaaaaaaaaaaaaaaaaaaaa

SEQ ID NO: 15593 - RNA, 9485 nt, synthetic construct
  source 1..9485: mol_type = other RNA
aggaaataagagagaaaagaagagtaagaagaaatataagagccaccatggcccctaagaagaagcgtaaagtgagccggatggaacgcctcgtctacgaggtgcggcagaagtgcagaaacatcgaggacatctgcatctcctgcggatctctgaacgtgaccctggagcacccactgttcatcggcggcatgtgccagaactgtaaaaactgttttctggagtgtgcctatcaatacgacgatgacggctaccagagctactgcaccatctgttgcggcggaagagaggtgctgatgtgtggaaataacaactgctgccggtgcttctgcgtggaatgcgtggacctgctggtgggccccggcgccgcccaggccgctattaaggaagatccttggaactgctacatgtgcggccacaagggcacatacggcctgctgagacggagagaggactggcctagcagactgcagatgttcttcgccaataaccacgaccaggagttcgacccccctaaggtgtaccctcccgtccccgccgagaagagaaagcccatccgggtcctgagcctgttcgatggcatcgccaccggtctgctggtgctgaaggacctgggcatccaggtggataggtacattgcctccgaggtgtgcgaggactccatcaccgtgggaatggtgcgtcatcagggcaagatcatgtacgtgggcgacgtgcggagcgtgacacagaagcatatccaggagtggggccctttcgacctggtgatcggcggcagcccttgcaatgacctgagcatcgtgaacccagcccggaagggcctgtacgagggaaccggcagactgttcttcgagttttacagactgctgcacgacgcccggcctaaggaaggcgacgaccggcccttcttttggctgttcgagaatgtggtggccatgggagtcagcgacaagcgggatattagccggttcctggagagcaaccccgtgatgatcgatgccaaggaagtgagcgccgcccaccgggccagatacttctggggcaatctgcctggcatgaacagacccctggccagcaccgtgaacgacaagctggagctgcaggagtgcctggagcacggccggatcgccaagttcagcaaggtgagaaccatcaccacccgaagcaacagcatcaaacaaggcaaggaccagcactttcctgtgttcatgaacgagaaggaggacatcctgtggtgtaccgagatggagagagtgttcgggttcccagtccactacacagatgtcagcaacatgtctagactggccagacagagactgctgggaagaagctggtccgtccctgtgatcagacacctgttcgcccctctgaaggagtacttcgcctgcgtgagcagcggcaacagcaacgccaacagccggggccccagcttctctagcggcctggtgccactgtccctgagagggagccacatgggccccatggagatctacaaaaccgtgagcgcctggaagcggcagcctgtgcgcgtgctgagcctgtttcggaatatcgataaagtcctgaaaagcctgggattcctggagagcggctctggctccggcggtggcaccctgaagtacgtggaggatgtgacaaacgtggtcagacgggatgtggagaagtggggccccttcgatctggtgtacggcagcacccaacccctgggcagctcttgtgaccggtgccctggctggtacatgtttcagttccaccggatcctgcagtacgccctgccgagacaggagtcccagcggccattcttttggattttcatggacaacttgctgctgaccgaggatgaccaggaaactaccactcggttcctgcagaccgaagccgtgaccctgcaggacgtgagaggccgggactaccagaacgccatgcgggtgtggtccaacatccctggactgaaaagcaagcacgcacctctgacccctaaagaagaggagtacctgcaggcccaggtgcggagcagaagcaagctggacgcccctaaggtggatctgctggtgaagaattgcctcctgcccctgagagagtacttcaagtatttcagccagaatagtctgcccctgggaggcagcggcggcggcgccctggtgacatttgaggacgtcgccgtgcggttcacccaggaggaatgggctctgctggatccttctcagaaaatcctgtaccgggacgtgatgagagagacataccggaatctgacctccgtgggcatcaactgggaatgttgggaccttgaagcctgcttcagaagcctgggaagaaacctgagagtgcaggtggtgaagagaaagtgcgagctgaccaacagcggcccctgcgccgagggcggcccaagcagcggcgcccctcctcccagcggcggcagcccagccggctccccaacctctaccgaggagggcacctctgagtccgccacccccgagagcggccctggcacctccaccgagcccagcgagggcagcgcacccggcagccctgccggcagccccacctccacagaggagggaaccagcaccgagcccagcgaaggcagcgccccaggcaccagcaccgagcctagtgagcaggagattaaacggatcaacaagatcagaagaagacttgtgaaagacagcaacaccaagaaggccggcaagacaggccccatgaaaaccctgctggttagagtgatgacacccgatctgagagagcggctggaaaacctgagaaagaagcctgaaaatatcccccagcccatcagcaatacatctagagccaacctgaataagctgctgaccgattacaccgaaatgaagaaggcgatcctgcatgtgtactgggaagagttccagaaggaccctgtgggcctgatgagccgggtggcccagcctgccagcaagaagatcgatcagaacaagctgaaacctgagatggacgagaagggcaacctgaccaccgccggctttgcctgctctcagtgtggccagcccctgttcgtgtacaagctggagcaggtgtctgagaagggcaaggcttacaccaactacttcggacggtgcaatgtggccgagcacgaaaagctgatcctgctggcccagctgaagcccgagaaggatagcgacgaagccgtgacatatagcctgggaaagtttgggcagagggccctggatttctacagcattcatgtgaccaaggagtccacccaccccgtgaagcccctggcccagatcgccggaaacagatacgcctccggacctgtgggaaaggccctgagcgacgcatgtatgggcacaatcgcctccttcctgtctaagtaccaggacatcatcatcgaacaccagaaggtggtgaagggcaaccagaagagactggagagcctgcgggagctggccggcaaggaaaacctggaataccctagcgtgaccctgccacctcagcctcacaccaaggagggcgttgatgcctacaacgaagtgatcgcccgggtgcgaatgtgggtgaacctgaacctgtggcagaagctgaagctaagcagagatgatgccaagcctctgctgagactgaagggattcccttcctttcctctggtcgagagacaggccaacgaagtggactggtgggacatggtgtgtaacgtgaagaagctgatcaacgagaaaaaggaggatggcaaggtgttttggcagaatctggctggctacaagagacaggaagccctgagaccatacctgagcagcgaggaagatcggaagaagggaaagaaattcgctcggtaccagctgggcgacctgctgctgcacctggaaaagaagcacggcgaggactggggaaaggtgtacgacgaggcctgggagcggattgacaagaaagtggaaggcctgagcaagcacatcaagctggaagaggaacggagaagcgaggacgcccagagcaaggccgccctgaccgactggctgcgggctaaggccagcttcgtgatcgagggcctgaaggaggccgacaaggacgagttctgcagatgcgagctgaagctgcagaagtggtacggggacctgcggggaaagcccttcgccatcgaagccgagaacagcatcctggacatcagcggcttcagcaagcagtacaactgtgccttcatctggcagaaggacggcgtgaagaagctgaacctgtacctgatcatcaactacttcaagggcggcaagctgcggttcaagaagatcaaacctgaagccttcgaagccaacagattctacaccgtgatcaacaaaaagagcggcgagatcgtgcccatggaggtgaacttcaacttcgacgaccccaacctgatcatcctgcctctggcctttggcaagagacagggcagagaattcatctggaacgacctgctgtccctggaaaccggcagcctgaagctggccaacggaagagtgatcgagaagacactgtacaacagaagaacccggcaggatgagcctgccctgttcgtggccctgaccttcgagcggcgggaggtcctggactcctccaatatcaaaccaatgaacctgatcggcgtggcaagaggcgaaaacatccccgccgtgatcgccctgaccgaccccgagggctgcccactgagccggtttaaggatagcctgggaaacccaacccacatcctgagaatcggcgagagctataaggagaagcagcggaccatccaggccaagaaggaggtggagcagcggagagccggcggctacagccggaagtacgccagcaaagccaagaatctggcagacgatatggtgagaaacaccgctagagatctgctgtactacgccgtgacccaggatgccatgctgatcttcgccaacctgagccggggcttcggccggcagggcaagcggaccttcatggccgagagacagtacacacggatggaggactggctgaccgccaagctggcctacgagggcctgagcaagacctacctgtccaagacactggcccagtacacctccaagacatgcagcaactgtgggtttaccatcaccagcgccgactacgacagggtgctggagaagctgaagaagacagcaacaggctggatgaccacaattaacggcaaggagctgaaggtggagggccagattacctactacaacagatacaagagacagaacgtagtcaaggacctgtccgtcgagctggatagactgagcgaagaatctgtgaacaacgacatctcctcctggacaaagggcagaagcggagaagctctgagcctcctgaagaaaagattctcccatagacccgtgcaggagaagttcgtgtgcctgaactgcggcttcgagacacacgcagccgagcaagccgccctgaacatcgccagatcctggctgttcctgcggagccaggagtacaagaaataccagacaaacaagacaaccggcaacaccgataagagagccttcgtcgagacctggcagtccttttaccggaagaagcttaaggaggtgtggaaacctgccgtgcggtctggcggatctggcggaggctccccccaggagcccgtgaccttcgaggacgtggccgtgtacttcacccagaaccagtgggccagcctggaccccacccagagggccctgtacagggaggtgatgctggagaactacgccagcgtggccagcctggtgttccccttccccaagcccgacctggtgagccagctggagaggggcgaggccccctggggccccgacccctgggaggccgaggtgctgaggggcatctgccccggcggcggcggcccaagcagcggcgcccctcctcccagcggcggcagcccagccggctccccaacctctaccgaggagggcacctctgagtccgccacccccgagagcggccctggcacctccaccgagcccagcgagggcagcgcacccggcagccctgccggcagccccacctccacagaggagggaaccagcaccgagcccagcgaaggcagcgccccaggcaccagcaccgagcctagtgagcaggagattaaacggatcaacaagatcagaagaagacttgtgaaagacagcaacaccaagaaggccggcaagacaggccccatgaaaaccctgctggttagagtgatgacacccgatctgagagagcggctggaaaacctgagaaagaagcctgaaaatatcccccagcccatcagcaatacatctagagccaacctgaataagctgctgaccgattacaccgaaatgaagaaggcgatcctgcatgtgtactgggaagagttccagaaggaccctgtgggcctgatgagccgggtggcccagcctgccagcaagaagatcgatcagaacaagctgaaacctgagatggacgagaagggcaacctgaccaccgccggctttgcctgctctcagtgtggccagcccctgttcgtgtacaagctggagcaggtgtctgagaagggcaaggcttacaccaactacttcggacggtgcaatgtggccgagcacgaaaagctgatcctgctggcccagctgaagcccgagaaggatagcgacgaagccgtgacatatagcctgggaaagtttgggcagagggccctggatttctacagcattcatgtgaccaaggagtccacccaccccgtgaagcccctggcccagatcgccggaaacagatacgcctccggacctgtgggaaaggccctgagcgacgcatgtatgggcacaatcgcctccttcctgtctaagtaccaggacatcatcatcgaacaccagaaggtggtgaagggcaaccagaagagactggagagcctgcgggagctggccggcaaggaaaacctggaataccctagcgtgaccctgccacctcagcctcacaccaaggagggcgttgatgcctacaacgaagtgatcgcccgggtgcgaatgtgggtgaacctgaacctgtggcagaagctgaagctaagcagagatgatgccaagcctctgctgagactgaagggattcccttcctttcctctggtcgagagacaggccaacgaagtggactggtgggacatggtgtgtaacgtgaagaagctgatcaacgagaaaaaggaggatggcaaggtgttttggcagaatctggctggctacaagagacaggaagccctgagaccatacctgagcagcgaggaagatcggaagaagggaaagaaattcgctcggtaccagctgggcgacctgctgctgcacctggaaaagaagcacggcgaggactggggaaaggtgtacgacgaggcctgggagcggattgacaagaaagtggaaggcctgagcaagcacatcaagctggaagaggaacggagaagcgaggacgcccagagcaaggccgccctgaccgactggctgcgggctaaggccagcttcgtgatcgagggcctgaaggaggccgacaaggacgagttctgcagatgcgagctgaagctgcagaagtggtacggggacctgcggggaaagcccttcgccatcgaagccgagaacagcatcctggacatcagcggcttcagcaagcagtacaactgtgccttcatctggcagaaggacggcgtgaagaagctgaacctgtacctgatcatcaactacttcaagggcggcaagctgcggttcaagaagatcaaacctgaagccttcgaagccaacagattctacaccgtgatcaacaaaaagagcggcgagatcgtgcccatggaggtgaacttcaacttcgacgaccccaacctgatcatcctgcctctggcctttggcaagagacagggcagagaattcatctggaacgacctgctgtccctggaaaccggcagcctgaagctggccaacggaagagtgatcgagaagacactgtacaacagaagaacccggcaggatgagcctgccctgttcgtggccctgaccttcgagcggcgggaggtcctggactcctccaatatcaaaccaatgaacctgatcggcgtggcaagaggcgaaaacatccccgccgtgatcgccctgaccgaccccgagggctgcccactgagccggtttaaggatagcctgggaaacccaacccacatcctgagaatcggcgagagctataaggagaagcagcggaccatccaggccaagaaggaggtggagcagcggagagccggcggctacagccggaagtacgccagcaaagccaagaatctggcagacgatatggtgagaaacaccgctagagatctgctgtactacgccgtgacccaggatgccatgctgatcttcgccaacctgagccggggcttcggccggcagggcaagcggaccttcatggccgagagacagtacacacggatggaggactggctgaccgccaagctggcctacgagggcctgagcaagacctacctgtccaagacactggcccagtacacctccaagacatgcagcaactgtgggtttaccatcaccagcgccgactacgacagggtgctggagaagctgaagaagacagcaacaggctggatgaccacaattaacggcaaggagctgaaggtggagggccagattacctactacaacagatacaagagacagaacgtagtcaaggacctgtccgtcgagctggatagactgagcgaagaatctgtgaacaacgacatctcctcctggacaaagggcagaagcggagaagctctgagcctcctgaagaaaagattctcccatagacccgtgcaggagaagttcgtgtgcctgaactgcggcttcgagacacacgcagccgagcaagccgccctgaacatcgccagatcctggctgttcctgcggagccaggagtacaagaaataccagacaaacaagacaaccggcaacaccgataagagagccttcgtcgagacctggcagtccttttaccggaagaagcttaaggaggtgtggaaacctgccgtgcggtctggcggatctggcggaggctcctccccaggagcccgtgaccttcgaggacgtggccgtgtacttcacccagaaccagtgggccagcctggaccccacccagagggccctgtacagggaggtgatgctggagaactacgccagcgtggccagcctggtgttccccttccccaagcccgacctggtgagccagctggagaggggcgaggccccctggggccccgacccctgggaggccgaggtgctgaggggcatctgccccggcggcggatctggctccggcagcggccccaagaaaaagagaaaagtctaagctgccttctgcggggcttgccttctggccatgcccttcttctctcccttgcacctgtacctcttggtctttgaataaagcctgagtaggaaggctagcaaaaaaaaaaaaaaaaaaaaaaaaaaaaaaaaaaaaaaaaaaaaaaaaaaaaaaaaaaaaaaaaaaaaaaaaaaaaaaaa

SEQ ID NO: 15594 - RNA, 9485 nt, synthetic construct
  source 1..9485: mol_type = other RNA
aggaaataagagagaaaagaagagtaagaagaaatataagagccaccatggcccctaagaagaagcgtaaagtgagccggatggaacgcctcgtctacgaggtgcggcagaagtgcagaaacatcgaggacatctgcatctcctgcggatctctgaacgtgaccctggagcacccactgttcatcggcggcatgtgccagaactgtaaaaactgttttctggagtgtgcctatcaatacgacgatgacggctaccagagctactgcaccatctgttgcggcggaagagaggtgctgatgtgtggaaataacaactgctgccggtgcttctgcgtggaatgcgtggacctgctggtgggccccggcgccgcccaggccgctattaaggaagatccttggaactgctacatgtgcggccacaagggcacatacggcctgctgagacggagagaggactggcctagcagactgcagatgttcttcgccaataaccacgaccaggagttcgacccccctaaggtgtaccctcccgtccccgccgagaagagaaagcccatccgggtcctgagcctgttcgatggcatcgccaccggtctgctggtgctgaaggacctgggcatccaggtggataggtacattgcctccgaggtgtgcgaggactccatcaccgtgggaatggtgcgtcatcagggcaagatcatgtacgtgggcgacgtgcggagcgtgacacagaagcatatccaggagtggggccctttcgacctggtgatcggcggcagcccttgcaatgacctgagcatcgtgaacccagcccggaagggcctgtacgagggaaccggcagactgttcttcgagttttacagactgctgcacgacgcccggcctaaggaaggcgacgaccggcccttcttttggctgttcgagaatgtggtggccatgggagtcagcgacaagcgggatattagccggttcctggagagcaaccccgtgatgatcgatgccaaggaagtgagcgccgcccaccgggccagatacttctggggcaatctgcctggcatgaacagacccctggccagcaccgtgaacgacaagctggagctgcaggagtgcctggagcacggccggatcgccaagttcagcaaggtgagaaccatcaccacccgaagcaacagcatcaaacaaggcaaggaccagcactttcctgtgttcatgaacgagaaggaggacatcctgtggtgtaccgagatggagagagtgttcgggttcccagtccactacacagatgtcagcaacatgtctagactggccagacagagactgctgggaagaagctggtccgtccctgtgatcagacacctgttcgcccctctgaaggagtacttcgcctgcgtgagcagcggcaacagcaacgccaacagccggggccccagcttctctagcggcctggtgccactgtccctgagagggagccacatgggccccatggagatctacaaaaccgtgagcgcctggaagcggcagcctgtgcgcgtgctgagcctgtttcggaatatcgataaagtcctgaaaagcctgggattcctggagagcggctctggctccggcggtggcaccctgaagtacgtggaggatgtgacaaacgtggtcagacgggatgtggagaagtggggccccttcgatctggtgtacggcagcacccaacccctgggcagctcttgtgaccggtgccctggctggtacatgtttcagttccaccggatcctgcagtacgccctgccgagacaggagtcccagcggccattcttttggattttcatggacaacttgctgctgaccgaggatgaccaggaaactaccactcggttcctgcagaccgaagccgtgaccctgcaggacgtgagaggccgggactaccagaacgccatgcgggtgtggtccaacatccctggactgaaaagcaagcacgcacctctgacccctaaagaagaggagtacctgcaggcccaggtgcggagcagaagcaagctggacgcccctaaggtggatctgctggtgaagaattgcctcctgcccctgagagagtacttcaagtatttcagccagaatagtctgcccctgggaggcagcggcggcggcgccctggtgacatttgaggacgtcgccgtgcggttcacccaggaggaatgggctctgctggatccttctcagaaaatcctgtaccgggacgtgatgagagagacataccggaatctgacctccgtgggcatcaactgggaatgttgggaccttgaagcctgcttcagaagcctgggaagaaacctgagagtgcaggtggtgaagagaaagtgcgagctgaccaacagcggcccctgcgccgagggcggcccaagcagcggcgcccctcctcccagcggcggcagcccagccggctccccaacctctaccgaggagggcacctctgagtccgccacccccgagagcggccctggcacctccaccgagcccagcgagggcagcgcacccggcagccctgccggcagccccacctccacagaggagggaaccagcaccgagcccagcgaaggcagcgccccaggcaccagcaccgagcctagtgagcaggagattaaacggatcaacaagatcagaagaagacttgtgaaagacagcaacaccaagaaggccggcaagacaggccccatgaaaaccctgctggttagagtgatgacacccgatctgagagagcggctggaaaacctgagaaagaagcctgaaaatatcccccagcccatcagcaatacatctagagccaacctgaataagctgctgaccgattacaccgaaatgaagaaggcgatcctgcatgtgtactgggaagagttccagaaggaccctgtgggcctgatgagccgggtggcccagcctgccagcaagaagatcgatcagaacaagctgaaacctgagatggacgagaagggcaacctgaccaccgccggctttgcctgctctcagtgtggccagcccctgttcgtgtacaagctggagcaggtgtctgagaagggcaaggcttacaccaactacttcggacggtgcaatgtggccgagcacgaaaagctgatcctgctggcccagctgaagcccgagaaggatagcgacgaagccgtgacatatagcctgggaaagtttgggcagagggccctggatttctacagcattcatgtgaccaaggagtccacccaccccgtgaagcccctggcccagatcgccggaaacagatacgcctccggacctgtgggaaaggccctgagcgacgcatgtatgggcacaatcgcctccttcctgtctaagtaccaggacatcatcatcgaacaccagaaggtggtgaagggcaaccagaagagactggagagcctgcgggagctggccggcaaggaaaacctggaataccctagcgtgaccctgccacctcagcctcacaccaaggagggcgttgatgcctacaacgaagtgatcgcccgggtgcgaatgtgggtgaacctgaacctgtggcagaagctgaagctaagcagagatgatgccaagcctctgctgagactgaagggattcccttcctttcctctggtcgagagacaggccaacgaagtggactggtgggacatggtgtgtaacgtgaagaagctgatcaacgagaaaaaggaggatggcaaggtgttttggcagaatctggctggctacaagagacaggaagccctgagaccatacctgagcagcgaggaagatcggaagaagggaaagaaattcgctcggtaccagctgggcgacctgctgctgcacctggaaaagaagcacggcgaggactggggaaaggtgtacgacgaggcctgggagcggattgacaagaaagtggaaggcctgagcaagcacatcaagctggaagaggaacggagaagcgaggacgcccagagcaaggccgccctgaccgactggctgcgggctaaggccagcttcgtgatcgagggcctgaaggaggccgacaaggacgagttctgcagatgcgagctgaagctgcagaagtggtacggggacctgcggggaaagcccttcgccatcgaagccgagaacagcatcctggacatcagcggcttcagcaagcagtacaactgtgccttcatctggcagaaggacggcgtgaagaagctgaacctgtacctgatcatcaactacttcaagggcggcaagctgcggttcaagaagatcaaacctgaagccttcgaagccaacagattctacaccgtgatcaacaaaaagagcggcgagatcgtgcccatggaggtgaacttcaacttcgacgaccccaacctgatcatcctgcctctggcctttggcaagagacagggcagagaattcatctggaacgacctgctgtccctggaaaccggcagcctgaagctggccaacggaagagtgatcgagaagacactgtacaacagaagaacccggcaggatgagcctgccctgttcgtggccctgaccttcgagcggcgggaggtcctggactcctccaatatcaaaccaatgaacctgatcggcgtggcaagaggcgaaaacatccccgccgtgatcgccctgaccgaccccgagggctgcccactgagccggtttaaggatagcctgggaaacccaacccacatcctgagaatcggcgagagctataaggagaagcagcggaccatccaggccaagaaggaggtggagcagcggagagccggcggctacagccggaagtacgccagcaaagccaagaatctggcagacgatatggtgagaaacaccgctagagatctgctgtactacgccgtgacccaggatgccatgctgatcttcgccaacctgagccggggcttcggccggcagggcaagcggaccttcatggccgagagacagtacacacggatggaggactggctgaccgccaagctggcctacgagggcctgagcaagacctacctgtccaagacactggcccagtacacctccaagacatgcagcaactgtgggtttaccatcaccagcgccgactacgacagggtgctggagaagctgaagaagacagcaacaggctggatgaccacaattaacggcaaggagctgaaggtggagggccagattacctactacaacagatacaagagacagaacgtagtcaaggacctgtccgtcgagctggatagactgagcgaagaatctgtgaacaacgacatctcctcctggacaaagggcagaagcggagaagctctgagcctcctgaagaaaagattctcccatagacccgtgcaggagaagttcgtgtgcctgaactgcggcttcgagacacacgcagccgagcaagccgccctgaacatcgccagatcctggctgttcctgcggagccaggagtacaagaaataccagacaaacaagacaaccggcaacaccgataagagagccttcgtcgagacctggcagtccttttaccggaagaagcttaaggaggtgtggaaacctgccgtgcggtctggcggatctggcggaggctccatggccttcgaggacgtggccgtgtacttcagccaggaggagtgggtgttcctggacgccgcccagagggccctgtacaggcacgtgatgctggagaacttcgccctggtggacagcatcggcctgagcatcagcaggcccagggtgatcatccagctgcagaggggcgaggagccctgggtgcccaacaggaccaacaccggccccggcaggggcaccaggaggaggcccagcctgggcagcggcggcccaagcagcggcgcccctcctcccagcggcggcagcccagccggctccccaacctctaccgaggagggcacctctgagtccgccacccccgagagcggccctggcacctccaccgagcccagcgagggcagcgcacccggcagccctgccggcagccccacctccacagaggagggaaccagcaccgagcccagcgaaggcagcgccccaggcaccagcaccgagcctagtgagcaggagattaaacggatcaacaagatcagaagaagacttgtgaaagacagcaacaccaagaaggccggcaagacaggccccatgaaaaccctgctggttagagtgatgacacccgatctgagagagcggctggaaaacctgagaaagaagcctgaaaatatcccccagcccatcagcaatacatctagagccaacctgaataagctgctgaccgattacaccgaaatgaagaaggcgatcctgcatgtgtactgggaagagttccagaaggaccctgtgggcctgatgagccgggtggcccagcctgccagcaagaagatcgatcagaacaagctgaaacctgagatggacgagaagggcaacctgaccaccgccggctttgcctgctctcagtgtggccagcccctgttcgtgtacaagctggagcaggtgtctgagaagggcaaggcttacaccaactacttcggacggtgcaatgtggccgagcacgaaaagctgatcctgctggcccagctgaagcccgagaaggatagcgacgaagccgtgacatatagcctgggaaagtttgggcagagggccctggatttctacagcattcatgtgaccaaggagtccacccaccccgtgaagcccctggcccagatcgccggaaacagatacgcctccggacctgtgggaaaggccctgagcgacgcatgtatgggcacaatcgcctccttcctgtctaagtaccaggacatcatcatcgaacaccagaaggtggtgaagggcaaccagaagagactggagagcctgcgggagctggccggcaaggaaaacctggaataccctagcgtgaccctgccacctcagcctcacaccaaggagggcgttgatgcctacaacgaagtgatcgcccgggtgcgaatgtgggtgaacctgaacctgtggcagaagctgaagctaagcagagatgatgccaagcctctgctgagactgaagggattcccttcctttcctctggtcgagagacaggccaacgaagtggactggtgggacatggtgtgtaacgtgaagaagctgatcaacgagaaaaaggaggatggcaaggtgttttggcagaatctggctggctacaagagacaggaagccctgagaccatacctgagcagcgaggaagatcggaagaagggaaagaaattcgctcggtaccagctgggcgacctgctgctgcacctggaaaagaagcacggcgaggactggggaaaggtgtacgacgaggcctgggagcggattgacaagaaagtggaaggcctgagcaagcacatcaagctggaagaggaacggagaagcgaggacgcccagagcaaggccgccctgaccgactggctgcgggctaaggccagcttcgtgatcgagggcctgaaggaggccgacaaggacgagttctgcagatgcgagctgaagctgcagaagtggtacggggacctgcggggaaagcccttcgccatcgaagccgagaacagcatcctggacatcagcggcttcagcaagcagtacaactgtgccttcatctggcagaaggacggcgtgaagaagctgaacctgtacctgatcatcaactacttcaagggcggcaagctgcggttcaagaagatcaaacctgaagccttcgaagccaacagattctacaccgtgatcaacaaaaagagcggcgagatcgtgcccatggaggtgaacttcaacttcgacgaccccaacctgatcatcctgcctctggcctttggcaagagacagggcagagaattcatctggaacgacctgctgtccctggaaaccggcagcctgaagctggccaacggaagagtgatcgagaagacactgtacaacagaagaacccggcaggatgagcctgccctgttcgtggccctgaccttcgagcggcgggaggtcctggactcctccaatatcaaaccaatgaacctgatcggcgtggcaagaggcgaaaacatccccgccgtgatcgccctgaccgaccccgagggctgcccactgagccggtttaaggatagcctgggaaacccaacccacatcctgagaatcggcgagagctataaggagaagcagcggaccatccaggccaagaaggaggtggagcagcggagagccggcggctacagccggaagtacgccagcaaagccaagaatctggcagacgatatggtgagaaacaccgctagagatctgctgtactacgccgtgacccaggatgccatgctgatcttcgccaacctgagccggggcttcggccggcagggcaagcggaccttcatggccgagagacagtacacacggatggaggactggctgaccgccaagctggcctacgagggcctgagcaagacctacctgtccaagacactggcccagtacacctccaagacatgcagcaactgtgggtttaccatcaccagcgccgactacgacagggtgctggagaagctgaagaagacagcaacaggctggatgaccacaattaacggcaaggagctgaaggtggagggccagattacctactacaacagatacaagagacagaacgtagtcaaggacctgtccgtcgagctggatagactgagcgaagaatctgtgaacaacgacatctcctcctggacaaagggcagaagcggagaagctctgagcctcctgaagaaaagattctcccatagacccgtgcaggagaagttcgtgtgcctgaactgcggcttcgagacacacgcagccgagcaagccgccctgaacatcgccagatcctggctgttcctgcggagccaggagtacaagaaataccagacaaacaagacaaccggcaacaccgataagagagccttcgtcgagacctggcagtccttttaccggaagaagcttaaggaggtgtggaaacctgccgtgcggtctggcggatctggcggaggctcctatggccttcgaggacgtggccgtgtacttcagccaggaggagtgggtgttcctggacgccgcccagagggccctgtacaggcacgtgatgctggagaacttcgccctggtggacagcatcggcctgagcatcagcaggcccagggtgatcatccagctgcagaggggcgaggagccctgggtgcccaacaggaccaacaccggccccggcaggggcaccaggaggaggcccagcctgggcagcggatctggctccggcagcggccccaagaaaaagagaaaagtctaagctgccttctgcggggcttgccttctggccatgcccttcttctctcccttgcacctgtacctcttggtctttgaataaagcctgagtaggaaggctagcaaaaaaaaaaaaaaaaaaaaaaaaaaaaaaaaaaaaaaaaaaaaaaaaaaaaaaaaaaaaaaaaaaaaaaaaaaaaaaaa

SEQ ID NO: 15595 - RNA, 9485 nt, synthetic construct
  source 1..9485: mol_type = other RNA
aggaaataagagagaaaagaagagtaagaagaaatataagagccaccatggcccctaagaagaagcgtaaagtgagccggatggaacgcctcgtctacgaggtgcggcagaagtgcagaaacatcgaggacatctgcatctcctgcggatctctgaacgtgaccctggagcacccactgttcatcggcggcatgtgccagaactgtaaaaactgttttctggagtgtgcctatcaatacgacgatgacggctaccagagctactgcaccatctgttgcggcggaagagaggtgctgatgtgtggaaataacaactgctgccggtgcttctgcgtggaatgcgtggacctgctggtgggccccggcgccgcccaggccgctattaaggaagatccttggaactgctacatgtgcggccacaagggcacatacggcctgctgagacggagagaggactggcctagcagactgcagatgttcttcgccaataaccacgaccaggagttcgacccccctaaggtgtaccctcccgtccccgccgagaagagaaagcccatccgggtcctgagcctgttcgatggcatcgccaccggtctgctggtgctgaaggacctgggcatccaggtggataggtacattgcctccgaggtgtgcgaggactccatcaccgtgggaatggtgcgtcatcagggcaagatcatgtacgtgggcgacgtgcggagcgtgacacagaagcatatccaggagtggggccctttcgacctggtgatcggcggcagcccttgcaatgacctgagcatcgtgaacccagcccggaagggcctgtacgagggaaccggcagactgttcttcgagttttacagactgctgcacgacgcccggcctaaggaaggcgacgaccggcccttcttttggctgttcgagaatgtggtggccatgggagtcagcgacaagcgggatattagccggttcctggagagcaaccccgtgatgatcgatgccaaggaagtgagcgccgcccaccgggccagatacttctggggcaatctgcctggcatgaacagacccctggccagcaccgtgaacgacaagctggagctgcaggagtgcctggagcacggccggatcgccaagttcagcaaggtgagaaccatcaccacccgaagcaacagcatcaaacaaggcaaggaccagcactttcctgtgttcatgaacgagaaggaggacatcctgtggtgtaccgagatggagagagtgttcgggttcccagtccactacacagatgtcagcaacatgtctagactggccagacagagactgctgggaagaagctggtccgtccctgtgatcagacacctgttcgcccctctgaaggagtacttcgcctgcgtgagcagcggcaacagcaacgccaacagccggggccccagcttctctagcggcctggtgccactgtccctgagagggagccacatgggccccatggagatctacaaaaccgtgagcgcctggaagcggcagcctgtgcgcgtgctgagcctgtttcggaatatcgataaagtcctgaaaagcctgggattcctggagagcggctctggctccggcggtggcaccctgaagtacgtggaggatgtgacaaacgtggtcagacgggatgtggagaagtggggccccttcgatctggtgtacggcagcacccaacccctgggcagctcttgtgaccggtgccctggctggtacatgtttcagttccaccggatcctgcagtacgccctgccgagacaggagtcccagcggccattcttttggattttcatggacaacttgctgctgaccgaggatgaccaggaaactaccactcggttcctgcagaccgaagccgtgaccctgcaggacgtgagaggccgggactaccagaacgccatgcgggtgtggtccaacatccctggactgaaaagcaagcacgcacctctgacccctaaagaagaggagtacctgcaggcccaggtgcggagcagaagcaagctggacgcccctaaggtggatctgctggtgaagaattgcctcctgcccctgagagagtacttcaagtatttcagccagaatagtctgcccctgggaggcagcggcggcggcgccctggtgacatttgaggacgtcgccgtgcggttcacccaggaggaatgggctctgctggatccttctcagaaaatcctgtaccgggacgtgatgagagagacataccggaatctgacctccgtgggcatcaactgggaatgttgggaccttgaagcctgcttcagaagcctgggaagaaacctgagagtgcaggtggtgaagagaaagtgcgagctgaccaacagcggcccctgcgccgagggcggcccaagcagcggcgcccctcctcccagcggcggcagcccagccggctccccaacctctaccgaggagggcacctctgagtccgccacccccgagagcggccctggcacctccaccgagcccagcgagggcagcgcacccggcagccctgccggcagccccacctccacagaggagggaaccagcaccgagcccagcgaaggcagcgccccaggcaccagcaccgagcctagtgagcaggagattaaacggatcaacaagatcagaagaagacttgtgaaagacagcaacaccaagaaggccggcaagacaggccccatgaaaaccctgctggttagagtgatgacacccgatctgagagagcggctggaaaacctgagaaagaagcctgaaaatatcccccagcccatcagcaatacatctagagccaacctgaataagctgctgaccgattacaccgaaatgaagaaggcgatcctgcatgtgtactgggaagagttccagaaggaccctgtgggcctgatgagccgggtggcccagcctgccagcaagaagatcgatcagaacaagctgaaacctgagatggacgagaagggcaacctgaccaccgccggctttgcctgctctcagtgtggccagcccctgttcgtgtacaagctggagcaggtgtctgagaagggcaaggcttacaccaactacttcggacggtgcaatgtggccgagcacgaaaagctgatcctgctggcccagctgaagcccgagaaggatagcgacgaagccgtgacatatagcctgggaaagtttgggcagagggccctggatttctacagcattcatgtgaccaaggagtccacccaccccgtgaagcccctggcccagatcgccggaaacagatacgcctccggacctgtgggaaaggccctgagcgacgcatgtatgggcacaatcgcctccttcctgtctaagtaccaggacatcatcatcgaacaccagaaggtggtgaagggcaaccagaagagactggagagcctgcgggagctggccggcaaggaaaacctggaataccctagcgtgaccctgccacctcagcctcacaccaaggagggcgttgatgcctacaacgaagtgatcgcccgggtgcgaatgtgggtgaacctgaacctgtggcagaagctgaagctaagcagagatgatgccaagcctctgctgagactgaagggattcccttcctttcctctggtcgagagacaggccaacgaagtggactggtgggacatggtgtgtaacgtgaagaagctgatcaacgagaaaaaggaggatggcaaggtgttttggcagaatctggctggctacaagagacaggaagccctgagaccatacctgagcagcgaggaagatcggaagaagggaaagaaattcgctcggtaccagctgggcgacctgctgctgcacctggaaaagaagcacggcgaggactggggaaaggtgtacgacgaggcctgggagcggattgacaagaaagtggaaggcctgagcaagcacatcaagctggaagaggaacggagaagcgaggacgcccagagcaaggccgccctgaccgactggctgcgggctaaggccagcttcgtgatcgagggcctgaaggaggccgacaaggacgagttctgcagatgcgagctgaagctgcagaagtggtacggggacctgcggggaaagcccttcgccatcgaagccgagaacagcatcctggacatcagcggcttcagcaagcagtacaactgtgccttcatctggcagaaggacggcgtgaagaagctgaacctgtacctgatcatcaactacttcaagggcggcaagctgcggttcaagaagatcaaacctgaagccttcgaagccaacagattctacaccgtgatcaacaaaaagagcggcgagatcgtgcccatggaggtgaacttcaacttcgacgaccccaacctgatcatcctgcctctggcctttggcaagagacagggcagagaattcatctggaacgacctgctgtccctggaaaccggcagcctgaagctggccaacggaagagtgatcgagaagacactgtacaacagaagaacccggcaggatgagcctgccctgttcgtggccctgaccttcgagcggcgggaggtcctggactcctccaatatcaaaccaatgaacctgatcggcgtggcaagaggcgaaaacatccccgccgtgatcgccctgaccgaccccgagggctgcccactgagccggtttaaggatagcctgggaaacccaacccacatcctgagaatcggcgagagctataaggagaagcagcggaccatccaggccaagaaggaggtggagcagcggagagccggcggctacagccggaagtacgccagcaaagccaagaatctggcagacgatatggtgagaaacaccgctagagatctgctgtactacgccgtgacccaggatgccatgctgatcttcgccaacctgagccggggcttcggccggcagggcaagcggaccttcatggccgagagacagtacacacggatggaggactggctgaccgccaagctggcctacgagggcctgagcaagacctacctgtccaagacactggcccagtacacctccaagacatgcagcaactgtgggtttaccatcaccagcgccgactacgacagggtgctggagaagctgaagaagacagcaacaggctggatgaccacaattaacggcaaggagctgaaggtggagggccagattacctactacaacagatacaagagacagaacgtagtcaaggacctgtccgtcgagctggatagactgagcgaagaatctgtgaacaacgacatctcctcctggacaaagggcagaagcggagaagctctgagcctcctgaagaaaagattctcccatagacccgtgcaggagaagttcgtgtgcctgaactgcggcttcgagacacacgcagccgagcaagccgccctgaacatcgccagatcctggctgttcctgcggagccaggagtacaagaaataccagacaaacaagacaaccggcaacaccgataagagagccttcgtcgagacctggcagtccttttaccggaagaagcttaaggaggtgtggaaacctgccgtgcggtctggcggatctggcggaggctccgaggagctgcccgtggtgttcgaggacgtggccgtgtacttcaccagggaggagtggggcatgctggtgaagaggcagaaggagctgtacagggacgtgatgaggatgaactacgagctgctggccagcctgggccccgccgccgccaagcccgacctgatcagcaagctggagaggagggccgccccctggatcaaggaccccaacggccccaagtggggcaagggcaggccccccggcaagggcggcccaagcagcggcgcccctcctcccagcggcggcagcccagccggctccccaacctctaccgaggagggcacctctgagtccgccacccccgagagcggccctggcacctccaccgagcccagcgagggcagcgcacccggcagccctgccggcagccccacctccacagaggagggaaccagcaccgagcccagcgaaggcagcgccccaggcaccagcaccgagcctagtgagcaggagattaaacggatcaacaagatcagaagaagacttgtgaaagacagcaacaccaagaaggccggcaagacaggccccatgaaaaccctgctggttagagtgatgacacccgatctgagagagcggctggaaaacctgagaaagaagcctgaaaatatcccccagcccatcagcaatacatctagagccaacctgaataagctgctgaccgattacaccgaaatgaagaaggcgatcctgcatgtgtactgggaagagttccagaaggaccctgtgggcctgatgagccgggtggcccagcctgccagcaagaagatcgatcagaacaagctgaaacctgagatggacgagaagggcaacctgaccaccgccggctttgcctgctctcagtgtggccagcccctgttcgtgtacaagctggagcaggtgtctgagaagggcaaggcttacaccaactacttcggacggtgcaatgtggccgagcacgaaaagctgatcctgctggcccagctgaagcccgagaaggatagcgacgaagccgtgacatatagcctgggaaagtttgggcagagggccctggatttctacagcattcatgtgaccaaggagtccacccaccccgtgaagcccctggcccagatcgccggaaacagatacgcctccggacctgtgggaaaggccctgagcgacgcatgtatgggcacaatcgcctccttcctgtctaagtaccaggacatcatcatcgaacaccagaaggtggtgaagggcaaccagaagagactggagagcctgcgggagctggccggcaaggaaaacctggaataccctagcgtgaccctgccacctcagcctcacaccaaggagggcgttgatgcctacaacgaagtgatcgcccgggtgcgaatgtgggtgaacctgaacctgtggcagaagctgaagctaagcagagatgatgccaagcctctgctgagactgaagggattcccttcctttcctctggtcgagagacaggccaacgaagtggactggtgggacatggtgtgtaacgtgaagaagctgatcaacgagaaaaaggaggatggcaaggtgttttggcagaatctggctggctacaagagacaggaagccctgagaccatacctgagcagcgaggaagatcggaagaagggaaagaaattcgctcggtaccagctgggcgacctgctgctgcacctggaaaagaagcacggcgaggactggggaaaggtgtacgacgaggcctgggagcggattgacaagaaagtggaaggcctgagcaagcacatcaagctggaagaggaacggagaagcgaggacgcccagagcaaggccgccctgaccgactggctgcgggctaaggccagcttcgtgatcgagggcctgaaggaggccgacaaggacgagttctgcagatgcgagctgaagctgcagaagtggtacggggacctgcggggaaagcccttcgccatcgaagccgagaacagcatcctggacatcagcggcttcagcaagcagtacaactgtgccttcatctggcagaaggacggcgtgaagaagctgaacctgtacctgatcatcaactacttcaagggcggcaagctgcggttcaagaagatcaaacctgaagccttcgaagccaacagattctacaccgtgatcaacaaaaagagcggcgagatcgtgcccatggaggtgaacttcaacttcgacgaccccaacctgatcatcctgcctctggcctttggcaagagacagggcagagaattcatctggaacgacctgctgtccctggaaaccggcagcctgaagctggccaacggaagagtgatcgagaagacactgtacaacagaagaacccggcaggatgagcctgccctgttcgtggccctgaccttcgagcggcgggaggtcctggactcctccaatatcaaaccaatgaacctgatcggcgtggcaagaggcgaaaacatccccgccgtgatcgccctgaccgaccccgagggctgcccactgagccggtttaaggatagcctgggaaacccaacccacatcctgagaatcggcgagagctataaggagaagcagcggaccatccaggccaagaaggaggtggagcagcggagagccggcggctacagccggaagtacgccagcaaagccaagaatctggcagacgatatggtgagaaacaccgctagagatctgctgtactacgccgtgacccaggatgccatgctgatcttcgccaacctgagccggggcttcggccggcagggcaagcggaccttcatggccgagagacagtacacacggatggaggactggctgaccgccaagctggcctacgagggcctgagcaagacctacctgtccaagacactggcccagtacacctccaagacatgcagcaactgtgggtttaccatcaccagcgccgactacgacagggtgctggagaagctgaagaagacagcaacaggctggatgaccacaattaacggcaaggagctgaaggtggagggccagattacctactacaacagatacaagagacagaacgtagtcaaggacctgtccgtcgagctggatagactgagcgaagaatctgtgaacaacgacatctcctcctggacaaagggcagaagcggagaagctctgagcctcctgaagaaaagattctcccatagacccgtgcaggagaagttcgtgtgcctgaactgcggcttcgagacacacgcagccgagcaagccgccctgaacatcgccagatcctggctgttcctgcggagccaggagtacaagaaataccagacaaacaagacaaccggcaacaccgataagagagccttcgtcgagacctggcagtccttttaccggaagaagcttaaggaggtgtggaaacctgccgtgcggtctggcggatctggcggaggctcctgaggagctgcccgtggtgttcgaggacgtggccgtgtacttcaccagggaggagtggggcatgctggtgaagaggcagaaggagctgtacagggacgtgatgaggatgaactacgagctgctggccagcctgggccccgccgccgccaagcccgacctgatcagcaagctggagaggagggccgccccctggatcaaggaccccaacggccccaagtggggcaagggcaggccccccggcaagggatctggctccggcagcggccccaagaaaaagagaaaagtctaagctgccttctgcggggcttgccttctggccatgcccttcttctctcccttgcacctgtacctcttggtctttgaataaagcctgagtaggaaggctagcaaaaaaaaaaaaaaaaaaaaaaaaaaaaaaaaaaaaaaaaaaaaaaaaaaaaaaaaaaaaaaaaaaaaaaaaaaaaaaaa

SEQ ID NO: 15596 - RNA, 9485 nt, synthetic construct
  source 1..9485: mol_type = other RNA
aggaaataagagagaaaagaagagtaagaagaaatataagagccaccatggcccctaagaagaagcgtaaagtgagccggatggaacgcctcgtctacgaggtgcggcagaagtgcagaaacatcgaggacatctgcatctcctgcggatctctgaacgtgaccctggagcacccactgttcatcggcggcatgtgccagaactgtaaaaactgttttctggagtgtgcctatcaatacgacgatgacggctaccagagctactgcaccatctgttgcggcggaagagaggtgctgatgtgtggaaataacaactgctgccggtgcttctgcgtggaatgcgtggacctgctggtgggccccggcgccgcccaggccgctattaaggaagatccttggaactgctacatgtgcggccacaagggcacatacggcctgctgagacggagagaggactggcctagcagactgcagatgttcttcgccaataaccacgaccaggagttcgacccccctaaggtgtaccctcccgtccccgccgagaagagaaagcccatccgggtcctgagcctgttcgatggcatcgccaccggtctgctggtgctgaaggacctgggcatccaggtggataggtacattgcctccgaggtgtgcgaggactccatcaccgtgggaatggtgcgtcatcagggcaagatcatgtacgtgggcgacgtgcggagcgtgacacagaagcatatccaggagtggggccctttcgacctggtgatcggcggcagcccttgcaatgacctgagcatcgtgaacccagcccggaagggcctgtacgagggaaccggcagactgttcttcgagttttacagactgctgcacgacgcccggcctaaggaaggcgacgaccggcccttcttttggctgttcgagaatgtggtggccatgggagtcagcgacaagcgggatattagccggttcctggagagcaaccccgtgatgatcgatgccaaggaagtgagcgccgcccaccgggccagatacttctggggcaatctgcctggcatgaacagacccctggccagcaccgtgaacgacaagctggagctgcaggagtgcctggagcacggccggatcgccaagttcagcaaggtgagaaccatcaccacccgaagcaacagcatcaaacaaggcaaggaccagcactttcctgtgttcatgaacgagaaggaggacatcctgtggtgtaccgagatggagagagtgttcgggttcccagtccactacacagatgtcagcaacatgtctagactggccagacagagactgctgggaagaagctggtccgtccctgtgatcagacacctgttcgcccctctgaaggagtacttcgcctgcgtgagcagcggcaacagcaacgccaacagccggggccccagcttctctagcggcctggtgccactgtccctgagagggagccacatgggccccatggagatctacaaaaccgtgagcgcctggaagcggcagcctgtgcgcgtgctgagcctgtttcggaatatcgataaagtcctgaaaagcctgggattcctggagagcggctctggctccggcggtggcaccctgaagtacgtggaggatgtgacaaacgtggtcagacgggatgtggagaagtggggccccttcgatctggtgtacggcagcacccaacccctgggcagctcttgtgaccggtgccctggctggtacatgtttcagttccaccggatcctgcagtacgccctgccgagacaggagtcccagcggccattcttttggattttcatggacaacttgctgctgaccgaggatgaccaggaaactaccactcggttcctgcagaccgaagccgtgaccctgcaggacgtgagaggccgggactaccagaacgccatgcgggtgtggtccaacatccctggactgaaaagcaagcacgcacctctgacccctaaagaagaggagtacctgcaggcccaggtgcggagcagaagcaagctggacgcccctaaggtggatctgctggtgaagaattgcctcctgcccctgagagagtacttcaagtatttcagccagaatagtctgcccctgggaggcagcggcggcggcgccctggtgacatttgaggacgtcgccgtgcggttcacccaggaggaatgggctctgctggatccttctcagaaaatcctgtaccgggacgtgatgagagagacataccggaatctgacctccgtgggcatcaactgggaatgttgggaccttgaagcctgcttcagaagcctgggaagaaacctgagagtgcaggtggtgaagagaaagtgcgagctgaccaacagcggcccctgcgccgagggcggcccaagcagcggcgcccctcctcccagcggcggcagcccagccggctccccaacctctaccgaggagggcacctctgagtccgccacccccgagagcggccctggcacctccaccgagcccagcgagggcagcgcacccggcagccctgccggcagccccacctccacagaggagggaaccagcaccgagcccagcgaaggcagcgccccaggcaccagcaccgagcctagtgagcaggagattaaacggatcaacaagatcagaagaagacttgtgaaagacagcaacaccaagaaggccggcaagacaggccccatgaaaaccctgctggttagagtgatgacacccgatctgagagagcggctggaaaacctgagaaagaagcctgaaaatatcccccagcccatcagcaatacatctagagccaacctgaataagctgctgaccgattacaccgaaatgaagaaggcgatcctgcatgtgtactgggaagagttccagaaggaccctgtgggcctgatgagccgggtggcccagcctgccagcaagaagatcgatcagaacaagctgaaacctgagatggacgagaagggcaacctgaccaccgccggctttgcctgctctcagtgtggccagcccctgttcgtgtacaagctggagcaggtgtctgagaagggcaaggcttacaccaactacttcggacggtgcaatgtggccgagcacgaaaagctgatcctgctggcccagctgaagcccgagaaggatagcgacgaagccgtgacatatagcctgggaaagtttgggcagagggccctggatttctacagcattcatgtgaccaaggagtccacccaccccgtgaagcccctggcccagatcgccggaaacagatacgcctccggacctgtgggaaaggccctgagcgacgcatgtatgggcacaatcgcctccttcctgtctaagtaccaggacatcatcatcgaacaccagaaggtggtgaagggcaaccagaagagactggagagcctgcgggagctggccggcaaggaaaacctggaataccctagcgtgaccctgccacctcagcctcacaccaaggagggcgttgatgcctacaacgaagtgatcgcccgggtgcgaatgtgggtgaacctgaacctgtggcagaagctgaagctaagcagagatgatgccaagcctctgctgagactgaagggattcccttcctttcctctggtcgagagacaggccaacgaagtggactggtgggacatggtgtgtaacgtgaagaagctgatcaacgagaaaaaggaggatggcaaggtgttttggcagaatctggctggctacaagagacaggaagccctgagaccatacctgagcagcgaggaagatcggaagaagggaaagaaattcgctcggtaccagctgggcgacctgctgctgcacctggaaaagaagcacggcgaggactggggaaaggtgtacgacgaggcctgggagcggattgacaagaaagtggaaggcctgagcaagcacatcaagctggaagaggaacggagaagcgaggacgcccagagcaaggccgccctgaccgactggctgcgggctaaggccagcttcgtgatcgagggcctgaaggaggccgacaaggacgagttctgcagatgcgagctgaagctgcagaagtggtacggggacctgcggggaaagcccttcgccatcgaagccgagaacagcatcctggacatcagcggcttcagcaagcagtacaactgtgccttcatctggcagaaggacggcgtgaagaagctgaacctgtacctgatcatcaactacttcaagggcggcaagctgcggttcaagaagatcaaacctgaagccttcgaagccaacagattctacaccgtgatcaacaaaaagagcggcgagatcgtgcccatggaggtgaacttcaacttcgacgaccccaacctgatcatcctgcctctggcctttggcaagagacagggcagagaattcatctggaacgacctgctgtccctggaaaccggcagcctgaagctggccaacggaagagtgatcgagaagacactgtacaacagaagaacccggcaggatgagcctgccctgttcgtggccctgaccttcgagcggcgggaggtcctggactcctccaatatcaaaccaatgaacctgatcggcgtggcaagaggcgaaaacatccccgccgtgatcgccctgaccgaccccgagggctgcccactgagccggtttaaggatagcctgggaaacccaacccacatcctgagaatcggcgagagctataaggagaagcagcggaccatccaggccaagaaggaggtggagcagcggagagccggcggctacagccggaagtacgccagcaaagccaagaatctggcagacgatatggtgagaaacaccgctagagatctgctgtactacgccgtgacccaggatgccatgctgatcttcgccaacctgagccggggcttcggccggcagggcaagcggaccttcatggccgagagacagtacacacggatggaggactggctgaccgccaagctggcctacgagggcctgagcaagacctacctgtccaagacactggcccagtacacctccaagacatgcagcaactgtgggtttaccatcaccagcgccgactacgacagggtgctggagaagctgaagaagacagcaacaggctggatgaccacaattaacggcaaggagctgaaggtggagggccagattacctactacaacagatacaagagacagaacgtagtcaaggacctgtccgtcgagctggatagactgagcgaagaatctgtgaacaacgacatctcctcctggacaaagggcagaagcggagaagctctgagcctcctgaagaaaagattctcccatagacccgtgcaggagaagttcgtgtgcctgaactgcggcttcgagacacacgcagccgagcaagccgccctgaacatcgccagatcctggctgttcctgcggagccaggagtacaagaaataccagacaaacaagacaaccggcaacaccgataagagagccttcgtcgagacctggcagtccttttaccggaagaagcttaaggaggtgtggaaacctgccgtgcggtctggcggatctggcggaggctccgcccaggagagcgtgatgttcagcgacgtgagcatcgacttcagccaggaggagtgggagtgcctgaacgacgaccagagggacctgtacagggacgtgatgctggagaactacagccacctggtgagcatgggccacagcgtgagcaagcccgacgtgatcagcttcctggagcagggcaaggagccctggctggtggacagggagctgaccagggaccactggcccgtgctggagagcaggggcggcccaagcagcggcgcccctcctcccagcggcggcagcccagccggctccccaacctctaccgaggagggcacctctgagtccgccacccccgagagcggccctggcacctccaccgagcccagcgagggcagcgcacccggcagccctgccggcagccccacctccacagaggagggaaccagcaccgagcccagcgaaggcagcgccccaggcaccagcaccgagcctagtgagcaggagattaaacggatcaacaagatcagaagaagacttgtgaaagacagcaacaccaagaaggccggcaagacaggccccatgaaaaccctgctggttagagtgatgacacccgatctgagagagcggctggaaaacctgagaaagaagcctgaaaatatcccccagcccatcagcaatacatctagagccaacctgaataagctgctgaccgattacaccgaaatgaagaaggcgatcctgcatgtgtactgggaagagttccagaaggaccctgtgggcctgatgagccgggtggcccagcctgccagcaagaagatcgatcagaacaagctgaaacctgagatggacgagaagggcaacctgaccaccgccggctttgcctgctctcagtgtggccagcccctgttcgtgtacaagctggagcaggtgtctgagaagggcaaggcttacaccaactacttcggacggtgcaatgtggccgagcacgaaaagctgatcctgctggcccagctgaagcccgagaaggatagcgacgaagccgtgacatatagcctgggaaagtttgggcagagggccctggatttctacagcattcatgtgaccaaggagtccacccaccccgtgaagcccctggcccagatcgccggaaacagatacgcctccggacctgtgggaaaggccctgagcgacgcatgtatgggcacaatcgcctccttcctgtctaagtaccaggacatcatcatcgaacaccagaaggtggtgaagggcaaccagaagagactggagagcctgcgggagctggccggcaaggaaaacctggaataccctagcgtgaccctgccacctcagcctcacaccaaggagggcgttgatgcctacaacgaagtgatcgcccgggtgcgaatgtgggtgaacctgaacctgtggcagaagctgaagctaagcagagatgatgccaagcctctgctgagactgaagggattcccttcctttcctctggtcgagagacaggccaacgaagtggactggtgggacatggtgtgtaacgtgaagaagctgatcaacgagaaaaaggaggatggcaaggtgttttggcagaatctggctggctacaagagacaggaagccctgagaccatacctgagcagcgaggaagatcggaagaagggaaagaaattcgctcggtaccagctgggcgacctgctgctgcacctggaaaagaagcacggcgaggactggggaaaggtgtacgacgaggcctgggagcggattgacaagaaagtggaaggcctgagcaagcacatcaagctggaagaggaacggagaagcgaggacgcccagagcaaggccgccctgaccgactggctgcgggctaaggccagcttcgtgatcgagggcctgaaggaggccgacaaggacgagttctgcagatgcgagctgaagctgcagaagtggtacggggacctgcggggaaagcccttcgccatcgaagccgagaacagcatcctggacatcagcggcttcagcaagcagtacaactgtgccttcatctggcagaaggacggcgtgaagaagctgaacctgtacctgatcatcaactacttcaagggcggcaagctgcggttcaagaagatcaaacctgaagccttcgaagccaacagattctacaccgtgatcaacaaaaagagcggcgagatcgtgcccatggaggtgaacttcaacttcgacgaccccaacctgatcatcctgcctctggcctttggcaagagacagggcagagaattcatctggaacgacctgctgtccctggaaaccggcagcctgaagctggccaacggaagagtgatcgagaagacactgtacaacagaagaacccggcaggatgagcctgccctgttcgtggccctgaccttcgagcggcgggaggtcctggactcctccaatatcaaaccaatgaacctgatcggcgtggcaagaggcgaaaacatccccgccgtgatcgccctgaccgaccccgagggctgcccactgagccggtttaaggatagcctgggaaacccaacccacatcctgagaatcggcgagagctataaggagaagcagcggaccatccaggccaagaaggaggtggagcagcggagagccggcggctacagccggaagtacgccagcaaagccaagaatctggcagacgatatggtgagaaacaccgctagagatctgctgtactacgccgtgacccaggatgccatgctgatcttcgccaacctgagccggggcttcggccggcagggcaagcggaccttcatggccgagagacagtacacacggatggaggactggctgaccgccaagctggcctacgagggcctgagcaagacctacctgtccaagacactggcccagtacacctccaagacatgcagcaactgtgggtttaccatcaccagcgccgactacgacagggtgctggagaagctgaagaagacagcaacaggctggatgaccacaattaacggcaaggagctgaaggtggagggccagattacctactacaacagatacaagagacagaacgtagtcaaggacctgtccgtcgagctggatagactgagcgaagaatctgtgaacaacgacatctcctcctggacaaagggcagaagcggagaagctctgagcctcctgaagaaaagattctcccatagacccgtgcaggagaagttcgtgtgcctgaactgcggcttcgagacacacgcagccgagcaagccgccctgaacatcgccagatcctggctgttcctgcggagccaggagtacaagaaataccagacaaacaagacaaccggcaacaccgataagagagccttcgtcgagacctggcagtccttttaccggaagaagcttaaggaggtgtggaaacctgccgtgcggtctggcggatctggcggaggctcctgcccaggagagcgtgatgttcagcgacgtgagcatcgacttcagccaggaggagtgggagtgcctgaacgacgaccagagggacctgtacagggacgtgatgctggagaactacagccacctggtgagcatgggccacagcgtgagcaagcccgacgtgatcagcttcctggagcagggcaaggagccctggctggtggacagggagctgaccagggaccactggcccgtgctggagagcaggggatctggctccggcagcggccccaagaaaaagagaaaagtctaagctgccttctgcggggcttgccttctggccatgcccttcttctctcccttgcacctgtacctcttggtctttgaataaagcctgagtaggaaggctagcaaaaaaaaaaaaaaaaaaaaaaaaaaaaaaaaaaaaaaaaaaaaaaaaaaaaaaaaaaaaaaaaaaaaaaaaaaaaaaaa

SEQ ID NO: 15597 - RNA, 9485 nt, synthetic construct
  source 1..9485: mol_type = other RNA
aggaaataagagagaaaagaagagtaagaagaaatataagagccaccatggcccctaagaagaagcgtaaagtgagccggatggaacgcctcgtctacgaggtgcggcagaagtgcagaaacatcgaggacatctgcatctcctgcggatctctgaacgtgaccctggagcacccactgttcatcggcggcatgtgccagaactgtaaaaactgttttctggagtgtgcctatcaatacgacgatgacggctaccagagctactgcaccatctgttgcggcggaagagaggtgctgatgtgtggaaataacaactgctgccggtgcttctgcgtggaatgcgtggacctgctggtgggccccggcgccgcccaggccgctattaaggaagatccttggaactgctacatgtgcggccacaagggcacatacggcctgctgagacggagagaggactggcctagcagactgcagatgttcttcgccaataaccacgaccaggagttcgacccccctaaggtgtaccctcccgtccccgccgagaagagaaagcccatccgggtcctgagcctgttcgatggcatcgccaccggtctgctggtgctgaaggacctgggcatccaggtggataggtacattgcctccgaggtgtgcgaggactccatcaccgtgggaatggtgcgtcatcagggcaagatcatgtacgtgggcgacgtgcggagcgtgacacagaagcatatccaggagtggggccctttcgacctggtgatcggcggcagcccttgcaatgacctgagcatcgtgaacccagcccggaagggcctgtacgagggaaccggcagactgttcttcgagttttacagactgctgcacgacgcccggcctaaggaaggcgacgaccggcccttcttttggctgttcgagaatgtggtggccatgggagtcagcgacaagcgggatattagccggttcctggagagcaaccccgtgatgatcgatgccaaggaagtgagcgccgcccaccgggccagatacttctggggcaatctgcctggcatgaacagacccctggccagcaccgtgaacgacaagctggagctgcaggagtgcctggagcacggccggatcgccaagttcagcaaggtgagaaccatcaccacccgaagcaacagcatcaaacaaggcaaggaccagcactttcctgtgttcatgaacgagaaggaggacatcctgtggtgtaccgagatggagagagtgttcgggttcccagtccactacacagatgtcagcaacatgtctagactggccagacagagactgctgggaagaagctggtccgtccctgtgatcagacacctgttcgcccctctgaaggagtacttcgcctgcgtgagcagcggcaacagcaacgccaacagccggggccccagcttctctagcggcctggtgccactgtccctgagagggagccacatgggccccatggagatctacaaaaccgtgagcgcctggaagcggcagcctgtgcgcgtgctgagcctgtttcggaatatcgataaagtcctgaaaagcctgggattcctggagagcggctctggctccggcggtggcaccctgaagtacgtggaggatgtgacaaacgtggtcagacgggatgtggagaagtggggccccttcgatctggtgtacggcagcacccaacccctgggcagctcttgtgaccggtgccctggctggtacatgtttcagttccaccggatcctgcagtacgccctgccgagacaggagtcccagcggccattcttttggattttcatggacaacttgctgctgaccgaggatgaccaggaaactaccactcggttcctgcagaccgaagccgtgaccctgcaggacgtgagaggccgggactaccagaacgccatgcgggtgtggtccaacatccctggactgaaaagcaagcacgcacctctgacccctaaagaagaggagtacctgcaggcccaggtgcggagcagaagcaagctggacgcccctaaggtggatctgctggtgaagaattgcctcctgcccctgagagagtacttcaagtatttcagccagaatagtctgcccctgggaggcagcggcggcggcgccctggtgacatttgaggacgtcgccgtgcggttcacccaggaggaatgggctctgctggatccttctcagaaaatcctgtaccgggacgtgatgagagagacataccggaatctgacctccgtgggcatcaactgggaatgttgggaccttgaagcctgcttcagaagcctgggaagaaacctgagagtgcaggtggtgaagagaaagtgcgagctgaccaacagcggcccctgcgccgagggcggcccaagcagcggcgcccctcctcccagcggcggcagcccagccggctccccaacctctaccgaggagggcacctctgagtccgccacccccgagagcggccctggcacctccaccgagcccagcgagggcagcgcacccggcagccctgccggcagccccacctccacagaggagggaaccagcaccgagcccagcgaaggcagcgccccaggcaccagcaccgagcctagtgagcaggagattaaacggatcaacaagatcagaagaagacttgtgaaagacagcaacaccaagaaggccggcaagacaggccccatgaaaaccctgctggttagagtgatgacacccgatctgagagagcggctggaaaacctgagaaagaagcctgaaaatatcccccagcccatcagcaatacatctagagccaacctgaataagctgctgaccgattacaccgaaatgaagaaggcgatcctgcatgtgtactgggaagagttccagaaggaccctgtgggcctgatgagccgggtggcccagcctgccagcaagaagatcgatcagaacaagctgaaacctgagatggacgagaagggcaacctgaccaccgccggctttgcctgctctcagtgtggccagcccctgttcgtgtacaagctggagcaggtgtctgagaagggcaaggcttacaccaactacttcggacggtgcaatgtggccgagcacgaaaagctgatcctgctggcccagctgaagcccgagaaggatagcgacgaagccgtgacatatagcctgggaaagtttgggcagagggccctggatttctacagcattcatgtgaccaaggagtccacccaccccgtgaagcccctggcccagatcgccggaaacagatacgcctccggacctgtgggaaaggccctgagcgacgcatgtatgggcacaatcgcctccttcctgtctaagtaccaggacatcatcatcgaacaccagaaggtggtgaagggcaaccagaagagactggagagcctgcgggagctggccggcaaggaaaacctggaataccctagcgtgaccctgccacctcagcctcacaccaaggagggcgttgatgcctacaacgaagtgatcgcccgggtgcgaatgtgggtgaacctgaacctgtggcagaagctgaagctaagcagagatgatgccaagcctctgctgagactgaagggattcccttcctttcctctggtcgagagacaggccaacgaagtggactggtgggacatggtgtgtaacgtgaagaagctgatcaacgagaaaaaggaggatggcaaggtgttttggcagaatctggctggctacaagagacaggaagccctgagaccatacctgagcagcgaggaagatcggaagaagggaaagaaattcgctcggtaccagctgggcgacctgctgctgcacctggaaaagaagcacggcgaggactggggaaaggtgtacgacgaggcctgggagcggattgacaagaaagtggaaggcctgagcaagcacatcaagctggaagaggaacggagaagcgaggacgcccagagcaaggccgccctgaccgactggctgcgggctaaggccagcttcgtgatcgagggcctgaaggaggccgacaaggacgagttctgcagatgcgagctgaagctgcagaagtggtacggggacctgcggggaaagcccttcgccatcgaagccgagaacagcatcctggacatcagcggcttcagcaagcagtacaactgtgccttcatctggcagaaggacggcgtgaagaagctgaacctgtacctgatcatcaactacttcaagggcggcaagctgcggttcaagaagatcaaacctgaagccttcgaagccaacagattctacaccgtgatcaacaaaaagagcggcgagatcgtgcccatggaggtgaacttcaacttcgacgaccccaacctgatcatcctgcctctggcctttggcaagagacagggcagagaattcatctggaacgacctgctgtccctggaaaccggcagcctgaagctggccaacggaagagtgatcgagaagacactgtacaacagaagaacccggcaggatgagcctgccctgttcgtggccctgaccttcgagcggcgggaggtcctggactcctccaatatcaaaccaatgaacctgatcggcgtggcaagaggcgaaaacatccccgccgtgatcgccctgaccgaccccgagggctgcccactgagccggtttaaggatagcctgggaaacccaacccacatcctgagaatcggcgagagctataaggagaagcagcggaccatccaggccaagaaggaggtggagcagcggagagccggcggctacagccggaagtacgccagcaaagccaagaatctggcagacgatatggtgagaaacaccgctagagatctgctgtactacgccgtgacccaggatgccatgctgatcttcgccaacctgagccggggcttcggccggcagggcaagcggaccttcatggccgagagacagtacacacggatggaggactggctgaccgccaagctggcctacgagggcctgagcaagacctacctgtccaagacactggcccagtacacctccaagacatgcagcaactgtgggtttaccatcaccagcgccgactacgacagggtgctggagaagctgaagaagacagcaacaggctggatgaccacaattaacggcaaggagctgaaggtggagggccagattacctactacaacagatacaagagacagaacgtagtcaaggacctgtccgtcgagctggatagactgagcgaagaatctgtgaacaacgacatctcctcctggacaaagggcagaagcggagaagctctgagcctcctgaagaaaagattctcccatagacccgtgcaggagaagttcgtgtgcctgaactgcggcttcgagacacacgcagccgagcaagccgccctgaacatcgccagatcctggctgttcctgcggagccaggagtacaagaaataccagacaaacaagacaaccggcaacaccgataagagagccttcgtcgagacctggcagtccttttaccggaagaagcttaaggaggtgtggaaacctgccgtgcggtctggcggatctggcggaggctccagccaggagagcgtgagcttcgaggacgtggccgtgtacttcacccagaaccagtgggccagcctggccagcgcccagaggaccctgtacagggaggtgatgctggagaactacgccaacgtgaccagcctggccgccttccccttccccaagcccgacctgatcttccagctggagaggggcgaggcccccggcggcctggacccctggaccagcatcaggagggaggtgaggggcgtgtgcggcggcccaagcagcggcgcccctcctcccagcggcggcagcccagccggctccccaacctctaccgaggagggcacctctgagtccgccacccccgagagcggccctggcacctccaccgagcccagcgagggcagcgcacccggcagccctgccggcagccccacctccacagaggagggaaccagcaccgagcccagcgaaggcagcgccccaggcaccagcaccgagcctagtgagcaggagattaaacggatcaacaagatcagaagaagacttgtgaaagacagcaacaccaagaaggccggcaagacaggccccatgaaaaccctgctggttagagtgatgacacccgatctgagagagcggctggaaaacctgagaaagaagcctgaaaatatcccccagcccatcagcaatacatctagagccaacctgaataagctgctgaccgattacaccgaaatgaagaaggcgatcctgcatgtgtactgggaagagttccagaaggaccctgtgggcctgatgagccgggtggcccagcctgccagcaagaagatcgatcagaacaagctgaaacctgagatggacgagaagggcaacctgaccaccgccggctttgcctgctctcagtgtggccagcccctgttcgtgtacaagctggagcaggtgtctgagaagggcaaggcttacaccaactacttcggacggtgcaatgtggccgagcacgaaaagctgatcctgctggcccagctgaagcccgagaaggatagcgacgaagccgtgacatatagcctgggaaagtttgggcagagggccctggatttctacagcattcatgtgaccaaggagtccacccaccccgtgaagcccctggcccagatcgccggaaacagatacgcctccggacctgtgggaaaggccctgagcgacgcatgtatgggcacaatcgcctccttcctgtctaagtaccaggacatcatcatcgaacaccagaaggtggtgaagggcaaccagaagagactggagagcctgcgggagctggccggcaaggaaaacctggaataccctagcgtgaccctgccacctcagcctcacaccaaggagggcgttgatgcctacaacgaagtgatcgcccgggtgcgaatgtgggtgaacctgaacctgtggcagaagctgaagctaagcagagatgatgccaagcctctgctgagactgaagggattcccttcctttcctctggtcgagagacaggccaacgaagtggactggtgggacatggtgtgtaacgtgaagaagctgatcaacgagaaaaaggaggatggcaaggtgttttggcagaatctggctggctacaagagacaggaagccctgagaccatacctgagcagcgaggaagatcggaagaagggaaagaaattcgctcggtaccagctgggcgacctgctgctgcacctggaaaagaagcacggcgaggactggggaaaggtgtacgacgaggcctgggagcggattgacaagaaagtggaaggcctgagcaagcacatcaagctggaagaggaacggagaagcgaggacgcccagagcaaggccgccctgaccgactggctgcgggctaaggccagcttcgtgatcgagggcctgaaggaggccgacaaggacgagttctgcagatgcgagctgaagctgcagaagtggtacggggacctgcggggaaagcccttcgccatcgaagccgagaacagcatcctggacatcagcggcttcagcaagcagtacaactgtgccttcatctggcagaaggacggcgtgaagaagctgaacctgtacctgatcatcaactacttcaagggcggcaagctgcggttcaagaagatcaaacctgaagccttcgaagccaacagattctacaccgtgatcaacaaaaagagcggcgagatcgtgcccatggaggtgaacttcaacttcgacgaccccaacctgatcatcctgcctctggcctttggcaagagacagggcagagaattcatctggaacgacctgctgtccctggaaaccggcagcctgaagctggccaacggaagagtgatcgagaagacactgtacaacagaagaacccggcaggatgagcctgccctgttcgtggccctgaccttcgagcggcgggaggtcctggactcctccaatatcaaaccaatgaacctgatcggcgtggcaagaggcgaaaacatccccgccgtgatcgccctgaccgaccccgagggctgcccactgagccggtttaaggatagcctgggaaacccaacccacatcctgagaatcggcgagagctataaggagaagcagcggaccatccaggccaagaaggaggtggagcagcggagagccggcggctacagccggaagtacgccagcaaagccaagaatctggcagacgatatggtgagaaacaccgctagagatctgctgtactacgccgtgacccaggatgccatgctgatcttcgccaacctgagccggggcttcggccggcagggcaagcggaccttcatggccgagagacagtacacacggatggaggactggctgaccgccaagctggcctacgagggcctgagcaagacctacctgtccaagacactggcccagtacacctccaagacatgcagcaactgtgggtttaccatcaccagcgccgactacgacagggtgctggagaagctgaagaagacagcaacaggctggatgaccacaattaacggcaaggagctgaaggtggagggccagattacctactacaacagatacaagagacagaacgtagtcaaggacctgtccgtcgagctggatagactgagcgaagaatctgtgaacaacgacatctcctcctggacaaagggcagaagcggagaagctctgagcctcctgaagaaaagattctcccatagacccgtgcaggagaagttcgtgtgcctgaactgcggcttcgagacacacgcagccgagcaagccgccctgaacatcgccagatcctggctgttcctgcggagccaggagtacaagaaataccagacaaacaagacaaccggcaacaccgataagagagccttcgtcgagacctggcagtccttttaccggaagaagcttaaggaggtgtggaaacctgccgtgcggtctggcggatctggcggaggctcctagccaggagagcgtgagcttcgaggacgtggccgtgtacttcacccagaaccagtgggccagcctggccagcgcccagaggaccctgtacagggaggtgatgctggagaactacgccaacgtgaccagcctggccgccttccccttccccaagcccgacctgatcttccagctggagaggggcgaggcccccggcggcctggacccctggaccagcatcaggagggaggtgaggggcgtgtgcggatctggctccggcagcggccccaagaaaaagagaaaagtctaagctgccttctgcggggcttgccttctggccatgcccttcttctctcccttgcacctgtacctcttggtctttgaataaagcctgagtaggaaggctagcaaaaaaaaaaaaaaaaaaaaaaaaaaaaaaaaaaaaaaaaaaaaaaaaaaaaaaaaaaaaaaaaaaaaaaaaaaaaaaaa

SEQ ID NO: 15598 - RNA, 9521 nt, synthetic construct
  source 1..9521: mol_type = other RNA
aggaaataagagagaaaagaagagtaagaagaaatataagagccaccatggcccctaagaagaagcgtaaagtgagccggatggaacgcctcgtctacgaggtgcggcagaagtgcagaaacatcgaggacatctgcatctcctgcggatctctgaacgtgaccctggagcacccactgttcatcggcggcatgtgccagaactgtaaaaactgttttctggagtgtgcctatcaatacgacgatgacggctaccagagctactgcaccatctgttgcggcggaagagaggtgctgatgtgtggaaataacaactgctgccggtgcttctgcgtggaatgcgtggacctgctggtgggccccggcgccgcccaggccgctattaaggaagatccttggaactgctacatgtgcggccacaagggcacatacggcctgctgagacggagagaggactggcctagcagactgcagatgttcttcgccaataaccacgaccaggagttcgacccccctaaggtgtaccctcccgtccccgccgagaagagaaagcccatccgggtcctgagcctgttcgatggcatcgccaccggtctgctggtgctgaaggacctgggcatccaggtggataggtacattgcctccgaggtgtgcgaggactccatcaccgtgggaatggtgcgtcatcagggcaagatcatgtacgtgggcgacgtgcggagcgtgacacagaagcatatccaggagtggggccctttcgacctggtgatcggcggcagcccttgcaatgacctgagcatcgtgaacccagcccggaagggcctgtacgagggaaccggcagactgttcttcgagttttacagactgctgcacgacgcccggcctaaggaaggcgacgaccggcccttcttttggctgttcgagaatgtggtggccatgggagtcagcgacaagcgggatattagccggttcctggagagcaaccccgtgatgatcgatgccaaggaagtgagcgccgcccaccgggccagatacttctggggcaatctgcctggcatgaacagacccctggccagcaccgtgaacgacaagctggagctgcaggagtgcctggagcacggccggatcgccaagttcagcaaggtgagaaccatcaccacccgaagcaacagcatcaaacaaggcaaggaccagcactttcctgtgttcatgaacgagaaggaggacatcctgtggtgtaccgagatggagagagtgttcgggttcccagtccactacacagatgtcagcaacatgtctagactggccagacagagactgctgggaagaagctggtccgtccctgtgatcagacacctgttcgcccctctgaaggagtacttcgcctgcgtgagcagcggcaacagcaacgccaacagccggggccccagcttctctagcggcctggtgccactgtccctgagagggagccacatgggccccatggagatctacaaaaccgtgagcgcctggaagcggcagcctgtgcgcgtgctgagcctgtttcggaatatcgataaagtcctgaaaagcctgggattcctggagagcggctctggctccggcggtggcaccctgaagtacgtggaggatgtgacaaacgtggtcagacgggatgtggagaagtggggccccttcgatctggtgtacggcagcacccaacccctgggcagctcttgtgaccggtgccctggctggtacatgtttcagttccaccggatcctgcagtacgccctgccgagacaggagtcccagcggccattcttttggattttcatggacaacttgctgctgaccgaggatgaccaggaaactaccactcggttcctgcagaccgaagccgtgaccctgcaggacgtgagaggccgggactaccagaacgccatgcgggtgtggtccaacatccctggactgaaaagcaagcacgcacctctgacccctaaagaagaggagtacctgcaggcccaggtgcggagcagaagcaagctggacgcccctaaggtggatctgctggtgaagaattgcctcctgcccctgagagagtacttcaagtatttcagccagaatagtctgcccctgggaggcagcggcggcggcgccctggtgacatttgaggacgtcgccgtgcggttcacccaggaggaatgggctctgctggatccttctcagaaaatcctgtaccgggacgtgatgagagagacataccggaatctgacctccgtgggcatcaactgggaatgttgggaccttgaagcctgcttcagaagcctgggaagaaacctgagagtgcaggtggtgaagagaaagtgcgagctgaccaacagcggcccctgcgccgagggcggcccaagcagcggcgcccctcctcccagcggcggcagcccagccggctccccaacctctaccgaggagggcacctctgagtccgccacccccgagagcggccctggcacctccaccgagcccagcgagggcagcgcacccggcagccctgccggcagccccacctccacagaggagggaaccagcaccgagcccagcgaaggcagcgccccaggcaccagcaccgagcctagtgagcaggagattaaacggatcaacaagatcagaagaagacttgtgaaagacagcaacaccaagaaggccggcaagacaggccccatgaaaaccctgctggttagagtgatgacacccgatctgagagagcggctggaaaacctgagaaagaagcctgaaaatatcccccagcccatcagcaatacatctagagccaacctgaataagctgctgaccgattacaccgaaatgaagaaggcgatcctgcatgtgtactgggaagagttccagaaggaccctgtgggcctgatgagccgggtggcccagcctgccagcaagaagatcgatcagaacaagctgaaacctgagatggacgagaagggcaacctgaccaccgccggctttgcctgctctcagtgtggccagcccctgttcgtgtacaagctggagcaggtgtctgagaagggcaaggcttacaccaactacttcggacggtgcaatgtggccgagcacgaaaagctgatcctgctggcccagctgaagcccgagaaggatagcgacgaagccgtgacatatagcctgggaaagtttgggcagagggccctggatttctacagcattcatgtgaccaaggagtccacccaccccgtgaagcccctggcccagatcgccggaaacagatacgcctccggacctgtgggaaaggccctgagcgacgcatgtatgggcacaatcgcctccttcctgtctaagtaccaggacatcatcatcgaacaccagaaggtggtgaagggcaaccagaagagactggagagcctgcgggagctggccggcaaggaaaacctggaataccctagcgtgaccctgccacctcagcctcacaccaaggagggcgttgatgcctacaacgaagtgatcgcccgggtgcgaatgtgggtgaacctgaacctgtggcagaagctgaagctaagcagagatgatgccaagcctctgctgagactgaagggattcccttcctttcctctggtcgagagacaggccaacgaagtggactggtgggacatggtgtgtaacgtgaagaagctgatcaacgagaaaaaggaggatggcaaggtgttttggcagaatctggctggctacaagagacaggaagccctgagaccatacctgagcagcgaggaagatcggaagaagggaaagaaattcgctcggtaccagctgggcgacctgctgctgcacctggaaaagaagcacggcgaggactggggaaaggtgtacgacgaggcctgggagcggattgacaagaaagtggaaggcctgagcaagcacatcaagctggaagaggaacggagaagcgaggacgcccagagcaaggccgccctgaccgactggctgcgggctaaggccagcttcgtgatcgagggcctgaaggaggccgacaaggacgagttctgcagatgcgagctgaagctgcagaagtggtacggggacctgcggggaaagcccttcgccatcgaagccgagaacagcatcctggacatcagcggcttcagcaagcagtacaactgtgccttcatctggcagaaggacggcgtgaagaagctgaacctgtacctgatcatcaactacttcaagggcggcaagctgcggttcaagaagatcaaacctgaagccttcgaagccaacagattctacaccgtgatcaacaaaaagagcggcgagatcgtgcccatggaggtgaacttcaacttcgacgaccccaacctgatcatcctgcctctggcctttggcaagagacagggcagagaattcatctggaacgacctgctgtccctggaaaccggcagcctgaagctggccaacggaagagtgatcgagaagacactgtacaacagaagaacccggcaggatgagcctgccctgttcgtggccctgaccttcgagcggcgggaggtcctggactcctccaatatcaaaccaatgaacctgatcggcgtggcaagaggcgaaaacatccccgccgtgatcgccctgaccgaccccgagggctgcccactgagccggtttaaggatagcctgggaaacccaacccacatcctgagaatcggcgagagctataaggagaagcagcggaccatccaggccaagaaggaggtggagcagcggagagccggcggctacagccggaagtacgccagcaaagccaagaatctggcagacgatatggtgagaaacaccgctagagatctgctgtactacgccgtgacccaggatgccatgctgatcttcgccaacctgagccggggcttcggccggcagggcaagcggaccttcatggccgagagacagtacacacggatggaggactggctgaccgccaagctggcctacgagggcctgagcaagacctacctgtccaagacactggcccagtacacctccaagacatgcagcaactgtgggtttaccatcaccagcgccgactacgacagggtgctggagaagctgaagaagacagcaacaggctggatgaccacaattaacggcaaggagctgaaggtggagggccagattacctactacaacagatacaagagacagaacgtagtcaaggacctgtccgtcgagctggatagactgagcgaagaatctgtgaacaacgacatctcctcctggacaaagggcagaagcggagaagctctgagcctcctgaagaaaagattctcccatagacccgtgcaggagaagttcgtgtgcctgaactgcggcttcgagacacacgcagccgagcaagccgccctgaacatcgccagatcctggctgttcctgcggagccaggagtacaagaaataccagacaaacaagacaaccggcaacaccgataagagagccttcgtcgagacctggcagtccttttaccggaagaagcttaaggaggtgtggaaacctgccgtgcggtctggcggatctggcggaggctccgtggccttcgaggacgtggccgtgaacttcacccaggaggagtgggccctgctggaccccagccagaagaacctgtacagggaggtgatgcaggagaccctgaggaacctggccagcatcggcaagaagtggaacaaccagtacatcgaggacgagcaccagaaccccaggaggaacctgaggaggctgatcaaggagaggctgagcgagagcaaggagagccaccagcacggcgagttcctgacccaggtgcccgacgacggcggcccaagcagcggcgcccctcctcccagcggcggcagcccagccggctccccaacctctaccgaggagggcacctctgagtccgccacccccgagagcggccctggcacctccaccgagcccagcgagggcagcgcacccggcagccctgccggcagccccacctccacagaggagggaaccagcaccgagcccagcgaaggcagcgccccaggcaccagcaccgagcctagtgagcaggagattaaacggatcaacaagatcagaagaagacttgtgaaagacagcaacaccaagaaggccggcaagacaggccccatgaaaaccctgctggttagagtgatgacacccgatctgagagagcggctggaaaacctgagaaagaagcctgaaaatatcccccagcccatcagcaatacatctagagccaacctgaataagctgctgaccgattacaccgaaatgaagaaggcgatcctgcatgtgtactgggaagagttccagaaggaccctgtgggcctgatgagccgggtggcccagcctgccagcaagaagatcgatcagaacaagctgaaacctgagatggacgagaagggcaacctgaccaccgccggctttgcctgctctcagtgtggccagcccctgttcgtgtacaagctggagcaggtgtctgagaagggcaaggcttacaccaactacttcggacggtgcaatgtggccgagcacgaaaagctgatcctgctggcccagctgaagcccgagaaggatagcgacgaagccgtgacatatagcctgggaaagtttgggcagagggccctggatttctacagcattcatgtgaccaaggagtccacccaccccgtgaagcccctggcccagatcgccggaaacagatacgcctccggacctgtgggaaaggccctgagcgacgcatgtatgggcacaatcgcctccttcctgtctaagtaccaggacatcatcatcgaacaccagaaggtggtgaagggcaaccagaagagactggagagcctgcgggagctggccggcaaggaaaacctggaataccctagcgtgaccctgccacctcagcctcacaccaaggagggcgttgatgcctacaacgaagtgatcgcccgggtgcgaatgtgggtgaacctgaacctgtggcagaagctgaagctaagcagagatgatgccaagcctctgctgagactgaagggattcccttcctttcctctggtcgagagacaggccaacgaagtggactggtgggacatggtgtgtaacgtgaagaagctgatcaacgagaaaaaggaggatggcaaggtgttttggcagaatctggctggctacaagagacaggaagccctgagaccatacctgagcagcgaggaagatcggaagaagggaaagaaattcgctcggtaccagctgggcgacctgctgctgcacctggaaaagaagcacggcgaggactggggaaaggtgtacgacgaggcctgggagcggattgacaagaaagtggaaggcctgagcaagcacatcaagctggaagaggaacggagaagcgaggacgcccagagcaaggccgccctgaccgactggctgcgggctaaggccagcttcgtgatcgagggcctgaaggaggccgacaaggacgagttctgcagatgcgagctgaagctgcagaagtggtacggggacctgcggggaaagcccttcgccatcgaagccgagaacagcatcctggacatcagcggcttcagcaagcagtacaactgtgccttcatctggcagaaggacggcgtgaagaagctgaacctgtacctgatcatcaactacttcaagggcggcaagctgcggttcaagaagatcaaacctgaagccttcgaagccaacagattctacaccgtgatcaacaaaaagagcggcgagatcgtgcccatggaggtgaacttcaacttcgacgaccccaacctgatcatcctgcctctggcctttggcaagagacagggcagagaattcatctggaacgacctgctgtccctggaaaccggcagcctgaagctggccaacggaagagtgatcgagaagacactgtacaacagaagaacccggcaggatgagcctgccctgttcgtggccctgaccttcgagcggcgggaggtcctggactcctccaatatcaaaccaatgaacctgatcggcgtggcaagaggcgaaaacatccccgccgtgatcgccctgaccgaccccgagggctgcccactgagccggtttaaggatagcctgggaaacccaacccacatcctgagaatcggcgagagctataaggagaagcagcggaccatccaggccaagaaggaggtggagcagcggagagccggcggctacagccggaagtacgccagcaaagccaagaatctggcagacgatatggtgagaaacaccgctagagatctgctgtactacgccgtgacccaggatgccatgctgatcttcgccaacctgagccggggcttcggccggcagggcaagcggaccttcatggccgagagacagtacacacggatggaggactggctgaccgccaagctggcctacgagggcctgagcaagacctacctgtccaagacactggcccagtacacctccaagacatgcagcaactgtgggtttaccatcaccagcgccgactacgacagggtgctggagaagctgaagaagacagcaacaggctggatgaccacaattaacggcaaggagctgaaggtggagggccagattacctactacaacagatacaagagacagaacgtagtcaaggacctgtccgtcgagctggatagactgagcgaagaatctgtgaacaacgacatctcctcctggacaaagggcagaagcggagaagctctgagcctcctgaagaaaagattctcccatagacccgtgcaggagaagttcgtgtgcctgaactgcggcttcgagacacacgcagccgagcaagccgccctgaacatcgccagatcctggctgttcctgcggagccaggagtacaagaaataccagacaaacaagacaaccggcaacaccgataagagagccttcgtcgagacctggcagtccttttaccggaagaagcttaaggaggtgtggaaacctgccgtgcggtctggcggatctggcggaggctcctgtggccttcgaggacgtggccgtgaacttcacccaggaggagtgggccctgctggaccccagccagaagaacctgtacagggaggtgatgcaggagaccctgaggaacctggccagcatcggcaagaagtggaacaaccagtacatcgaggacgagcaccagaaccccaggaggaacctgaggaggctgatcaaggagaggctgagcgagagcaaggagagccaccagcacggcgagttcctgacccaggtgcccgacgacggatctggctccggcagcggccccaagaaaaagagaaaagtctaagctgccttctgcggggcttgccttctggccatgcccttcttctctcccttgcacctgtacctcttggtctttgaataaagcctgagtaggaaggctagcaaaaaaaaaaaaaaaaaaaaaaaaaaaaaaaaaaaaaaaaaaaaaaaaaaaaaaaaaaaaaaaaaaaaaaaaaaaaaaaa

SEQ ID NO: 15599 - RNA, 9485 nt, synthetic construct
  source 1..9485: mol_type = other RNA
aggaaataagagagaaaagaagagtaagaagaaatataagagccaccatggcccctaagaagaagcgtaaagtgagccggatggaacgcctcgtctacgaggtgcggcagaagtgcagaaacatcgaggacatctgcatctcctgcggatctctgaacgtgaccctggagcacccactgttcatcggcggcatgtgccagaactgtaaaaactgttttctggagtgtgcctatcaatacgacgatgacggctaccagagctactgcaccatctgttgcggcggaagagaggtgctgatgtgtggaaataacaactgctgccggtgcttctgcgtggaatgcgtggacctgctggtgggccccggcgccgcccaggccgctattaaggaagatccttggaactgctacatgtgcggccacaagggcacatacggcctgctgagacggagagaggactggcctagcagactgcagatgttcttcgccaataaccacgaccaggagttcgacccccctaaggtgtaccctcccgtccccgccgagaagagaaagcccatccgggtcctgagcctgttcgatggcatcgccaccggtctgctggtgctgaaggacctgggcatccaggtggataggtacattgcctccgaggtgtgcgaggactccatcaccgtgggaatggtgcgtcatcagggcaagatcatgtacgtgggcgacgtgcggagcgtgacacagaagcatatccaggagtggggccctttcgacctggtgatcggcggcagcccttgcaatgacctgagcatcgtgaacccagcccggaagggcctgtacgagggaaccggcagactgttcttcgagttttacagactgctgcacgacgcccggcctaaggaaggcgacgaccggcccttcttttggctgttcgagaatgtggtggccatgggagtcagcgacaagcgggatattagccggttcctggagagcaaccccgtgatgatcgatgccaaggaagtgagcgccgcccaccgggccagatacttctggggcaatctgcctggcatgaacagacccctggccagcaccgtgaacgacaagctggagctgcaggagtgcctggagcacggccggatcgccaagttcagcaaggtgagaaccatcaccacccgaagcaacagcatcaaacaaggcaaggaccagcactttcctgtgttcatgaacgagaaggaggacatcctgtggtgtaccgagatggagagagtgttcgggttcccagtccactacacagatgtcagcaacatgtctagactggccagacagagactgctgggaagaagctggtccgtccctgtgatcagacacctgttcgcccctctgaaggagtacttcgcctgcgtgagcagcggcaacagcaacgccaacagccggggccccagcttctctagcggcctggtgccactgtccctgagagggagccacatgggccccatggagatctacaaaaccgtgagcgcctggaagcggcagcctgtgcgcgtgctgagcctgtttcggaatatcgataaagtcctgaaaagcctgggattcctggagagcggctctggctccggcggtggcaccctgaagtacgtggaggatgtgacaaacgtggtcagacgggatgtggagaagtggggccccttcgatctggtgtacggcagcacccaacccctgggcagctcttgtgaccggtgccctggctggtacatgtttcagttccaccggatcctgcagtacgccctgccgagacaggagtcccagcggccattcttttggattttcatggacaacttgctgctgaccgaggatgaccaggaaactaccactcggttcctgcagaccgaagccgtgaccctgcaggacgtgagaggccgggactaccagaacgccatgcgggtgtggtccaacatccctggactgaaaagcaagcacgcacctctgacccctaaagaagaggagtacctgcaggcccaggtgcggagcagaagcaagctggacgcccctaaggtggatctgctggtgaagaattgcctcctgcccctgagagagtacttcaagtatttcagccagaatagtctgcccctgggaggcagcggcggcggcgccctggtgacatttgaggacgtcgccgtgcggttcacccaggaggaatgggctctgctggatccttctcagaaaatcctgtaccgggacgtgatgagagagacataccggaatctgacctccgtgggcatcaactgggaatgttgggaccttgaagcctgcttcagaagcctgggaagaaacctgagagtgcaggtggtgaagagaaagtgcgagctgaccaacagcggcccctgcgccgagggcggcccaagcagcggcgcccctcctcccagcggcggcagcccagccggctccccaacctctaccgaggagggcacctctgagtccgccacccccgagagcggccctggcacctccaccgagcccagcgagggcagcgcacccggcagccctgccggcagccccacctccacagaggagggaaccagcaccgagcccagcgaaggcagcgccccaggcaccagcaccgagcctagtgagcaggagattaaacggatcaacaagatcagaagaagacttgtgaaagacagcaacaccaagaaggccggcaagacaggccccatgaaaaccctgctggttagagtgatgacacccgatctgagagagcggctggaaaacctgagaaagaagcctgaaaatatcccccagcccatcagcaatacatctagagccaacctgaataagctgctgaccgattacaccgaaatgaagaaggcgatcctgcatgtgtactgggaagagttccagaaggaccctgtgggcctgatgagccgggtggcccagcctgccagcaagaagatcgatcagaacaagctgaaacctgagatggacgagaagggcaacctgaccaccgccggctttgcctgctctcagtgtggccagcccctgttcgtgtacaagctggagcaggtgtctgagaagggcaaggcttacaccaactacttcggacggtgcaatgtggccgagcacgaaaagctgatcctgctggcccagctgaagcccgagaaggatagcgacgaagccgtgacatatagcctgggaaagtttgggcagagggccctggatttctacagcattcatgtgaccaaggagtccacccaccccgtgaagcccctggcccagatcgccggaaacagatacgcctccggacctgtgggaaaggccctgagcgacgcatgtatgggcacaatcgcctccttcctgtctaagtaccaggacatcatcatcgaacaccagaaggtggtgaagggcaaccagaagagactggagagcctgcgggagctggccggcaaggaaaacctggaataccctagcgtgaccctgccacctcagcctcacaccaaggagggcgttgatgcctacaacgaagtgatcgcccgggtgcgaatgtgggtgaacctgaacctgtggcagaagctgaagctaagcagagatgatgccaagcctctgctgagactgaagggattcccttcctttcctctggtcgagagacaggccaacgaagtggactggtgggacatggtgtgtaacgtgaagaagctgatcaacgagaaaaaggaggatggcaaggtgttttggcagaatctggctggctacaagagacaggaagccctgagaccatacctgagcagcgaggaagatcggaagaagggaaagaaattcgctcggtaccagctgggcgacctgctgctgcacctggaaaagaagcacggcgaggactggggaaaggtgtacgacgaggcctgggagcggattgacaagaaagtggaaggcctgagcaagcacatcaagctggaagaggaacggagaagcgaggacgcccagagcaaggccgccctgaccgactggctgcgggctaaggccagcttcgtgatcgagggcctgaaggaggccgacaaggacgagttctgcagatgcgagctgaagctgcagaagtggtacggggacctgcggggaaagcccttcgccatcgaagccgagaacagcatcctggacatcagcggcttcagcaagcagtacaactgtgccttcatctggcagaaggacggcgtgaagaagctgaacctgtacctgatcatcaactacttcaagggcggcaagctgcggttcaagaagatcaaacctgaagccttcgaagccaacagattctacaccgtgatcaacaaaaagagcggcgagatcgtgcccatggaggtgaacttcaacttcgacgaccccaacctgatcatcctgcctctggcctttggcaagagacagggcagagaattcatctggaacgacctgctgtccctggaaaccggcagcctgaagctggccaacggaagagtgatcgagaagacactgtacaacagaagaacccggcaggatgagcctgccctgttcgtggccctgaccttcgagcggcgggaggtcctggactcctccaatatcaaaccaatgaacctgatcggcgtggcaagaggcgaaaacatccccgccgtgatcgccctgaccgaccccgagggctgcccactgagccggtttaaggatagcctgggaaacccaacccacatcctgagaatcggcgagagctataaggagaagcagcggaccatccaggccaagaaggaggtggagcagcggagagccggcggctacagccggaagtacgccagcaaagccaagaatctggcagacgatatggtgagaaacaccgctagagatctgctgtactacgccgtgacccaggatgccatgctgatcttcgccaacctgagccggggcttcggccggcagggcaagcggaccttcatggccgagagacagtacacacggatggaggactggctgaccgccaagctggcctacgagggcctgagcaagacctacctgtccaagacactggcccagtacacctccaagacatgcagcaactgtgggtttaccatcaccagcgccgactacgacagggtgctggagaagctgaagaagacagcaacaggctggatgaccacaattaacggcaaggagctgaaggtggagggccagattacctactacaacagatacaagagacagaacgtagtcaaggacctgtccgtcgagctggatagactgagcgaagaatctgtgaacaacgacatctcctcctggacaaagggcagaagcggagaagctctgagcctcctgaagaaaagattctcccatagacccgtgcaggagaagttcgtgtgcctgaactgcggcttcgagacacacgcagccgagcaagccgccctgaacatcgccagatcctggctgttcctgcggagccaggagtacaagaaataccagacaaacaagacaaccggcaacaccgataagagagccttcgtcgagacctggcagtccttttaccggaagaagcttaaggaggtgtggaaacctgccgtgcggtctggcggatctggcggaggctccctgctgaccttcgaggacgtggccgtgagcttcagcgaggaggagtgggagctgctggaccccccccagaagaccctgtacaacgacgtgatgcaggagaactacgagaccgtgatcagcctgggcctgaagctgaagaacgacaccggcaacgaccagcccatcagcatcagcgccctggagatgcaggccagcggcagcaaggtgctgaggaaggccaggatgaaggtggcccagaagaccggcggcccaagcagcggcgcccctcctcccagcggcggcagcccagccggctccccaacctctaccgaggagggcacctctgagtccgccacccccgagagcggccctggcacctccaccgagcccagcgagggcagcgcacccggcagccctgccggcagccccacctccacagaggagggaaccagcaccgagcccagcgaaggcagcgccccaggcaccagcaccgagcctagtgagcaggagattaaacggatcaacaagatcagaagaagacttgtgaaagacagcaacaccaagaaggccggcaagacaggccccatgaaaaccctgctggttagagtgatgacacccgatctgagagagcggctggaaaacctgagaaagaagcctgaaaatatcccccagcccatcagcaatacatctagagccaacctgaataagctgctgaccgattacaccgaaatgaagaaggcgatcctgcatgtgtactgggaagagttccagaaggaccctgtgggcctgatgagccgggtggcccagcctgccagcaagaagatcgatcagaacaagctgaaacctgagatggacgagaagggcaacctgaccaccgccggctttgcctgctctcagtgtggccagcccctgttcgtgtacaagctggagcaggtgtctgagaagggcaaggcttacaccaactacttcggacggtgcaatgtggccgagcacgaaaagctgatcctgctggcccagctgaagcccgagaaggatagcgacgaagccgtgacatatagcctgggaaagtttgggcagagggccctggatttctacagcattcatgtgaccaaggagtccacccaccccgtgaagcccctggcccagatcgccggaaacagatacgcctccggacctgtgggaaaggccctgagcgacgcatgtatgggcacaatcgcctccttcctgtctaagtaccaggacatcatcatcgaacaccagaaggtggtgaagggcaaccagaagagactggagagcctgcgggagctggccggcaaggaaaacctggaataccctagcgtgaccctgccacctcagcctcacaccaaggagggcgttgatgcctacaacgaagtgatcgcccgggtgcgaatgtgggtgaacctgaacctgtggcagaagctgaagctaagcagagatgatgccaagcctctgctgagactgaagggattcccttcctttcctctggtcgagagacaggccaacgaagtggactggtgggacatggtgtgtaacgtgaagaagctgatcaacgagaaaaaggaggatggcaaggtgttttggcagaatctggctggctacaagagacaggaagccctgagaccatacctgagcagcgaggaagatcggaagaagggaaagaaattcgctcggtaccagctgggcgacctgctgctgcacctggaaaagaagcacggcgaggactggggaaaggtgtacgacgaggcctgggagcggattgacaagaaagtggaaggcctgagcaagcacatcaagctggaagaggaacggagaagcgaggacgcccagagcaaggccgccctgaccgactggctgcgggctaaggccagcttcgtgatcgagggcctgaaggaggccgacaaggacgagttctgcagatgcgagctgaagctgcagaagtggtacggggacctgcggggaaagcccttcgccatcgaagccgagaacagcatcctggacatcagcggcttcagcaagcagtacaactgtgccttcatctggcagaaggacggcgtgaagaagctgaacctgtacctgatcatcaactacttcaagggcggcaagctgcggttcaagaagatcaaacctgaagccttcgaagccaacagattctacaccgtgatcaacaaaaagagcggcgagatcgtgcccatggaggtgaacttcaacttcgacgaccccaacctgatcatcctgcctctggcctttggcaagagacagggcagagaattcatctggaacgacctgctgtccctggaaaccggcagcctgaagctggccaacggaagagtgatcgagaagacactgtacaacagaagaacccggcaggatgagcctgccctgttcgtggccctgaccttcgagcggcgggaggtcctggactcctccaatatcaaaccaatgaacctgatcggcgtggcaagaggcgaaaacatccccgccgtgatcgccctgaccgaccccgagggctgcccactgagccggtttaaggatagcctgggaaacccaacccacatcctgagaatcggcgagagctataaggagaagcagcggaccatccaggccaagaaggaggtggagcagcggagagccggcggctacagccggaagtacgccagcaaagccaagaatctggcagacgatatggtgagaaacaccgctagagatctgctgtactacgccgtgacccaggatgccatgctgatcttcgccaacctgagccggggcttcggccggcagggcaagcggaccttcatggccgagagacagtacacacggatggaggactggctgaccgccaagctggcctacgagggcctgagcaagacctacctgtccaagacactggcccagtacacctccaagacatgcagcaactgtgggtttaccatcaccagcgccgactacgacagggtgctggagaagctgaagaagacagcaacaggctggatgaccacaattaacggcaaggagctgaaggtggagggccagattacctactacaacagatacaagagacagaacgtagtcaaggacctgtccgtcgagctggatagactgagcgaagaatctgtgaacaacgacatctcctcctggacaaagggcagaagcggagaagctctgagcctcctgaagaaaagattctcccatagacccgtgcaggagaagttcgtgtgcctgaactgcggcttcgagacacacgcagccgagcaagccgccctgaacatcgccagatcctggctgttcctgcggagccaggagtacaagaaataccagacaaacaagacaaccggcaacaccgataagagagccttcgtcgagacctggcagtccttttaccggaagaagcttaaggaggtgtggaaacctgccgtgcggtctggcggatctggcggaggctcctctgctgaccttcgaggacgtggccgtgagcttcagcgaggaggagtgggagctgctggaccccccccagaagaccctgtacaacgacgtgatgcaggagaactacgagaccgtgatcagcctgggcctgaagctgaagaacgacaccggcaacgaccagcccatcagcatcagcgccctggagatgcaggccagcggcagcaaggtgctgaggaaggccaggatgaaggtggcccagaagaccggatctggctccggcagcggccccaagaaaaagagaaaagtctaagctgccttctgcggggcttgccttctggccatgcccttcttctctcccttgcacctgtacctcttggtctttgaataaagcctgagtaggaaggctagcaaaaaaaaaaaaaaaaaaaaaaaaaaaaaaaaaaaaaaaaaaaaaaaaaaaaaaaaaaaaaaaaaaaaaaaaaaaaaaaa

SEQ ID NO: 15600 - RNA, 9485 nt, synthetic construct
  source 1..9485: mol_type = other RNA
aggaaataagagagaaaagaagagtaagaagaaatataagagccaccatggcccctaagaagaagcgtaaagtgagccggatggaacgcctcgtctacgaggtgcggcagaagtgcagaaacatcgaggacatctgcatctcctgcggatctctgaacgtgaccctggagcacccactgttcatcggcggcatgtgccagaactgtaaaaactgttttctggagtgtgcctatcaatacgacgatgacggctaccagagctactgcaccatctgttgcggcggaagagaggtgctgatgtgtggaaataacaactgctgccggtgcttctgcgtggaatgcgtggacctgctggtgggccccggcgccgcccaggccgctattaaggaagatccttggaactgctacatgtgcggccacaagggcacatacggcctgctgagacggagagaggactggcctagcagactgcagatgttcttcgccaataaccacgaccaggagttcgacccccctaaggtgtaccctcccgtccccgccgagaagagaaagcccatccgggtcctgagcctgttcgatggcatcgccaccggtctgctggtgctgaaggacctgggcatccaggtggataggtacattgcctccgaggtgtgcgaggactccatcaccgtgggaatggtgcgtcatcagggcaagatcatgtacgtgggcgacgtgcggagcgtgacacagaagcatatccaggagtggggccctttcgacctggtgatcggcggcagcccttgcaatgacctgagcatcgtgaacccagcccggaagggcctgtacgagggaaccggcagactgttcttcgagttttacagactgctgcacgacgcccggcctaaggaaggcgacgaccggcccttcttttggctgttcgagaatgtggtggccatgggagtcagcgacaagcgggatattagccggttcctggagagcaaccccgtgatgatcgatgccaaggaagtgagcgccgcccaccgggccagatacttctggggcaatctgcctggcatgaacagacccctggccagcaccgtgaacgacaagctggagctgcaggagtgcctggagcacggccggatcgccaagttcagcaaggtgagaaccatcaccacccgaagcaacagcatcaaacaaggcaaggaccagcactttcctgtgttcatgaacgagaaggaggacatcctgtggtgtaccgagatggagagagtgttcgggttcccagtccactacacagatgtcagcaacatgtctagactggccagacagagactgctgggaagaagctggtccgtccctgtgatcagacacctgttcgcccctctgaaggagtacttcgcctgcgtgagcagcggcaacagcaacgccaacagccggggccccagcttctctagcggcctggtgccactgtccctgagagggagccacatgggccccatggagatctacaaaaccgtgagcgcctggaagcggcagcctgtgcgcgtgctgagcctgtttcggaatatcgataaagtcctgaaaagcctgggattcctggagagcggctctggctccggcggtggcaccctgaagtacgtggaggatgtgacaaacgtggtcagacgggatgtggagaagtggggccccttcgatctggtgtacggcagcacccaacccctgggcagctcttgtgaccggtgccctggctggtacatgtttcagttccaccggatcctgcagtacgccctgccgagacaggagtcccagcggccattcttttggattttcatggacaacttgctgctgaccgaggatgaccaggaaactaccactcggttcctgcagaccgaagccgtgaccctgcaggacgtgagaggccgggactaccagaacgccatgcgggtgtggtccaacatccctggactgaaaagcaagcacgcacctctgacccctaaagaagaggagtacctgcaggcccaggtgcggagcagaagcaagctggacgcccctaaggtggatctgctggtgaagaattgcctcctgcccctgagagagtacttcaagtatttcagccagaatagtctgcccctgggaggcagcggcggcggcgccctggtgacatttgaggacgtcgccgtgcggttcacccaggaggaatgggctctgctggatccttctcagaaaatcctgtaccgggacgtgatgagagagacataccggaatctgacctccgtgggcatcaactgggaatgttgggaccttgaagcctgcttcagaagcctgggaagaaacctgagagtgcaggtggtgaagagaaagtgcgagctgaccaacagcggcccctgcgccgagggcggcccaagcagcggcgcccctcctcccagcggcggcagcccagccggctccccaacctctaccgaggagggcacctctgagtccgccacccccgagagcggccctggcacctccaccgagcccagcgagggcagcgcacccggcagccctgccggcagccccacctccacagaggagggaaccagcaccgagcccagcgaaggcagcgccccaggcaccagcaccgagcctagtgagcaggagattaaacggatcaacaagatcagaagaagacttgtgaaagacagcaacaccaagaaggccggcaagacaggccccatgaaaaccctgctggttagagtgatgacacccgatctgagagagcggctggaaaacctgagaaagaagcctgaaaatatcccccagcccatcagcaatacatctagagccaacctgaataagctgctgaccgattacaccgaaatgaagaaggcgatcctgcatgtgtactgggaagagttccagaaggaccctgtgggcctgatgagccgggtggcccagcctgccagcaagaagatcgatcagaacaagctgaaacctgagatggacgagaagggcaacctgaccaccgccggctttgcctgctctcagtgtggccagcccctgttcgtgtacaagctggagcaggtgtctgagaagggcaaggcttacaccaactacttcggacggtgcaatgtggccgagcacgaaaagctgatcctgctggcccagctgaagcccgagaaggatagcgacgaagccgtgacatatagcctgggaaagtttgggcagagggccctggatttctacagcattcatgtgaccaaggagtccacccaccccgtgaagcccctggcccagatcgccggaaacagatacgcctccggacctgtgggaaaggccctgagcgacgcatgtatgggcacaatcgcctccttcctgtctaagtaccaggacatcatcatcgaacaccagaaggtggtgaagggcaaccagaagagactggagagcctgcgggagctggccggcaaggaaaacctggaataccctagcgtgaccctgccacctcagcctcacaccaaggagggcgttgatgcctacaacgaagtgatcgcccgggtgcgaatgtgggtgaacctgaacctgtggcagaagctgaagctaagcagagatgatgccaagcctctgctgagactgaagggattcccttcctttcctctggtcgagagacaggccaacgaagtggactggtgggacatggtgtgtaacgtgaagaagctgatcaacgagaaaaaggaggatggcaaggtgttttggcagaatctggctggctacaagagacaggaagccctgagaccatacctgagcagcgaggaagatcggaagaagggaaagaaattcgctcggtaccagctgggcgacctgctgctgcacctggaaaagaagcacggcgaggactggggaaaggtgtacgacgaggcctgggagcggattgacaagaaagtggaaggcctgagcaagcacatcaagctggaagaggaacggagaagcgaggacgcccagagcaaggccgccctgaccgactggctgcgggctaaggccagcttcgtgatcgagggcctgaaggaggccgacaaggacgagttctgcagatgcgagctgaagctgcagaagtggtacggggacctgcggggaaagcccttcgccatcgaagccgagaacagcatcctggacatcagcggcttcagcaagcagtacaactgtgccttcatctggcagaaggacggcgtgaagaagctgaacctgtacctgatcatcaactacttcaagggcggcaagctgcggttcaagaagatcaaacctgaagccttcgaagccaacagattctacaccgtgatcaacaaaaagagcggcgagatcgtgcccatggaggtgaacttcaacttcgacgaccccaacctgatcatcctgcctctggcctttggcaagagacagggcagagaattcatctggaacgacctgctgtccctggaaaccggcagcctgaagctggccaacggaagagtgatcgagaagacactgtacaacagaagaacccggcaggatgagcctgccctgttcgtggccctgaccttcgagcggcgggaggtcctggactcctccaatatcaaaccaatgaacctgatcggcgtggcaagaggcgaaaacatccccgccgtgatcgccctgaccgaccccgagggctgcccactgagccggtttaaggatagcctgggaaacccaacccacatcctgagaatcggcgagagctataaggagaagcagcggaccatccaggccaagaaggaggtggagcagcggagagccggcggctacagccggaagtacgccagcaaagccaagaatctggcagacgatatggtgagaaacaccgctagagatctgctgtactacgccgtgacccaggatgccatgctgatcttcgccaacctgagccggggcttcggccggcagggcaagcggaccttcatggccgagagacagtacacacggatggaggactggctgaccgccaagctggcctacgagggcctgagcaagacctacctgtccaagacactggcccagtacacctccaagacatgcagcaactgtgggtttaccatcaccagcgccgactacgacagggtgctggagaagctgaagaagacagcaacaggctggatgaccacaattaacggcaaggagctgaaggtggagggccagattacctactacaacagatacaagagacagaacgtagtcaaggacctgtccgtcgagctggatagactgagcgaagaatctgtgaacaacgacatctcctcctggacaaagggcagaagcggagaagctctgagcctcctgaagaaaagattctcccatagacccgtgcaggagaagttcgtgtgcctgaactgcggcttcgagacacacgcagccgagcaagccgccctgaacatcgccagatcctggctgttcctgcggagccaggagtacaagaaataccagacaaacaagacaaccggcaacaccgataagagagccttcgtcgagacctggcagtccttttaccggaagaagcttaaggaggtgtggaaacctgccgtgcggtctggcggatctggcggaggctccgagcccgtgagcttcgaggaggtggccgtgtacttcagcagggaggagtgggccctgctggaccccgcccagagggccctgtacaggcacgtgatgctggagacctacgagtgcgtggccagcctggcccccctgcccgcccccaagcccatggtgatcagcctgctggaggagggcgaggagccctggatccccgacgagggcagcaggcaggccgtggccggcgacgtgagccccggcgagggcggcccaagcagcggcgcccctcctcccagcggcggcagcccagccggctccccaacctctaccgaggagggcacctctgagtccgccacccccgagagcggccctggcacctccaccgagcccagcgagggcagcgcacccggcagccctgccggcagccccacctccacagaggagggaaccagcaccgagcccagcgaaggcagcgccccaggcaccagcaccgagcctagtgagcaggagattaaacggatcaacaagatcagaagaagacttgtgaaagacagcaacaccaagaaggccggcaagacaggccccatgaaaaccctgctggttagagtgatgacacccgatctgagagagcggctggaaaacctgagaaagaagcctgaaaatatcccccagcccatcagcaatacatctagagccaacctgaataagctgctgaccgattacaccgaaatgaagaaggcgatcctgcatgtgtactgggaagagttccagaaggaccctgtgggcctgatgagccgggtggcccagcctgccagcaagaagatcgatcagaacaagctgaaacctgagatggacgagaagggcaacctgaccaccgccggctttgcctgctctcagtgtggccagcccctgttcgtgtacaagctggagcaggtgtctgagaagggcaaggcttacaccaactacttcggacggtgcaatgtggccgagcacgaaaagctgatcctgctggcccagctgaagcccgagaaggatagcgacgaagccgtgacatatagcctgggaaagtttgggcagagggccctggatttctacagcattcatgtgaccaaggagtccacccaccccgtgaagcccctggcccagatcgccggaaacagatacgcctccggacctgtgggaaaggccctgagcgacgcatgtatgggcacaatcgcctccttcctgtctaagtaccaggacatcatcatcgaacaccagaaggtggtgaagggcaaccagaagagactggagagcctgcgggagctggccggcaaggaaaacctggaataccctagcgtgaccctgccacctcagcctcacaccaaggagggcgttgatgcctacaacgaagtgatcgcccgggtgcgaatgtgggtgaacctgaacctgtggcagaagctgaagctaagcagagatgatgccaagcctctgctgagactgaagggattcccttcctttcctctggtcgagagacaggccaacgaagtggactggtgggacatggtgtgtaacgtgaagaagctgatcaacgagaaaaaggaggatggcaaggtgttttggcagaatctggctggctacaagagacaggaagccctgagaccatacctgagcagcgaggaagatcggaagaagggaaagaaattcgctcggtaccagctgggcgacctgctgctgcacctggaaaagaagcacggcgaggactggggaaaggtgtacgacgaggcctgggagcggattgacaagaaagtggaaggcctgagcaagcacatcaagctggaagaggaacggagaagcgaggacgcccagagcaaggccgccctgaccgactggctgcgggctaaggccagcttcgtgatcgagggcctgaaggaggccgacaaggacgagttctgcagatgcgagctgaagctgcagaagtggtacggggacctgcggggaaagcccttcgccatcgaagccgagaacagcatcctggacatcagcggcttcagcaagcagtacaactgtgccttcatctggcagaaggacggcgtgaagaagctgaacctgtacctgatcatcaactacttcaagggcggcaagctgcggttcaagaagatcaaacctgaagccttcgaagccaacagattctacaccgtgatcaacaaaaagagcggcgagatcgtgcccatggaggtgaacttcaacttcgacgaccccaacctgatcatcctgcctctggcctttggcaagagacagggcagagaattcatctggaacgacctgctgtccctggaaaccggcagcctgaagctggccaacggaagagtgatcgagaagacactgtacaacagaagaacccggcaggatgagcctgccctgttcgtggccctgaccttcgagcggcgggaggtcctggactcctccaatatcaaaccaatgaacctgatcggcgtggcaagaggcgaaaacatccccgccgtgatcgccctgaccgaccccgagggctgcccactgagccggtttaaggatagcctgggaaacccaacccacatcctgagaatcggcgagagctataaggagaagcagcggaccatccaggccaagaaggaggtggagcagcggagagccggcggctacagccggaagtacgccagcaaagccaagaatctggcagacgatatggtgagaaacaccgctagagatctgctgtactacgccgtgacccaggatgccatgctgatcttcgccaacctgagccggggcttcggccggcagggcaagcggaccttcatggccgagagacagtacacacggatggaggactggctgaccgccaagctggcctacgagggcctgagcaagacctacctgtccaagacactggcccagtacacctccaagacatgcagcaactgtgggtttaccatcaccagcgccgactacgacagggtgctggagaagctgaagaagacagcaacaggctggatgaccacaattaacggcaaggagctgaaggtggagggccagattacctactacaacagatacaagagacagaacgtagtcaaggacctgtccgtcgagctggatagactgagcgaagaatctgtgaacaacgacatctcctcctggacaaagggcagaagcggagaagctctgagcctcctgaagaaaagattctcccatagacccgtgcaggagaagttcgtgtgcctgaactgcggcttcgagacacacgcagccgagcaagccgccctgaacatcgccagatcctggctgttcctgcggagccaggagtacaagaaataccagacaaacaagacaaccggcaacaccgataagagagccttcgtcgagacctggcagtccttttaccggaagaagcttaaggaggtgtggaaacctgccgtgcggtctggcggatctggcggaggctcctgagcccgtgagcttcgaggaggtggccgtgtacttcagcagggaggagtgggccctgctggaccccgcccagagggccctgtacaggcacgtgatgctggagacctacgagtgcgtggccagcctggcccccctgcccgcccccaagcccatggtgatcagcctgctggaggagggcgaggagccctggatccccgacgagggcagcaggcaggccgtggccggcgacgtgagccccggcgagggatctggctccggcagcggccccaagaaaaagagaaaagtctaagctgccttctgcggggcttgccttctggccatgcccttcttctctcccttgcacctgtacctcttggtctttgaataaagcctgagtaggaaggctagcaaaaaaaaaaaaaaaaaaaaaaaaaaaaaaaaaaaaaaaaaaaaaaaaaaaaaaaaaaaaaaaaaaaaaaaaaaaaaaaa

SEQ ID NO: 15601 - RNA, 9485 nt, synthetic construct
  source 1..9485: mol_type = other RNA
aggaaataagagagaaaagaagagtaagaagaaatataagagccaccatggcccctaagaagaagcgtaaagtgagccggatggaacgcctcgtctacgaggtgcggcagaagtgcagaaacatcgaggacatctgcatctcctgcggatctctgaacgtgaccctggagcacccactgttcatcggcggcatgtgccagaactgtaaaaactgttttctggagtgtgcctatcaatacgacgatgacggctaccagagctactgcaccatctgttgcggcggaagagaggtgctgatgtgtggaaataacaactgctgccggtgcttctgcgtggaatgcgtggacctgctggtgggccccggcgccgcccaggccgctattaaggaagatccttggaactgctacatgtgcggccacaagggcacatacggcctgctgagacggagagaggactggcctagcagactgcagatgttcttcgccaataaccacgaccaggagttcgacccccctaaggtgtaccctcccgtccccgccgagaagagaaagcccatccgggtcctgagcctgttcgatggcatcgccaccggtctgctggtgctgaaggacctgggcatccaggtggataggtacattgcctccgaggtgtgcgaggactccatcaccgtgggaatggtgcgtcatcagggcaagatcatgtacgtgggcgacgtgcggagcgtgacacagaagcatatccaggagtggggccctttcgacctggtgatcggcggcagcccttgcaatgacctgagcatcgtgaacccagcccggaagggcctgtacgagggaaccggcagactgttcttcgagttttacagactgctgcacgacgcccggcctaaggaaggcgacgaccggcccttcttttggctgttcgagaatgtggtggccatgggagtcagcgacaagcgggatattagccggttcctggagagcaaccccgtgatgatcgatgccaaggaagtgagcgccgcccaccgggccagatacttctggggcaatctgcctggcatgaacagacccctggccagcaccgtgaacgacaagctggagctgcaggagtgcctggagcacggccggatcgccaagttcagcaaggtgagaaccatcaccacccgaagcaacagcatcaaacaaggcaaggaccagcactttcctgtgttcatgaacgagaaggaggacatcctgtggtgtaccgagatggagagagtgttcgggttcccagtccactacacagatgtcagcaacatgtctagactggccagacagagactgctgggaagaagctggtccgtccctgtgatcagacacctgttcgcccctctgaaggagtacttcgcctgcgtgagcagcggcaacagcaacgccaacagccggggccccagcttctctagcggcctggtgccactgtccctgagagggagccacatgggccccatggagatctacaaaaccgtgagcgcctggaagcggcagcctgtgcgcgtgctgagcctgtttcggaatatcgataaagtcctgaaaagcctgggattcctggagagcggctctggctccggcggtggcaccctgaagtacgtggaggatgtgacaaacgtggtcagacgggatgtggagaagtggggccccttcgatctggtgtacggcagcacccaacccctgggcagctcttgtgaccggtgccctggctggtacatgtttcagttccaccggatcctgcagtacgccctgccgagacaggagtcccagcggccattcttttggattttcatggacaacttgctgctgaccgaggatgaccaggaaactaccactcggttcctgcagaccgaagccgtgaccctgcaggacgtgagaggccgggactaccagaacgccatgcgggtgtggtccaacatccctggactgaaaagcaagcacgcacctctgacccctaaagaagaggagtacctgcaggcccaggtgcggagcagaagcaagctggacgcccctaaggtggatctgctggtgaagaattgcctcctgcccctgagagagtacttcaagtatttcagccagaatagtctgcccctgggaggcagcggcggcggcgccctggtgacatttgaggacgtcgccgtgcggttcacccaggaggaatgggctctgctggatccttctcagaaaatcctgtaccgggacgtgatgagagagacataccggaatctgacctccgtgggcatcaactgggaatgttgggaccttgaagcctgcttcagaagcctgggaagaaacctgagagtgcaggtggtgaagagaaagtgcgagctgaccaacagcggcccctgcgccgagggcggcccaagcagcggcgcccctcctcccagcggcggcagcccagccggctccccaacctctaccgaggagggcacctctgagtccgccacccccgagagcggccctggcacctccaccgagcccagcgagggcagcgcacccggcagccctgccggcagccccacctccacagaggagggaaccagcaccgagcccagcgaaggcagcgccccaggcaccagcaccgagcctagtgagcaggagattaaacggatcaacaagatcagaagaagacttgtgaaagacagcaacaccaagaaggccggcaagacaggccccatgaaaaccctgctggttagagtgatgacacccgatctgagagagcggctggaaaacctgagaaagaagcctgaaaatatcccccagcccatcagcaatacatctagagccaacctgaataagctgctgaccgattacaccgaaatgaagaaggcgatcctgcatgtgtactgggaagagttccagaaggaccctgtgggcctgatgagccgggtggcccagcctgccagcaagaagatcgatcagaacaagctgaaacctgagatggacgagaagggcaacctgaccaccgccggctttgcctgctctcagtgtggccagcccctgttcgtgtacaagctggagcaggtgtctgagaagggcaaggcttacaccaactacttcggacggtgcaatgtggccgagcacgaaaagctgatcctgctggcccagctgaagcccgagaaggatagcgacgaagccgtgacatatagcctgggaaagtttgggcagagggccctggatttctacagcattcatgtgaccaaggagtccacccaccccgtgaagcccctggcccagatcgccggaaacagatacgcctccggacctgtgggaaaggccctgagcgacgcatgtatgggcacaatcgcctccttcctgtctaagtaccaggacatcatcatcgaacaccagaaggtggtgaagggcaaccagaagagactggagagcctgcgggagctggccggcaaggaaaacctggaataccctagcgtgaccctgccacctcagcctcacaccaaggagggcgttgatgcctacaacgaagtgatcgcccgggtgcgaatgtgggtgaacctgaacctgtggcagaagctgaagctaagcagagatgatgccaagcctctgctgagactgaagggattcccttcctttcctctggtcgagagacaggccaacgaagtggactggtgggacatggtgtgtaacgtgaagaagctgatcaacgagaaaaaggaggatggcaaggtgttttggcagaatctggctggctacaagagacaggaagccctgagaccatacctgagcagcgaggaagatcggaagaagggaaagaaattcgctcggtaccagctgggcgacctgctgctgcacctggaaaagaagcacggcgaggactggggaaaggtgtacgacgaggcctgggagcggattgacaagaaagtggaaggcctgagcaagcacatcaagctggaagaggaacggagaagcgaggacgcccagagcaaggccgccctgaccgactggctgcgggctaaggccagcttcgtgatcgagggcctgaaggaggccgacaaggacgagttctgcagatgcgagctgaagctgcagaagtggtacggggacctgcggggaaagcccttcgccatcgaagccgagaacagcatcctggacatcagcggcttcagcaagcagtacaactgtgccttcatctggcagaaggacggcgtgaagaagctgaacctgtacctgatcatcaactacttcaagggcggcaagctgcggttcaagaagatcaaacctgaagccttcgaagccaacagattctacaccgtgatcaacaaaaagagcggcgagatcgtgcccatggaggtgaacttcaacttcgacgaccccaacctgatcatcctgcctctggcctttggcaagagacagggcagagaattcatctggaacgacctgctgtccctggaaaccggcagcctgaagctggccaacggaagagtgatcgagaagacactgtacaacagaagaacccggcaggatgagcctgccctgttcgtggccctgaccttcgagcggcgggaggtcctggactcctccaatatcaaaccaatgaacctgatcggcgtggcaagaggcgaaaacatccccgccgtgatcgccctgaccgaccccgagggctgcccactgagccggtttaaggatagcctgggaaacccaacccacatcctgagaatcggcgagagctataaggagaagcagcggaccatccaggccaagaaggaggtggagcagcggagagccggcggctacagccggaagtacgccagcaaagccaagaatctggcagacgatatggtgagaaacaccgctagagatctgctgtactacgccgtgacccaggatgccatgctgatcttcgccaacctgagccggggcttcggccggcagggcaagcggaccttcatggccgagagacagtacacacggatggaggactggctgaccgccaagctggcctacgagggcctgagcaagacctacctgtccaagacactggcccagtacacctccaagacatgcagcaactgtgggtttaccatcaccagcgccgactacgacagggtgctggagaagctgaagaagacagcaacaggctggatgaccacaattaacggcaaggagctgaaggtggagggccagattacctactacaacagatacaagagacagaacgtagtcaaggacctgtccgtcgagctggatagactgagcgaagaatctgtgaacaacgacatctcctcctggacaaagggcagaagcggagaagctctgagcctcctgaagaaaagattctcccatagacccgtgcaggagaagttcgtgtgcctgaactgcggcttcgagacacacgcagccgagcaagccgccctgaacatcgccagatcctggctgttcctgcggagccaggagtacaagaaataccagacaaacaagacaaccggcaacaccgataagagagccttcgtcgagacctggcagtccttttaccggaagaagcttaaggaggtgtggaaacctgccgtgcggtctggcggatctggcggaggctcccaggccgaggtgaccttcgaggacgtggccgtgctgttcagcagggaggagtggggcaggctgggccccgcccagaggggcctgtacagggacgtgatgctggagacctacaggaacctggtgagcctgggcgccggccccgccggccccaagcccggcgtgatcacccagctggagaggggcgacgagccctgggtgctggacgcccagggcaccgagggcaaggagaggctgagggtgagcggcggcccaagcagcggcgcccctcctcccagcggcggcagcccagccggctccccaacctctaccgaggagggcacctctgagtccgccacccccgagagcggccctggcacctccaccgagcccagcgagggcagcgcacccggcagccctgccggcagccccacctccacagaggagggaaccagcaccgagcccagcgaaggcagcgccccaggcaccagcaccgagcctagtgagcaggagattaaacggatcaacaagatcagaagaagacttgtgaaagacagcaacaccaagaaggccggcaagacaggccccatgaaaaccctgctggttagagtgatgacacccgatctgagagagcggctggaaaacctgagaaagaagcctgaaaatatcccccagcccatcagcaatacatctagagccaacctgaataagctgctgaccgattacaccgaaatgaagaaggcgatcctgcatgtgtactgggaagagttccagaaggaccctgtgggcctgatgagccgggtggcccagcctgccagcaagaagatcgatcagaacaagctgaaacctgagatggacgagaagggcaacctgaccaccgccggctttgcctgctctcagtgtggccagcccctgttcgtgtacaagctggagcaggtgtctgagaagggcaaggcttacaccaactacttcggacggtgcaatgtggccgagcacgaaaagctgatcctgctggcccagctgaagcccgagaaggatagcgacgaagccgtgacatatagcctgggaaagtttgggcagagggccctggatttctacagcattcatgtgaccaaggagtccacccaccccgtgaagcccctggcccagatcgccggaaacagatacgcctccggacctgtgggaaaggccctgagcgacgcatgtatgggcacaatcgcctccttcctgtctaagtaccaggacatcatcatcgaacaccagaaggtggtgaagggcaaccagaagagactggagagcctgcgggagctggccggcaaggaaaacctggaataccctagcgtgaccctgccacctcagcctcacaccaaggagggcgttgatgcctacaacgaagtgatcgcccgggtgcgaatgtgggtgaacctgaacctgtggcagaagctgaagctaagcagagatgatgccaagcctctgctgagactgaagggattcccttcctttcctctggtcgagagacaggccaacgaagtggactggtgggacatggtgtgtaacgtgaagaagctgatcaacgagaaaaaggaggatggcaaggtgttttggcagaatctggctggctacaagagacaggaagccctgagaccatacctgagcagcgaggaagatcggaagaagggaaagaaattcgctcggtaccagctgggcgacctgctgctgcacctggaaaagaagcacggcgaggactggggaaaggtgtacgacgaggcctgggagcggattgacaagaaagtggaaggcctgagcaagcacatcaagctggaagaggaacggagaagcgaggacgcccagagcaaggccgccctgaccgactggctgcgggctaaggccagcttcgtgatcgagggcctgaaggaggccgacaaggacgagttctgcagatgcgagctgaagctgcagaagtggtacggggacctgcggggaaagcccttcgccatcgaagccgagaacagcatcctggacatcagcggcttcagcaagcagtacaactgtgccttcatctggcagaaggacggcgtgaagaagctgaacctgtacctgatcatcaactacttcaagggcggcaagctgcggttcaagaagatcaaacctgaagccttcgaagccaacagattctacaccgtgatcaacaaaaagagcggcgagatcgtgcccatggaggtgaacttcaacttcgacgaccccaacctgatcatcctgcctctggcctttggcaagagacagggcagagaattcatctggaacgacctgctgtccctggaaaccggcagcctgaagctggccaacggaagagtgatcgagaagacactgtacaacagaagaacccggcaggatgagcctgccctgttcgtggccctgaccttcgagcggcgggaggtcctggactcctccaatatcaaaccaatgaacctgatcggcgtggcaagaggcgaaaacatccccgccgtgatcgccctgaccgaccccgagggctgcccactgagccggtttaaggatagcctgggaaacccaacccacatcctgagaatcggcgagagctataaggagaagcagcggaccatccaggccaagaaggaggtggagcagcggagagccggcggctacagccggaagtacgccagcaaagccaagaatctggcagacgatatggtgagaaacaccgctagagatctgctgtactacgccgtgacccaggatgccatgctgatcttcgccaacctgagccggggcttcggccggcagggcaagcggaccttcatggccgagagacagtacacacggatggaggactggctgaccgccaagctggcctacgagggcctgagcaagacctacctgtccaagacactggcccagtacacctccaagacatgcagcaactgtgggtttaccatcaccagcgccgactacgacagggtgctggagaagctgaagaagacagcaacaggctggatgaccacaattaacggcaaggagctgaaggtggagggccagattacctactacaacagatacaagagacagaacgtagtcaaggacctgtccgtcgagctggatagactgagcgaagaatctgtgaacaacgacatctcctcctggacaaagggcagaagcggagaagctctgagcctcctgaagaaaagattctcccatagacccgtgcaggagaagttcgtgtgcctgaactgcggcttcgagacacacgcagccgagcaagccgccctgaacatcgccagatcctggctgttcctgcggagccaggagtacaagaaataccagacaaacaagacaaccggcaacaccgataagagagccttcgtcgagacctggcagtccttttaccggaagaagcttaaggaggtgtggaaacctgccgtgcggtctggcggatctggcggaggctcctcaggccgaggtgaccttcgaggacgtggccgtgctgttcagcagggaggagtggggcaggctgggccccgcccagaggggcctgtacagggacgtgatgctggagacctacaggaacctggtgagcctgggcgccggccccgccggccccaagcccggcgtgatcacccagctggagaggggcgacgagccctgggtgctggacgcccagggcaccgagggcaaggagaggctgagggtgagcggatctggctccggcagcggccccaagaaaaagagaaaagtctaagctgccttctgcggggcttgccttctggccatgcccttcttctctcccttgcacctgtacctcttggtctttgaataaagcctgagtaggaaggctagcaaaaaaaaaaaaaaaaaaaaaaaaaaaaaaaaaaaaaaaaaaaaaaaaaaaaaaaaaaaaaaaaaaaaaaaaaaaaaaaa

SEQ ID NO: 15602 - RNA, 9485 nt, synthetic construct
  source 1..9485: mol_type = other RNA
aggaaataagagagaaaagaagagtaagaagaaatataagagccaccatggcccctaagaagaagcgtaaagtgagccggatggaacgcctcgtctacgaggtgcggcagaagtgcagaaacatcgaggacatctgcatctcctgcggatctctgaacgtgaccctggagcacccactgttcatcggcggcatgtgccagaactgtaaaaactgttttctggagtgtgcctatcaatacgacgatgacggctaccagagctactgcaccatctgttgcggcggaagagaggtgctgatgtgtggaaataacaactgctgccggtgcttctgcgtggaatgcgtggacctgctggtgggccccggcgccgcccaggccgctattaaggaagatccttggaactgctacatgtgcggccacaagggcacatacggcctgctgagacggagagaggactggcctagcagactgcagatgttcttcgccaataaccacgaccaggagttcgacccccctaaggtgtaccctcccgtccccgccgagaagagaaagcccatccgggtcctgagcctgttcgatggcatcgccaccggtctgctggtgctgaaggacctgggcatccaggtggataggtacattgcctccgaggtgtgcgaggactccatcaccgtgggaatggtgcgtcatcagggcaagatcatgtacgtgggcgacgtgcggagcgtgacacagaagcatatccaggagtggggccctttcgacctggtgatcggcggcagcccttgcaatgacctgagcatcgtgaacccagcccggaagggcctgtacgagggaaccggcagactgttcttcgagttttacagactgctgcacgacgcccggcctaaggaaggcgacgaccggcccttcttttggctgttcgagaatgtggtggccatgggagtcagcgacaagcgggatattagccggttcctggagagcaaccccgtgatgatcgatgccaaggaagtgagcgccgcccaccgggccagatacttctggggcaatctgcctggcatgaacagacccctggccagcaccgtgaacgacaagctggagctgcaggagtgcctggagcacggccggatcgccaagttcagcaaggtgagaaccatcaccacccgaagcaacagcatcaaacaaggcaaggaccagcactttcctgtgttcatgaacgagaaggaggacatcctgtggtgtaccgagatggagagagtgttcgggttcccagtccactacacagatgtcagcaacatgtctagactggccagacagagactgctgggaagaagctggtccgtccctgtgatcagacacctgttcgcccctctgaaggagtacttcgcctgcgtgagcagcggcaacagcaacgccaacagccggggccccagcttctctagcggcctggtgccactgtccctgagagggagccacatgggccccatggagatctacaaaaccgtgagcgcctggaagcggcagcctgtgcgcgtgctgagcctgtttcggaatatcgataaagtcctgaaaagcctgggattcctggagagcggctctggctccggcggtggcaccctgaagtacgtggaggatgtgacaaacgtggtcagacgggatgtggagaagtggggccccttcgatctggtgtacggcagcacccaacccctgggcagctcttgtgaccggtgccctggctggtacatgtttcagttccaccggatcctgcagtacgccctgccgagacaggagtcccagcggccattcttttggattttcatggacaacttgctgctgaccgaggatgaccaggaaactaccactcggttcctgcagaccgaagccgtgaccctgcaggacgtgagaggccgggactaccagaacgccatgcgggtgtggtccaacatccctggactgaaaagcaagcacgcacctctgacccctaaagaagaggagtacctgcaggcccaggtgcggagcagaagcaagctggacgcccctaaggtggatctgctggtgaagaattgcctcctgcccctgagagagtacttcaagtatttcagccagaatagtctgcccctgggaggcagcggcggcggcgccctggtgacatttgaggacgtcgccgtgcggttcacccaggaggaatgggctctgctggatccttctcagaaaatcctgtaccgggacgtgatgagagagacataccggaatctgacctccgtgggcatcaactgggaatgttgggaccttgaagcctgcttcagaagcctgggaagaaacctgagagtgcaggtggtgaagagaaagtgcgagctgaccaacagcggcccctgcgccgagggcggcccaagcagcggcgcccctcctcccagcggcggcagcccagccggctccccaacctctaccgaggagggcacctctgagtccgccacccccgagagcggccctggcacctccaccgagcccagcgagggcagcgcacccggcagccctgccggcagccccacctccacagaggagggaaccagcaccgagcccagcgaaggcagcgccccaggcaccagcaccgagcctagtgagcaggagattaaacggatcaacaagatcagaagaagacttgtgaaagacagcaacaccaagaaggccggcaagacaggccccatgaaaaccctgctggttagagtgatgacacccgatctgagagagcggctggaaaacctgagaaagaagcctgaaaatatcccccagcccatcagcaatacatctagagccaacctgaataagctgctgaccgattacaccgaaatgaagaaggcgatcctgcatgtgtactgggaagagttccagaaggaccctgtgggcctgatgagccgggtggcccagcctgccagcaagaagatcgatcagaacaagctgaaacctgagatggacgagaagggcaacctgaccaccgccggctttgcctgctctcagtgtggccagcccctgttcgtgtacaagctggagcaggtgtctgagaagggcaaggcttacaccaactacttcggacggtgcaatgtggccgagcacgaaaagctgatcctgctggcccagctgaagcccgagaaggatagcgacgaagccgtgacatatagcctgggaaagtttgggcagagggccctggatttctacagcattcatgtgaccaaggagtccacccaccccgtgaagcccctggcccagatcgccggaaacagatacgcctccggacctgtgggaaaggccctgagcgacgcatgtatgggcacaatcgcctccttcctgtctaagtaccaggacatcatcatcgaacaccagaaggtggtgaagggcaaccagaagagactggagagcctgcgggagctggccggcaaggaaaacctggaataccctagcgtgaccctgccacctcagcctcacaccaaggagggcgttgatgcctacaacgaagtgatcgcccgggtgcgaatgtgggtgaacctgaacctgtggcagaagctgaagctaagcagagatgatgccaagcctctgctgagactgaagggattcccttcctttcctctggtcgagagacaggccaacgaagtggactggtgggacatggtgtgtaacgtgaagaagctgatcaacgagaaaaaggaggatggcaaggtgttttggcagaatctggctggctacaagagacaggaagccctgagaccatacctgagcagcgaggaagatcggaagaagggaaagaaattcgctcggtaccagctgggcgacctgctgctgcacctggaaaagaagcacggcgaggactggggaaaggtgtacgacgaggcctgggagcggattgacaagaaagtggaaggcctgagcaagcacatcaagctggaagaggaacggagaagcgaggacgcccagagcaaggccgccctgaccgactggctgcgggctaaggccagcttcgtgatcgagggcctgaaggaggccgacaaggacgagttctgcagatgcgagctgaagctgcagaagtggtacggggacctgcggggaaagcccttcgccatcgaagccgagaacagcatcctggacatcagcggcttcagcaagcagtacaactgtgccttcatctggcagaaggacggcgtgaagaagctgaacctgtacctgatcatcaactacttcaagggcggcaagctgcggttcaagaagatcaaacctgaagccttcgaagccaacagattctacaccgtgatcaacaaaaagagcggcgagatcgtgcccatggaggtgaacttcaacttcgacgaccccaacctgatcatcctgcctctggcctttggcaagagacagggcagagaattcatctggaacgacctgctgtccctggaaaccggcagcctgaagctggccaacggaagagtgatcgagaagacactgtacaacagaagaacccggcaggatgagcctgccctgttcgtggccctgaccttcgagcggcgggaggtcctggactcctccaatatcaaaccaatgaacctgatcggcgtggcaagaggcgaaaacatccccgccgtgatcgccctgaccgaccccgagggctgcccactgagccggtttaaggatagcctgggaaacccaacccacatcctgagaatcggcgagagctataaggagaagcagcggaccatccaggccaagaaggaggtggagcagcggagagccggcggctacagccggaagtacgccagcaaagccaagaatctggcagacgatatggtgagaaacaccgctagagatctgctgtactacgccgtgacccaggatgccatgctgatcttcgccaacctgagccggggcttcggccggcagggcaagcggaccttcatggccgagagacagtacacacggatggaggactggctgaccgccaagctggcctacgagggcctgagcaagacctacctgtccaagacactggcccagtacacctccaagacatgcagcaactgtgggtttaccatcaccagcgccgactacgacagggtgctggagaagctgaagaagacagcaacaggctggatgaccacaattaacggcaaggagctgaaggtggagggccagattacctactacaacagatacaagagacagaacgtagtcaaggacctgtccgtcgagctggatagactgagcgaagaatctgtgaacaacgacatctcctcctggacaaagggcagaagcggagaagctctgagcctcctgaagaaaagattctcccatagacccgtgcaggagaagttcgtgtgcctgaactgcggcttcgagacacacgcagccgagcaagccgccctgaacatcgccagatcctggctgttcctgcggagccaggagtacaagaaataccagacaaacaagacaaccggcaacaccgataagagagccttcgtcgagacctggcagtccttttaccggaagaagcttaaggaggtgtggaaacctgccgtgcggtctggcggatctggcggaggctcccagccccagggcaccgtgaccttcaaggacgtggaggtgaccttcagccaggacgagtggggcctgctggacgccagccagaggaacctgtacagggacgtgatgctggagaactacggcaacatggccagcgtggtgggccccttcaccaagcccgccctgatcagctggctggaggccagggagccctggggcctgaacgtgcagggcgtgcagctgaagggcaaccccggcgccgcccccggcggcccaagcagcggcgcccctcctcccagcggcggcagcccagccggctccccaacctctaccgaggagggcacctctgagtccgccacccccgagagcggccctggcacctccaccgagcccagcgagggcagcgcacccggcagccctgccggcagccccacctccacagaggagggaaccagcaccgagcccagcgaaggcagcgccccaggcaccagcaccgagcctagtgagcaggagattaaacggatcaacaagatcagaagaagacttgtgaaagacagcaacaccaagaaggccggcaagacaggccccatgaaaaccctgctggttagagtgatgacacccgatctgagagagcggctggaaaacctgagaaagaagcctgaaaatatcccccagcccatcagcaatacatctagagccaacctgaataagctgctgaccgattacaccgaaatgaagaaggcgatcctgcatgtgtactgggaagagttccagaaggaccctgtgggcctgatgagccgggtggcccagcctgccagcaagaagatcgatcagaacaagctgaaacctgagatggacgagaagggcaacctgaccaccgccggctttgcctgctctcagtgtggccagcccctgttcgtgtacaagctggagcaggtgtctgagaagggcaaggcttacaccaactacttcggacggtgcaatgtggccgagcacgaaaagctgatcctgctggcccagctgaagcccgagaaggatagcgacgaagccgtgacatatagcctgggaaagtttgggcagagggccctggatttctacagcattcatgtgaccaaggagtccacccaccccgtgaagcccctggcccagatcgccggaaacagatacgcctccggacctgtgggaaaggccctgagcgacgcatgtatgggcacaatcgcctccttcctgtctaagtaccaggacatcatcatcgaacaccagaaggtggtgaagggcaaccagaagagactggagagcctgcgggagctggccggcaaggaaaacctggaataccctagcgtgaccctgccacctcagcctcacaccaaggagggcgttgatgcctacaacgaagtgatcgcccgggtgcgaatgtgggtgaacctgaacctgtggcagaagctgaagctaagcagagatgatgccaagcctctgctgagactgaagggattcccttcctttcctctggtcgagagacaggccaacgaagtggactggtgggacatggtgtgtaacgtgaagaagctgatcaacgagaaaaaggaggatggcaaggtgttttggcagaatctggctggctacaagagacaggaagccctgagaccatacctgagcagcgaggaagatcggaagaagggaaagaaattcgctcggtaccagctgggcgacctgctgctgcacctggaaaagaagcacggcgaggactggggaaaggtgtacgacgaggcctgggagcggattgacaagaaagtggaaggcctgagcaagcacatcaagctggaagaggaacggagaagcgaggacgcccagagcaaggccgccctgaccgactggctgcgggctaaggccagcttcgtgatcgagggcctgaaggaggccgacaaggacgagttctgcagatgcgagctgaagctgcagaagtggtacggggacctgcggggaaagcccttcgccatcgaagccgagaacagcatcctggacatcagcggcttcagcaagcagtacaactgtgccttcatctggcagaaggacggcgtgaagaagctgaacctgtacctgatcatcaactacttcaagggcggcaagctgcggttcaagaagatcaaacctgaagccttcgaagccaacagattctacaccgtgatcaacaaaaagagcggcgagatcgtgcccatggaggtgaacttcaacttcgacgaccccaacctgatcatcctgcctctggcctttggcaagagacagggcagagaattcatctggaacgacctgctgtccctggaaaccggcagcctgaagctggccaacggaagagtgatcgagaagacactgtacaacagaagaacccggcaggatgagcctgccctgttcgtggccctgaccttcgagcggcgggaggtcctggactcctccaatatcaaaccaatgaacctgatcggcgtggcaagaggcgaaaacatccccgccgtgatcgccctgaccgaccccgagggctgcccactgagccggtttaaggatagcctgggaaacccaacccacatcctgagaatcggcgagagctataaggagaagcagcggaccatccaggccaagaaggaggtggagcagcggagagccggcggctacagccggaagtacgccagcaaagccaagaatctggcagacgatatggtgagaaacaccgctagagatctgctgtactacgccgtgacccaggatgccatgctgatcttcgccaacctgagccggggcttcggccggcagggcaagcggaccttcatggccgagagacagtacacacggatggaggactggctgaccgccaagctggcctacgagggcctgagcaagacctacctgtccaagacactggcccagtacacctccaagacatgcagcaactgtgggtttaccatcaccagcgccgactacgacagggtgctggagaagctgaagaagacagcaacaggctggatgaccacaattaacggcaaggagctgaaggtggagggccagattacctactacaacagatacaagagacagaacgtagtcaaggacctgtccgtcgagctggatagactgagcgaagaatctgtgaacaacgacatctcctcctggacaaagggcagaagcggagaagctctgagcctcctgaagaaaagattctcccatagacccgtgcaggagaagttcgtgtgcctgaactgcggcttcgagacacacgcagccgagcaagccgccctgaacatcgccagatcctggctgttcctgcggagccaggagtacaagaaataccagacaaacaagacaaccggcaacaccgataagagagccttcgtcgagacctggcagtccttttaccggaagaagcttaaggaggtgtggaaacctgccgtgcggtctggcggatctggcggaggctcctcagccccagggcaccgtgaccttcaaggacgtggaggtgaccttcagccaggacgagtggggcctgctggacgccagccagaggaacctgtacagggacgtgatgctggagaactacggcaacatggccagcgtggtgggccccttcaccaagcccgccctgatcagctggctggaggccagggagccctggggcctgaacgtgcagggcgtgcagctgaagggcaaccccggcgccgcccccggatctggctccggcagcggccccaagaaaaagagaaaagtctaagctgccttctgcggggcttgccttctggccatgcccttcttctctcccttgcacctgtacctcttggtctttgaataaagcctgagtaggaaggctagcaaaaaaaaaaaaaaaaaaaaaaaaaaaaaaaaaaaaaaaaaaaaaaaaaaaaaaaaaaaaaaaaaaaaaaaaaaaaaaaa

SEQ ID NO: 15603 - RNA, 9485 nt, synthetic construct
  source 1..9485: mol_type = other RNA
aggaaataagagagaaaagaagagtaagaagaaatataagagccaccatggcccctaagaagaagcgtaaagtgagccggatggaacgcctcgtctacgaggtgcggcagaagtgcagaaacatcgaggacatctgcatctcctgcggatctctgaacgtgaccctggagcacccactgttcatcggcggcatgtgccagaactgtaaaaactgttttctggagtgtgcctatcaatacgacgatgacggctaccagagctactgcaccatctgttgcggcggaagagaggtgctgatgtgtggaaataacaactgctgccggtgcttctgcgtggaatgcgtggacctgctggtgggccccggcgccgcccaggccgctattaaggaagatccttggaactgctacatgtgcggccacaagggcacatacggcctgctgagacggagagaggactggcctagcagactgcagatgttcttcgccaataaccacgaccaggagttcgacccccctaaggtgtaccctcccgtccccgccgagaagagaaagcccatccgggtcctgagcctgttcgatggcatcgccaccggtctgctggtgctgaaggacctgggcatccaggtggataggtacattgcctccgaggtgtgcgaggactccatcaccgtgggaatggtgcgtcatcagggcaagatcatgtacgtgggcgacgtgcggagcgtgacacagaagcatatccaggagtggggccctttcgacctggtgatcggcggcagcccttgcaatgacctgagcatcgtgaacccagcccggaagggcctgtacgagggaaccggcagactgttcttcgagttttacagactgctgcacgacgcccggcctaaggaaggcgacgaccggcccttcttttggctgttcgagaatgtggtggccatgggagtcagcgacaagcgggatattagccggttcctggagagcaaccccgtgatgatcgatgccaaggaagtgagcgccgcccaccgggccagatacttctggggcaatctgcctggcatgaacagacccctggccagcaccgtgaacgacaagctggagctgcaggagtgcctggagcacggccggatcgccaagttcagcaaggtgagaaccatcaccacccgaagcaacagcatcaaacaaggcaaggaccagcactttcctgtgttcatgaacgagaaggaggacatcctgtggtgtaccgagatggagagagtgttcgggttcccagtccactacacagatgtcagcaacatgtctagactggccagacagagactgctgggaagaagctggtccgtccctgtgatcagacacctgttcgcccctctgaaggagtacttcgcctgcgtgagcagcggcaacagcaacgccaacagccggggccccagcttctctagcggcctggtgccactgtccctgagagggagccacatgggccccatggagatctacaaaaccgtgagcgcctggaagcggcagcctgtgcgcgtgctgagcctgtttcggaatatcgataaagtcctgaaaagcctgggattcctggagagcggctctggctccggcggtggcaccctgaagtacgtggaggatgtgacaaacgtggtcagacgggatgtggagaagtggggccccttcgatctggtgtacggcagcacccaacccctgggcagctcttgtgaccggtgccctggctggtacatgtttcagttccaccggatcctgcagtacgccctgccgagacaggagtcccagcggccattcttttggattttcatggacaacttgctgctgaccgaggatgaccaggaaactaccactcggttcctgcagaccgaagccgtgaccctgcaggacgtgagaggccgggactaccagaacgccatgcgggtgtggtccaacatccctggactgaaaagcaagcacgcacctctgacccctaaagaagaggagtacctgcaggcccaggtgcggagcagaagcaagctggacgcccctaaggtggatctgctggtgaagaattgcctcctgcccctgagagagtacttcaagtatttcagccagaatagtctgcccctgggaggcagcggcggcggcgccctggtgacatttgaggacgtcgccgtgcggttcacccaggaggaatgggctctgctggatccttctcagaaaatcctgtaccgggacgtgatgagagagacataccggaatctgacctccgtgggcatcaactgggaatgttgggaccttgaagcctgcttcagaagcctgggaagaaacctgagagtgcaggtggtgaagagaaagtgcgagctgaccaacagcggcccctgcgccgagggcggcccaagcagcggcgcccctcctcccagcggcggcagcccagccggctccccaacctctaccgaggagggcacctctgagtccgccacccccgagagcggccctggcacctccaccgagcccagcgagggcagcgcacccggcagccctgccggcagccccacctccacagaggagggaaccagcaccgagcccagcgaaggcagcgccccaggcaccagcaccgagcctagtgagcaggagattaaacggatcaacaagatcagaagaagacttgtgaaagacagcaacaccaagaaggccggcaagacaggccccatgaaaaccctgctggttagagtgatgacacccgatctgagagagcggctggaaaacctgagaaagaagcctgaaaatatcccccagcccatcagcaatacatctagagccaacctgaataagctgctgaccgattacaccgaaatgaagaaggcgatcctgcatgtgtactgggaagagttccagaaggaccctgtgggcctgatgagccgggtggcccagcctgccagcaagaagatcgatcagaacaagctgaaacctgagatggacgagaagggcaacctgaccaccgccggctttgcctgctctcagtgtggccagcccctgttcgtgtacaagctggagcaggtgtctgagaagggcaaggcttacaccaactacttcggacggtgcaatgtggccgagcacgaaaagctgatcctgctggcccagctgaagcccgagaaggatagcgacgaagccgtgacatatagcctgggaaagtttgggcagagggccctggatttctacagcattcatgtgaccaaggagtccacccaccccgtgaagcccctggcccagatcgccggaaacagatacgcctccggacctgtgggaaaggccctgagcgacgcatgtatgggcacaatcgcctccttcctgtctaagtaccaggacatcatcatcgaacaccagaaggtggtgaagggcaaccagaagagactggagagcctgcgggagctggccggcaaggaaaacctggaataccctagcgtgaccctgccacctcagcctcacaccaaggagggcgttgatgcctacaacgaagtgatcgcccgggtgcgaatgtgggtgaacctgaacctgtggcagaagctgaagctaagcagagatgatgccaagcctctgctgagactgaagggattcccttcctttcctctggtcgagagacaggccaacgaagtggactggtgggacatggtgtgtaacgtgaagaagctgatcaacgagaaaaaggaggatggcaaggtgttttggcagaatctggctggctacaagagacaggaagccctgagaccatacctgagcagcgaggaagatcggaagaagggaaagaaattcgctcggtaccagctgggcgacctgctgctgcacctggaaaagaagcacggcgaggactggggaaaggtgtacgacgaggcctgggagcggattgacaagaaagtggaaggcctgagcaagcacatcaagctggaagaggaacggagaagcgaggacgcccagagcaaggccgccctgaccgactggctgcgggctaaggccagcttcgtgatcgagggcctgaaggaggccgacaaggacgagttctgcagatgcgagctgaagctgcagaagtggtacggggacctgcggggaaagcccttcgccatcgaagccgagaacagcatcctggacatcagcggcttcagcaagcagtacaactgtgccttcatctggcagaaggacggcgtgaagaagctgaacctgtacctgatcatcaactacttcaagggcggcaagctgcggttcaagaagatcaaacctgaagccttcgaagccaacagattctacaccgtgatcaacaaaaagagcggcgagatcgtgcccatggaggtgaacttcaacttcgacgaccccaacctgatcatcctgcctctggcctttggcaagagacagggcagagaattcatctggaacgacctgctgtccctggaaaccggcagcctgaagctggccaacggaagagtgatcgagaagacactgtacaacagaagaacccggcaggatgagcctgccctgttcgtggccctgaccttcgagcggcgggaggtcctggactcctccaatatcaaaccaatgaacctgatcggcgtggcaagaggcgaaaacatccccgccgtgatcgccctgaccgaccccgagggctgcccactgagccggtttaaggatagcctgggaaacccaacccacatcctgagaatcggcgagagctataaggagaagcagcggaccatccaggccaagaaggaggtggagcagcggagagccggcggctacagccggaagtacgccagcaaagccaagaatctggcagacgatatggtgagaaacaccgctagagatctgctgtactacgccgtgacccaggatgccatgctgatcttcgccaacctgagccggggcttcggccggcagggcaagcggaccttcatggccgagagacagtacacacggatggaggactggctgaccgccaagctggcctacgagggcctgagcaagacctacctgtccaagacactggcccagtacacctccaagacatgcagcaactgtgggtttaccatcaccagcgccgactacgacagggtgctggagaagctgaagaagacagcaacaggctggatgaccacaattaacggcaaggagctgaaggtggagggccagattacctactacaacagatacaagagacagaacgtagtcaaggacctgtccgtcgagctggatagactgagcgaagaatctgtgaacaacgacatctcctcctggacaaagggcagaagcggagaagctctgagcctcctgaagaaaagattctcccatagacccgtgcaggagaagttcgtgtgcctgaactgcggcttcgagacacacgcagccgagcaagccgccctgaacatcgccagatcctggctgttcctgcggagccaggagtacaagaaataccagacaaacaagacaaccggcaacaccgataagagagccttcgtcgagacctggcagtccttttaccggaagaagcttaaggaggtgtggaaacctgccgtgcggtctggcggatctggcggaggctcccagccccagggcaccgtgaccttcaaggacgtggaggtgaccttcagccaggacgagtggggcctgctggacgccagccagaggaacctgtacagggacgtgatgctggagaactacggcaacatggccagcgtggtgggccccttcaccaagcccgccctgatcagctggctggaggccagggagccctggggcctgaacgtgcagggcgtgcagttcaagggcaaccccggcgccgcccccggcggcccaagcagcggcgcccctcctcccagcggcggcagcccagccggctccccaacctctaccgaggagggcacctctgagtccgccacccccgagagcggccctggcacctccaccgagcccagcgagggcagcgcacccggcagccctgccggcagccccacctccacagaggagggaaccagcaccgagcccagcgaaggcagcgccccaggcaccagcaccgagcctagtgagcaggagattaaacggatcaacaagatcagaagaagacttgtgaaagacagcaacaccaagaaggccggcaagacaggccccatgaaaaccctgctggttagagtgatgacacccgatctgagagagcggctggaaaacctgagaaagaagcctgaaaatatcccccagcccatcagcaatacatctagagccaacctgaataagctgctgaccgattacaccgaaatgaagaaggcgatcctgcatgtgtactgggaagagttccagaaggaccctgtgggcctgatgagccgggtggcccagcctgccagcaagaagatcgatcagaacaagctgaaacctgagatggacgagaagggcaacctgaccaccgccggctttgcctgctctcagtgtggccagcccctgttcgtgtacaagctggagcaggtgtctgagaagggcaaggcttacaccaactacttcggacggtgcaatgtggccgagcacgaaaagctgatcctgctggcccagctgaagcccgagaaggatagcgacgaagccgtgacatatagcctgggaaagtttgggcagagggccctggatttctacagcattcatgtgaccaaggagtccacccaccccgtgaagcccctggcccagatcgccggaaacagatacgcctccggacctgtgggaaaggccctgagcgacgcatgtatgggcacaatcgcctccttcctgtctaagtaccaggacatcatcatcgaacaccagaaggtggtgaagggcaaccagaagagactggagagcctgcgggagctggccggcaaggaaaacctggaataccctagcgtgaccctgccacctcagcctcacaccaaggagggcgttgatgcctacaacgaagtgatcgcccgggtgcgaatgtgggtgaacctgaacctgtggcagaagctgaagctaagcagagatgatgccaagcctctgctgagactgaagggattcccttcctttcctctggtcgagagacaggccaacgaagtggactggtgggacatggtgtgtaacgtgaagaagctgatcaacgagaaaaaggaggatggcaaggtgttttggcagaatctggctggctacaagagacaggaagccctgagaccatacctgagcagcgaggaagatcggaagaagggaaagaaattcgctcggtaccagctgggcgacctgctgctgcacctggaaaagaagcacggcgaggactggggaaaggtgtacgacgaggcctgggagcggattgacaagaaagtggaaggcctgagcaagcacatcaagctggaagaggaacggagaagcgaggacgcccagagcaaggccgccctgaccgactggctgcgggctaaggccagcttcgtgatcgagggcctgaaggaggccgacaaggacgagttctgcagatgcgagctgaagctgcagaagtggtacggggacctgcggggaaagcccttcgccatcgaagccgagaacagcatcctggacatcagcggcttcagcaagcagtacaactgtgccttcatctggcagaaggacggcgtgaagaagctgaacctgtacctgatcatcaactacttcaagggcggcaagctgcggttcaagaagatcaaacctgaagccttcgaagccaacagattctacaccgtgatcaacaaaaagagcggcgagatcgtgcccatggaggtgaacttcaacttcgacgaccccaacctgatcatcctgcctctggcctttggcaagagacagggcagagaattcatctggaacgacctgctgtccctggaaaccggcagcctgaagctggccaacggaagagtgatcgagaagacactgtacaacagaagaacccggcaggatgagcctgccctgttcgtggccctgaccttcgagcggcgggaggtcctggactcctccaatatcaaaccaatgaacctgatcggcgtggcaagaggcgaaaacatccccgccgtgatcgccctgaccgaccccgagggctgcccactgagccggtttaaggatagcctgggaaacccaacccacatcctgagaatcggcgagagctataaggagaagcagcggaccatccaggccaagaaggaggtggagcagcggagagccggcggctacagccggaagtacgccagcaaagccaagaatctggcagacgatatggtgagaaacaccgctagagatctgctgtactacgccgtgacccaggatgccatgctgatcttcgccaacctgagccggggcttcggccggcagggcaagcggaccttcatggccgagagacagtacacacggatggaggactggctgaccgccaagctggcctacgagggcctgagcaagacctacctgtccaagacactggcccagtacacctccaagacatgcagcaactgtgggtttaccatcaccagcgccgactacgacagggtgctggagaagctgaagaagacagcaacaggctggatgaccacaattaacggcaaggagctgaaggtggagggccagattacctactacaacagatacaagagacagaacgtagtcaaggacctgtccgtcgagctggatagactgagcgaagaatctgtgaacaacgacatctcctcctggacaaagggcagaagcggagaagctctgagcctcctgaagaaaagattctcccatagacccgtgcaggagaagttcgtgtgcctgaactgcggcttcgagacacacgcagccgagcaagccgccctgaacatcgccagatcctggctgttcctgcggagccaggagtacaagaaataccagacaaacaagacaaccggcaacaccgataagagagccttcgtcgagacctggcagtccttttaccggaagaagcttaaggaggtgtggaaacctgccgtgcggtctggcggatctggcggaggctcctcagccccagggcaccgtgaccttcaaggacgtggaggtgaccttcagccaggacgagtggggcctgctggacgccagccagaggaacctgtacagggacgtgatgctggagaactacggcaacatggccagcgtggtgggccccttcaccaagcccgccctgatcagctggctggaggccagggagccctggggcctgaacgtgcagggcgtgcagttcaagggcaaccccggcgccgcccccggatctggctccggcagcggccccaagaaaaagagaaaagtctaagctgccttctgcggggcttgccttctggccatgcccttcttctctcccttgcacctgtacctcttggtctttgaataaagcctgagtaggaaggctagcaaaaaaaaaaaaaaaaaaaaaaaaaaaaaaaaaaaaaaaaaaaaaaaaaaaaaaaaaaaaaaaaaaaaaaaaaaaaaaaa

SEQ ID NO: 15604 - RNA, 9485 nt, synthetic construct
  source 1..9485: mol_type = other RNA
aggaaataagagagaaaagaagagtaagaagaaatataagagccaccatggcccctaagaagaagcgtaaagtgagccggatggaacgcctcgtctacgaggtgcggcagaagtgcagaaacatcgaggacatctgcatctcctgcggatctctgaacgtgaccctggagcacccactgttcatcggcggcatgtgccagaactgtaaaaactgttttctggagtgtgcctatcaatacgacgatgacggctaccagagctactgcaccatctgttgcggcggaagagaggtgctgatgtgtggaaataacaactgctgccggtgcttctgcgtggaatgcgtggacctgctggtgggccccggcgccgcccaggccgctattaaggaagatccttggaactgctacatgtgcggccacaagggcacatacggcctgctgagacggagagaggactggcctagcagactgcagatgttcttcgccaataaccacgaccaggagttcgacccccctaaggtgtaccctcccgtccccgccgagaagagaaagcccatccgggtcctgagcctgttcgatggcatcgccaccggtctgctggtgctgaaggacctgggcatccaggtggataggtacattgcctccgaggtgtgcgaggactccatcaccgtgggaatggtgcgtcatcagggcaagatcatgtacgtgggcgacgtgcggagcgtgacacagaagcatatccaggagtggggccctttcgacctggtgatcggcggcagcccttgcaatgacctgagcatcgtgaacccagcccggaagggcctgtacgagggaaccggcagactgttcttcgagttttacagactgctgcacgacgcccggcctaaggaaggcgacgaccggcccttcttttggctgttcgagaatgtggtggccatgggagtcagcgacaagcgggatattagccggttcctggagagcaaccccgtgatgatcgatgccaaggaagtgagcgccgcccaccgggccagatacttctggggcaatctgcctggcatgaacagacccctggccagcaccgtgaacgacaagctggagctgcaggagtgcctggagcacggccggatcgccaagttcagcaaggtgagaaccatcaccacccgaagcaacagcatcaaacaaggcaaggaccagcactttcctgtgttcatgaacgagaaggaggacatcctgtggtgtaccgagatggagagagtgttcgggttcccagtccactacacagatgtcagcaacatgtctagactggccagacagagactgctgggaagaagctggtccgtccctgtgatcagacacctgttcgcccctctgaaggagtacttcgcctgcgtgagcagcggcaacagcaacgccaacagccggggccccagcttctctagcggcctggtgccactgtccctgagagggagccacatgggccccatggagatctacaaaaccgtgagcgcctggaagcggcagcctgtgcgcgtgctgagcctgtttcggaatatcgataaagtcctgaaaagcctgggattcctggagagcggctctggctccggcggtggcaccctgaagtacgtggaggatgtgacaaacgtggtcagacgggatgtggagaagtggggccccttcgatctggtgtacggcagcacccaacccctgggcagctcttgtgaccggtgccctggctggtacatgtttcagttccaccggatcctgcagtacgccctgccgagacaggagtcccagcggccattcttttggattttcatggacaacttgctgctgaccgaggatgaccaggaaactaccactcggttcctgcagaccgaagccgtgaccctgcaggacgtgagaggccgggactaccagaacgccatgcgggtgtggtccaacatccctggactgaaaagcaagcacgcacctctgacccctaaagaagaggagtacctgcaggcccaggtgcggagcagaagcaagctggacgcccctaaggtggatctgctggtgaagaattgcctcctgcccctgagagagtacttcaagtatttcagccagaatagtctgcccctgggaggcagcggcggcggcgccctggtgacatttgaggacgtcgccgtgcggttcacccaggaggaatgggctctgctggatccttctcagaaaatcctgtaccgggacgtgatgagagagacataccggaatctgacctccgtgggcatcaactgggaatgttgggaccttgaagcctgcttcagaagcctgggaagaaacctgagagtgcaggtggtgaagagaaagtgcgagctgaccaacagcggcccctgcgccgagggcggcccaagcagcggcgcccctcctcccagcggcggcagcccagccggctccccaacctctaccgaggagggcacctctgagtccgccacccccgagagcggccctggcacctccaccgagcccagcgagggcagcgcacccggcagccctgccggcagccccacctccacagaggagggaaccagcaccgagcccagcgaaggcagcgccccaggcaccagcaccgagcctagtgagcaggagattaaacggatcaacaagatcagaagaagacttgtgaaagacagcaacaccaagaaggccggcaagacaggccccatgaaaaccctgctggttagagtgatgacacccgatctgagagagcggctggaaaacctgagaaagaagcctgaaaatatcccccagcccatcagcaatacatctagagccaacctgaataagctgctgaccgattacaccgaaatgaagaaggcgatcctgcatgtgtactgggaagagttccagaaggaccctgtgggcctgatgagccgggtggcccagcctgccagcaagaagatcgatcagaacaagctgaaacctgagatggacgagaagggcaacctgaccaccgccggctttgcctgctctcagtgtggccagcccctgttcgtgtacaagctggagcaggtgtctgagaagggcaaggcttacaccaactacttcggacggtgcaatgtggccgagcacgaaaagctgatcctgctggcccagctgaagcccgagaaggatagcgacgaagccgtgacatatagcctgggaaagtttgggcagagggccctggatttctacagcattcatgtgaccaaggagtccacccaccccgtgaagcccctggcccagatcgccggaaacagatacgcctccggacctgtgggaaaggccctgagcgacgcatgtatgggcacaatcgcctccttcctgtctaagtaccaggacatcatcatcgaacaccagaaggtggtgaagggcaaccagaagagactggagagcctgcgggagctggccggcaaggaaaacctggaataccctagcgtgaccctgccacctcagcctcacaccaaggagggcgttgatgcctacaacgaagtgatcgcccgggtgcgaatgtgggtgaacctgaacctgtggcagaagctgaagctaagcagagatgatgccaagcctctgctgagactgaagggattcccttcctttcctctggtcgagagacaggccaacgaagtggactggtgggacatggtgtgtaacgtgaagaagctgatcaacgagaaaaaggaggatggcaaggtgttttggcagaatctggctggctacaagagacaggaagccctgagaccatacctgagcagcgaggaagatcggaagaagggaaagaaattcgctcggtaccagctgggcgacctgctgctgcacctggaaaagaagcacggcgaggactggggaaaggtgtacgacgaggcctgggagcggattgacaagaaagtggaaggcctgagcaagcacatcaagctggaagaggaacggagaagcgaggacgcccagagcaaggccgccctgaccgactggctgcgggctaaggccagcttcgtgatcgagggcctgaaggaggccgacaaggacgagttctgcagatgcgagctgaagctgcagaagtggtacggggacctgcggggaaagcccttcgccatcgaagccgagaacagcatcctggacatcagcggcttcagcaagcagtacaactgtgccttcatctggcagaaggacggcgtgaagaagctgaacctgtacctgatcatcaactacttcaagggcggcaagctgcggttcaagaagatcaaacctgaagccttcgaagccaacagattctacaccgtgatcaacaaaaagagcggcgagatcgtgcccatggaggtgaacttcaacttcgacgaccccaacctgatcatcctgcctctggcctttggcaagagacagggcagagaattcatctggaacgacctgctgtccctggaaaccggcagcctgaagctggccaacggaagagtgatcgagaagacactgtacaacagaagaacccggcaggatgagcctgccctgttcgtggccctgaccttcgagcggcgggaggtcctggactcctccaatatcaaaccaatgaacctgatcggcgtggcaagaggcgaaaacatccccgccgtgatcgccctgaccgaccccgagggctgcccactgagccggtttaaggatagcctgggaaacccaacccacatcctgagaatcggcgagagctataaggagaagcagcggaccatccaggccaagaaggaggtggagcagcggagagccggcggctacagccggaagtacgccagcaaagccaagaatctggcagacgatatggtgagaaacaccgctagagatctgctgtactacgccgtgacccaggatgccatgctgatcttcgccaacctgagccggggcttcggccggcagggcaagcggaccttcatggccgagagacagtacacacggatggaggactggctgaccgccaagctggcctacgagggcctgagcaagacctacctgtccaagacactggcccagtacacctccaagacatgcagcaactgtgggtttaccatcaccagcgccgactacgacagggtgctggagaagctgaagaagacagcaacaggctggatgaccacaattaacggcaaggagctgaaggtggagggccagattacctactacaacagatacaagagacagaacgtagtcaaggacctgtccgtcgagctggatagactgagcgaagaatctgtgaacaacgacatctcctcctggacaaagggcagaagcggagaagctctgagcctcctgaagaaaagattctcccatagacccgtgcaggagaagttcgtgtgcctgaactgcggcttcgagacacacgcagccgagcaagccgccctgaacatcgccagatcctggctgttcctgcggagccaggagtacaagaaataccagacaaacaagacaaccggcaacaccgataagagagccttcgtcgagacctggcagtccttttaccggaagaagcttaaggaggtgtggaaacctgccgtgcggtctggcggatctggcggaggctccgtgcaggagcccgtgaccttcaaggacgtggccgtggacttcacccaggaggagtggggccagctggacctggtgcagaggaccctgtacagggacgtgatgctggagacctacggccacctgctgagcgtgggcaaccagatcgccaagcccgaggtgatcagcctgctggagcagggcgaggagccctggagcgtggagcaggcctgcccccagagggcctgccccgagtggatgaggaacggcggcccaagcagcggcgcccctcctcccagcggcggcagcccagccggctccccaacctctaccgaggagggcacctctgagtccgccacccccgagagcggccctggcacctccaccgagcccagcgagggcagcgcacccggcagccctgccggcagccccacctccacagaggagggaaccagcaccgagcccagcgaaggcagcgccccaggcaccagcaccgagcctagtgagcaggagattaaacggatcaacaagatcagaagaagacttgtgaaagacagcaacaccaagaaggccggcaagacaggccccatgaaaaccctgctggttagagtgatgacacccgatctgagagagcggctggaaaacctgagaaagaagcctgaaaatatcccccagcccatcagcaatacatctagagccaacctgaataagctgctgaccgattacaccgaaatgaagaaggcgatcctgcatgtgtactgggaagagttccagaaggaccctgtgggcctgatgagccgggtggcccagcctgccagcaagaagatcgatcagaacaagctgaaacctgagatggacgagaagggcaacctgaccaccgccggctttgcctgctctcagtgtggccagcccctgttcgtgtacaagctggagcaggtgtctgagaagggcaaggcttacaccaactacttcggacggtgcaatgtggccgagcacgaaaagctgatcctgctggcccagctgaagcccgagaaggatagcgacgaagccgtgacatatagcctgggaaagtttgggcagagggccctggatttctacagcattcatgtgaccaaggagtccacccaccccgtgaagcccctggcccagatcgccggaaacagatacgcctccggacctgtgggaaaggccctgagcgacgcatgtatgggcacaatcgcctccttcctgtctaagtaccaggacatcatcatcgaacaccagaaggtggtgaagggcaaccagaagagactggagagcctgcgggagctggccggcaaggaaaacctggaataccctagcgtgaccctgccacctcagcctcacaccaaggagggcgttgatgcctacaacgaagtgatcgcccgggtgcgaatgtgggtgaacctgaacctgtggcagaagctgaagctaagcagagatgatgccaagcctctgctgagactgaagggattcccttcctttcctctggtcgagagacaggccaacgaagtggactggtgggacatggtgtgtaacgtgaagaagctgatcaacgagaaaaaggaggatggcaaggtgttttggcagaatctggctggctacaagagacaggaagccctgagaccatacctgagcagcgaggaagatcggaagaagggaaagaaattcgctcggtaccagctgggcgacctgctgctgcacctggaaaagaagcacggcgaggactggggaaaggtgtacgacgaggcctgggagcggattgacaagaaagtggaaggcctgagcaagcacatcaagctggaagaggaacggagaagcgaggacgcccagagcaaggccgccctgaccgactggctgcgggctaaggccagcttcgtgatcgagggcctgaaggaggccgacaaggacgagttctgcagatgcgagctgaagctgcagaagtggtacggggacctgcggggaaagcccttcgccatcgaagccgagaacagcatcctggacatcagcggcttcagcaagcagtacaactgtgccttcatctggcagaaggacggcgtgaagaagctgaacctgtacctgatcatcaactacttcaagggcggcaagctgcggttcaagaagatcaaacctgaagccttcgaagccaacagattctacaccgtgatcaacaaaaagagcggcgagatcgtgcccatggaggtgaacttcaacttcgacgaccccaacctgatcatcctgcctctggcctttggcaagagacagggcagagaattcatctggaacgacctgctgtccctggaaaccggcagcctgaagctggccaacggaagagtgatcgagaagacactgtacaacagaagaacccggcaggatgagcctgccctgttcgtggccctgaccttcgagcggcgggaggtcctggactcctccaatatcaaaccaatgaacctgatcggcgtggcaagaggcgaaaacatccccgccgtgatcgccctgaccgaccccgagggctgcccactgagccggtttaaggatagcctgggaaacccaacccacatcctgagaatcggcgagagctataaggagaagcagcggaccatccaggccaagaaggaggtggagcagcggagagccggcggctacagccggaagtacgccagcaaagccaagaatctggcagacgatatggtgagaaacaccgctagagatctgctgtactacgccgtgacccaggatgccatgctgatcttcgccaacctgagccggggcttcggccggcagggcaagcggaccttcatggccgagagacagtacacacggatggaggactggctgaccgccaagctggcctacgagggcctgagcaagacctacctgtccaagacactggcccagtacacctccaagacatgcagcaactgtgggtttaccatcaccagcgccgactacgacagggtgctggagaagctgaagaagacagcaacaggctggatgaccacaattaacggcaaggagctgaaggtggagggccagattacctactacaacagatacaagagacagaacgtagtcaaggacctgtccgtcgagctggatagactgagcgaagaatctgtgaacaacgacatctcctcctggacaaagggcagaagcggagaagctctgagcctcctgaagaaaagattctcccatagacccgtgcaggagaagttcgtgtgcctgaactgcggcttcgagacacacgcagccgagcaagccgccctgaacatcgccagatcctggctgttcctgcggagccaggagtacaagaaataccagacaaacaagacaaccggcaacaccgataagagagccttcgtcgagacctggcagtccttttaccggaagaagcttaaggaggtgtggaaacctgccgtgcggtctggcggatctggcggaggctcctgtgcaggagcccgtgaccttcaaggacgtggccgtggacttcacccaggaggagtggggccagctggacctggtgcagaggaccctgtacagggacgtgatgctggagacctacggccacctgctgagcgtgggcaaccagatcgccaagcccgaggtgatcagcctgctggagcagggcgaggagccctggagcgtggagcaggcctgcccccagagggcctgccccgagtggatgaggaacggatctggctccggcagcggccccaagaaaaagagaaaagtctaagctgccttctgcggggcttgccttctggccatgcccttcttctctcccttgcacctgtacctcttggtctttgaataaagcctgagtaggaaggctagcaaaaaaaaaaaaaaaaaaaaaaaaaaaaaaaaaaaaaaaaaaaaaaaaaaaaaaaaaaaaaaaaaaaaaaaaaaaaaaaa

SEQ ID NO: 15605 - RNA, 9485 nt, synthetic construct
  source 1..9485: mol_type = other RNA
aggaaataagagagaaaagaagagtaagaagaaatataagagccaccatggcccctaagaagaagcgtaaagtgagccggatggaacgcctcgtctacgaggtgcggcagaagtgcagaaacatcgaggacatctgcatctcctgcggatctctgaacgtgaccctggagcacccactgttcatcggcggcatgtgccagaactgtaaaaactgttttctggagtgtgcctatcaatacgacgatgacggctaccagagctactgcaccatctgttgcggcggaagagaggtgctgatgtgtggaaataacaactgctgccggtgcttctgcgtggaatgcgtggacctgctggtgggccccggcgccgcccaggccgctattaaggaagatccttggaactgctacatgtgcggccacaagggcacatacggcctgctgagacggagagaggactggcctagcagactgcagatgttcttcgccaataaccacgaccaggagttcgacccccctaaggtgtaccctcccgtccccgccgagaagagaaagcccatccgggtcctgagcctgttcgatggcatcgccaccggtctgctggtgctgaaggacctgggcatccaggtggataggtacattgcctccgaggtgtgcgaggactccatcaccgtgggaatggtgcgtcatcagggcaagatcatgtacgtgggcgacgtgcggagcgtgacacagaagcatatccaggagtggggccctttcgacctggtgatcggcggcagcccttgcaatgacctgagcatcgtgaacccagcccggaagggcctgtacgagggaaccggcagactgttcttcgagttttacagactgctgcacgacgcccggcctaaggaaggcgacgaccggcccttcttttggctgttcgagaatgtggtggccatgggagtcagcgacaagcgggatattagccggttcctggagagcaaccccgtgatgatcgatgccaaggaagtgagcgccgcccaccgggccagatacttctggggcaatctgcctggcatgaacagacccctggccagcaccgtgaacgacaagctggagctgcaggagtgcctggagcacggccggatcgccaagttcagcaaggtgagaaccatcaccacccgaagcaacagcatcaaacaaggcaaggaccagcactttcctgtgttcatgaacgagaaggaggacatcctgtggtgtaccgagatggagagagtgttcgggttcccagtccactacacagatgtcagcaacatgtctagactggccagacagagactgctgggaagaagctggtccgtccctgtgatcagacacctgttcgcccctctgaaggagtacttcgcctgcgtgagcagcggcaacagcaacgccaacagccggggccccagcttctctagcggcctggtgccactgtccctgagagggagccacatgggccccatggagatctacaaaaccgtgagcgcctggaagcggcagcctgtgcgcgtgctgagcctgtttcggaatatcgataaagtcctgaaaagcctgggattcctggagagcggctctggctccggcggtggcaccctgaagtacgtggaggatgtgacaaacgtggtcagacgggatgtggagaagtggggccccttcgatctggtgtacggcagcacccaacccctgggcagctcttgtgaccggtgccctggctggtacatgtttcagttccaccggatcctgcagtacgccctgccgagacaggagtcccagcggccattcttttggattttcatggacaacttgctgctgaccgaggatgaccaggaaactaccactcggttcctgcagaccgaagccgtgaccctgcaggacgtgagaggccgggactaccagaacgccatgcgggtgtggtccaacatccctggactgaaaagcaagcacgcacctctgacccctaaagaagaggagtacctgcaggcccaggtgcggagcagaagcaagctggacgcccctaaggtggatctgctggtgaagaattgcctcctgcccctgagagagtacttcaagtatttcagccagaatagtctgcccctgggaggcagcggcggcggcgccctggtgacatttgaggacgtcgccgtgcggttcacccaggaggaatgggctctgctggatccttctcagaaaatcctgtaccgggacgtgatgagagagacataccggaatctgacctccgtgggcatcaactgggaatgttgggaccttgaagcctgcttcagaagcctgggaagaaacctgagagtgcaggtggtgaagagaaagtgcgagctgaccaacagcggcccctgcgccgagggcggcccaagcagcggcgcccctcctcccagcggcggcagcccagccggctccccaacctctaccgaggagggcacctctgagtccgccacccccgagagcggccctggcacctccaccgagcccagcgagggcagcgcacccggcagccctgccggcagccccacctccacagaggagggaaccagcaccgagcccagcgaaggcagcgccccaggcaccagcaccgagcctagtgagcaggagattaaacggatcaacaagatcagaagaagacttgtgaaagacagcaacaccaagaaggccggcaagacaggccccatgaaaaccctgctggttagagtgatgacacccgatctgagagagcggctggaaaacctgagaaagaagcctgaaaatatcccccagcccatcagcaatacatctagagccaacctgaataagctgctgaccgattacaccgaaatgaagaaggcgatcctgcatgtgtactgggaagagttccagaaggaccctgtgggcctgatgagccgggtggcccagcctgccagcaagaagatcgatcagaacaagctgaaacctgagatggacgagaagggcaacctgaccaccgccggctttgcctgctctcagtgtggccagcccctgttcgtgtacaagctggagcaggtgtctgagaagggcaaggcttacaccaactacttcggacggtgcaatgtggccgagcacgaaaagctgatcctgctggcccagctgaagcccgagaaggatagcgacgaagccgtgacatatagcctgggaaagtttgggcagagggccctggatttctacagcattcatgtgaccaaggagtccacccaccccgtgaagcccctggcccagatcgccggaaacagatacgcctccggacctgtgggaaaggccctgagcgacgcatgtatgggcacaatcgcctccttcctgtctaagtaccaggacatcatcatcgaacaccagaaggtggtgaagggcaaccagaagagactggagagcctgcgggagctggccggcaaggaaaacctggaataccctagcgtgaccctgccacctcagcctcacaccaaggagggcgttgatgcctacaacgaagtgatcgcccgggtgcgaatgtgggtgaacctgaacctgtggcagaagctgaagctaagcagagatgatgccaagcctctgctgagactgaagggattcccttcctttcctctggtcgagagacaggccaacgaagtggactggtgggacatggtgtgtaacgtgaagaagctgatcaacgagaaaaaggaggatggcaaggtgttttggcagaatctggctggctacaagagacaggaagccctgagaccatacctgagcagcgaggaagatcggaagaagggaaagaaattcgctcggtaccagctgggcgacctgctgctgcacctggaaaagaagcacggcgaggactggggaaaggtgtacgacgaggcctgggagcggattgacaagaaagtggaaggcctgagcaagcacatcaagctggaagaggaacggagaagcgaggacgcccagagcaaggccgccctgaccgactggctgcgggctaaggccagcttcgtgatcgagggcctgaaggaggccgacaaggacgagttctgcagatgcgagctgaagctgcagaagtggtacggggacctgcggggaaagcccttcgccatcgaagccgagaacagcatcctggacatcagcggcttcagcaagcagtacaactgtgccttcatctggcagaaggacggcgtgaagaagctgaacctgtacctgatcatcaactacttcaagggcggcaagctgcggttcaagaagatcaaacctgaagccttcgaagccaacagattctacaccgtgatcaacaaaaagagcggcgagatcgtgcccatggaggtgaacttcaacttcgacgaccccaacctgatcatcctgcctctggcctttggcaagagacagggcagagaattcatctggaacgacctgctgtccctggaaaccggcagcctgaagctggccaacggaagagtgatcgagaagacactgtacaacagaagaacccggcaggatgagcctgccctgttcgtggccctgaccttcgagcggcgggaggtcctggactcctccaatatcaaaccaatgaacctgatcggcgtggcaagaggcgaaaacatccccgccgtgatcgccctgaccgaccccgagggctgcccactgagccggtttaaggatagcctgggaaacccaacccacatcctgagaatcggcgagagctataaggagaagcagcggaccatccaggccaagaaggaggtggagcagcggagagccggcggctacagccggaagtacgccagcaaagccaagaatctggcagacgatatggtgagaaacaccgctagagatctgctgtactacgccgtgacccaggatgccatgctgatcttcgccaacctgagccggggcttcggccggcagggcaagcggaccttcatggccgagagacagtacacacggatggaggactggctgaccgccaagctggcctacgagggcctgagcaagacctacctgtccaagacactggcccagtacacctccaagacatgcagcaactgtgggtttaccatcaccagcgccgactacgacagggtgctggagaagctgaagaagacagcaacaggctggatgaccacaattaacggcaaggagctgaaggtggagggccagattacctactacaacagatacaagagacagaacgtagtcaaggacctgtccgtcgagctggatagactgagcgaagaatctgtgaacaacgacatctcctcctggacaaagggcagaagcggagaagctctgagcctcctgaagaaaagattctcccatagacccgtgcaggagaagttcgtgtgcctgaactgcggcttcgagacacacgcagccgagcaagccgccctgaacatcgccagatcctggctgttcctgcggagccaggagtacaagaaataccagacaaacaagacaaccggcaacaccgataagagagccttcgtcgagacctggcagtccttttaccggaagaagcttaaggaggtgtggaaacctgccgtgcggtctggcggatctggcggaggctccatgaacgccgtgacctacgacgacgtgcacgtggacttcacctgggacgagtgggccctgctggaccccagccagaagaacctgtacaagaacgtgatgctggagacctacaggaacctgaccgccatcggctacaagtgggaggagcacaacatcaacgagaagttccagaggagcaggaggaacaggaggcacgagaggagccacaccggcgagaagagctacgagtgcaaccagtgcggcggcggcccaagcagcggcgcccctcctcccagcggcggcagcccagccggctccccaacctctaccgaggagggcacctctgagtccgccacccccgagagcggccctggcacctccaccgagcccagcgagggcagcgcacccggcagccctgccggcagccccacctccacagaggagggaaccagcaccgagcccagcgaaggcagcgccccaggcaccagcaccgagcctagtgagcaggagattaaacggatcaacaagatcagaagaagacttgtgaaagacagcaacaccaagaaggccggcaagacaggccccatgaaaaccctgctggttagagtgatgacacccgatctgagagagcggctggaaaacctgagaaagaagcctgaaaatatcccccagcccatcagcaatacatctagagccaacctgaataagctgctgaccgattacaccgaaatgaagaaggcgatcctgcatgtgtactgggaagagttccagaaggaccctgtgggcctgatgagccgggtggcccagcctgccagcaagaagatcgatcagaacaagctgaaacctgagatggacgagaagggcaacctgaccaccgccggctttgcctgctctcagtgtggccagcccctgttcgtgtacaagctggagcaggtgtctgagaagggcaaggcttacaccaactacttcggacggtgcaatgtggccgagcacgaaaagctgatcctgctggcccagctgaagcccgagaaggatagcgacgaagccgtgacatatagcctgggaaagtttgggcagagggccctggatttctacagcattcatgtgaccaaggagtccacccaccccgtgaagcccctggcccagatcgccggaaacagatacgcctccggacctgtgggaaaggccctgagcgacgcatgtatgggcacaatcgcctccttcctgtctaagtaccaggacatcatcatcgaacaccagaaggtggtgaagggcaaccagaagagactggagagcctgcgggagctggccggcaaggaaaacctggaataccctagcgtgaccctgccacctcagcctcacaccaaggagggcgttgatgcctacaacgaagtgatcgcccgggtgcgaatgtgggtgaacctgaacctgtggcagaagctgaagctaagcagagatgatgccaagcctctgctgagactgaagggattcccttcctttcctctggtcgagagacaggccaacgaagtggactggtgggacatggtgtgtaacgtgaagaagctgatcaacgagaaaaaggaggatggcaaggtgttttggcagaatctggctggctacaagagacaggaagccctgagaccatacctgagcagcgaggaagatcggaagaagggaaagaaattcgctcggtaccagctgggcgacctgctgctgcacctggaaaagaagcacggcgaggactggggaaaggtgtacgacgaggcctgggagcggattgacaagaaagtggaaggcctgagcaagcacatcaagctggaagaggaacggagaagcgaggacgcccagagcaaggccgccctgaccgactggctgcgggctaaggccagcttcgtgatcgagggcctgaaggaggccgacaaggacgagttctgcagatgcgagctgaagctgcagaagtggtacggggacctgcggggaaagcccttcgccatcgaagccgagaacagcatcctggacatcagcggcttcagcaagcagtacaactgtgccttcatctggcagaaggacggcgtgaagaagctgaacctgtacctgatcatcaactacttcaagggcggcaagctgcggttcaagaagatcaaacctgaagccttcgaagccaacagattctacaccgtgatcaacaaaaagagcggcgagatcgtgcccatggaggtgaacttcaacttcgacgaccccaacctgatcatcctgcctctggcctttggcaagagacagggcagagaattcatctggaacgacctgctgtccctggaaaccggcagcctgaagctggccaacggaagagtgatcgagaagacactgtacaacagaagaacccggcaggatgagcctgccctgttcgtggccctgaccttcgagcggcgggaggtcctggactcctccaatatcaaaccaatgaacctgatcggcgtggcaagaggcgaaaacatccccgccgtgatcgccctgaccgaccccgagggctgcccactgagccggtttaaggatagcctgggaaacccaacccacatcctgagaatcggcgagagctataaggagaagcagcggaccatccaggccaagaaggaggtggagcagcggagagccggcggctacagccggaagtacgccagcaaagccaagaatctggcagacgatatggtgagaaacaccgctagagatctgctgtactacgccgtgacccaggatgccatgctgatcttcgccaacctgagccggggcttcggccggcagggcaagcggaccttcatggccgagagacagtacacacggatggaggactggctgaccgccaagctggcctacgagggcctgagcaagacctacctgtccaagacactggcccagtacacctccaagacatgcagcaactgtgggtttaccatcaccagcgccgactacgacagggtgctggagaagctgaagaagacagcaacaggctggatgaccacaattaacggcaaggagctgaaggtggagggccagattacctactacaacagatacaagagacagaacgtagtcaaggacctgtccgtcgagctggatagactgagcgaagaatctgtgaacaacgacatctcctcctggacaaagggcagaagcggagaagctctgagcctcctgaagaaaagattctcccatagacccgtgcaggagaagttcgtgtgcctgaactgcggcttcgagacacacgcagccgagcaagccgccctgaacatcgccagatcctggctgttcctgcggagccaggagtacaagaaataccagacaaacaagacaaccggcaacaccgataagagagccttcgtcgagacctggcagtccttttaccggaagaagcttaaggaggtgtggaaacctgccgtgcggtctggcggatctggcggaggctcctatgaacgccgtgacctacgacgacgtgcacgtggacttcacctgggacgagtgggccctgctggaccccagccagaagaacctgtacaagaacgtgatgctggagacctacaggaacctgaccgccatcggctacaagtgggaggagcacaacatcaacgagaagttccagaggagcaggaggaacaggaggcacgagaggagccacaccggcgagaagagctacgagtgcaaccagtgcggcggatctggctccggcagcggccccaagaaaaagagaaaagtctaagctgccttctgcggggcttgccttctggccatgcccttcttctctcccttgcacctgtacctcttggtctttgaataaagcctgagtaggaaggctagcaaaaaaaaaaaaaaaaaaaaaaaaaaaaaaaaaaaaaaaaaaaaaaaaaaaaaaaaaaaaaaaaaaaaaaaaaaaaaaaa

SEQ ID NO: 15606 - RNA, 9485 nt, synthetic construct
  source 1..9485: mol_type = other RNA
aggaaataagagagaaaagaagagtaagaagaaatataagagccaccatggcccctaagaagaagcgtaaagtgagccggatggaacgcctcgtctacgaggtgcggcagaagtgcagaaacatcgaggacatctgcatctcctgcggatctctgaacgtgaccctggagcacccactgttcatcggcggcatgtgccagaactgtaaaaactgttttctggagtgtgcctatcaatacgacgatgacggctaccagagctactgcaccatctgttgcggcggaagagaggtgctgatgtgtggaaataacaactgctgccggtgcttctgcgtggaatgcgtggacctgctggtgggccccggcgccgcccaggccgctattaaggaagatccttggaactgctacatgtgcggccacaagggcacatacggcctgctgagacggagagaggactggcctagcagactgcagatgttcttcgccaataaccacgaccaggagttcgacccccctaaggtgtaccctcccgtccccgccgagaagagaaagcccatccgggtcctgagcctgttcgatggcatcgccaccggtctgctggtgctgaaggacctgggcatccaggtggataggtacattgcctccgaggtgtgcgaggactccatcaccgtgggaatggtgcgtcatcagggcaagatcatgtacgtgggcgacgtgcggagcgtgacacagaagcatatccaggagtggggccctttcgacctggtgatcggcggcagcccttgcaatgacctgagcatcgtgaacccagcccggaagggcctgtacgagggaaccggcagactgttcttcgagttttacagactgctgcacgacgcccggcctaaggaaggcgacgaccggcccttcttttggctgttcgagaatgtggtggccatgggagtcagcgacaagcgggatattagccggttcctggagagcaaccccgtgatgatcgatgccaaggaagtgagcgccgcccaccgggccagatacttctggggcaatctgcctggcatgaacagacccctggccagcaccgtgaacgacaagctggagctgcaggagtgcctggagcacggccggatcgccaagttcagcaaggtgagaaccatcaccacccgaagcaacagcatcaaacaaggcaaggaccagcactttcctgtgttcatgaacgagaaggaggacatcctgtggtgtaccgagatggagagagtgttcgggttcccagtccactacacagatgtcagcaacatgtctagactggccagacagagactgctgggaagaagctggtccgtccctgtgatcagacacctgttcgcccctctgaaggagtacttcgcctgcgtgagcagcggcaacagcaacgccaacagccggggccccagcttctctagcggcctggtgccactgtccctgagagggagccacatgggccccatggagatctacaaaaccgtgagcgcctggaagcggcagcctgtgcgcgtgctgagcctgtttcggaatatcgataaagtcctgaaaagcctgggattcctggagagcggctctggctccggcggtggcaccctgaagtacgtggaggatgtgacaaacgtggtcagacgggatgtggagaagtggggccccttcgatctggtgtacggcagcacccaacccctgggcagctcttgtgaccggtgccctggctggtacatgtttcagttccaccggatcctgcagtacgccctgccgagacaggagtcccagcggccattcttttggattttcatggacaacttgctgctgaccgaggatgaccaggaaactaccactcggttcctgcagaccgaagccgtgaccctgcaggacgtgagaggccgggactaccagaacgccatgcgggtgtggtccaacatccctggactgaaaagcaagcacgcacctctgacccctaaagaagaggagtacctgcaggcccaggtgcggagcagaagcaagctggacgcccctaaggtggatctgctggtgaagaattgcctcctgcccctgagagagtacttcaagtatttcagccagaatagtctgcccctgggaggcagcggcggcggcgccctggtgacatttgaggacgtcgccgtgcggttcacccaggaggaatgggctctgctggatccttctcagaaaatcctgtaccgggacgtgatgagagagacataccggaatctgacctccgtgggcatcaactgggaatgttgggaccttgaagcctgcttcagaagcctgggaagaaacctgagagtgcaggtggtgaagagaaagtgcgagctgaccaacagcggcccctgcgccgagggcggcccaagcagcggcgcccctcctcccagcggcggcagcccagccggctccccaacctctaccgaggagggcacctctgagtccgccacccccgagagcggccctggcacctccaccgagcccagcgagggcagcgcacccggcagccctgccggcagccccacctccacagaggagggaaccagcaccgagcccagcgaaggcagcgccccaggcaccagcaccgagcctagtgagcaggagattaaacggatcaacaagatcagaagaagacttgtgaaagacagcaacaccaagaaggccggcaagacaggccccatgaaaaccctgctggttagagtgatgacacccgatctgagagagcggctggaaaacctgagaaagaagcctgaaaatatcccccagcccatcagcaatacatctagagccaacctgaataagctgctgaccgattacaccgaaatgaagaaggcgatcctgcatgtgtactgggaagagttccagaaggaccctgtgggcctgatgagccgggtggcccagcctgccagcaagaagatcgatcagaacaagctgaaacctgagatggacgagaagggcaacctgaccaccgccggctttgcctgctctcagtgtggccagcccctgttcgtgtacaagctggagcaggtgtctgagaagggcaaggcttacaccaactacttcggacggtgcaatgtggccgagcacgaaaagctgatcctgctggcccagctgaagcccgagaaggatagcgacgaagccgtgacatatagcctgggaaagtttgggcagagggccctggatttctacagcattcatgtgaccaaggagtccacccaccccgtgaagcccctggcccagatcgccggaaacagatacgcctccggacctgtgggaaaggccctgagcgacgcatgtatgggcacaatcgcctccttcctgtctaagtaccaggacatcatcatcgaacaccagaaggtggtgaagggcaaccagaagagactggagagcctgcgggagctggccggcaaggaaaacctggaataccctagcgtgaccctgccacctcagcctcacaccaaggagggcgttgatgcctacaacgaagtgatcgcccgggtgcgaatgtgggtgaacctgaacctgtggcagaagctgaagctaagcagagatgatgccaagcctctgctgagactgaagggattcccttcctttcctctggtcgagagacaggccaacgaagtggactggtgggacatggtgtgtaacgtgaagaagctgatcaacgagaaaaaggaggatggcaaggtgttttggcagaatctggctggctacaagagacaggaagccctgagaccatacctgagcagcgaggaagatcggaagaagggaaagaaattcgctcggtaccagctgggcgacctgctgctgcacctggaaaagaagcacggcgaggactggggaaaggtgtacgacgaggcctgggagcggattgacaagaaagtggaaggcctgagcaagcacatcaagctggaagaggaacggagaagcgaggacgcccagagcaaggccgccctgaccgactggctgcgggctaaggccagcttcgtgatcgagggcctgaaggaggccgacaaggacgagttctgcagatgcgagctgaagctgcagaagtggtacggggacctgcggggaaagcccttcgccatcgaagccgagaacagcatcctggacatcagcggcttcagcaagcagtacaactgtgccttcatctggcagaaggacggcgtgaagaagctgaacctgtacctgatcatcaactacttcaagggcggcaagctgcggttcaagaagatcaaacctgaagccttcgaagccaacagattctacaccgtgatcaacaaaaagagcggcgagatcgtgcccatggaggtgaacttcaacttcgacgaccccaacctgatcatcctgcctctggcctttggcaagagacagggcagagaattcatctggaacgacctgctgtccctggaaaccggcagcctgaagctggccaacggaagagtgatcgagaagacactgtacaacagaagaacccggcaggatgagcctgccctgttcgtggccctgaccttcgagcggcgggaggtcctggactcctccaatatcaaaccaatgaacctgatcggcgtggcaagaggcgaaaacatccccgccgtgatcgccctgaccgaccccgagggctgcccactgagccggtttaaggatagcctgggaaacccaacccacatcctgagaatcggcgagagctataaggagaagcagcggaccatccaggccaagaaggaggtggagcagcggagagccggcggctacagccggaagtacgccagcaaagccaagaatctggcagacgatatggtgagaaacaccgctagagatctgctgtactacgccgtgacccaggatgccatgctgatcttcgccaacctgagccggggcttcggccggcagggcaagcggaccttcatggccgagagacagtacacacggatggaggactggctgaccgccaagctggcctacgagggcctgagcaagacctacctgtccaagacactggcccagtacacctccaagacatgcagcaactgtgggtttaccatcaccagcgccgactacgacagggtgctggagaagctgaagaagacagcaacaggctggatgaccacaattaacggcaaggagctgaaggtggagggccagattacctactacaacagatacaagagacagaacgtagtcaaggacctgtccgtcgagctggatagactgagcgaagaatctgtgaacaacgacatctcctcctggacaaagggcagaagcggagaagctctgagcctcctgaagaaaagattctcccatagacccgtgcaggagaagttcgtgtgcctgaactgcggcttcgagacacacgcagccgagcaagccgccctgaacatcgccagatcctggctgttcctgcggagccaggagtacaagaaataccagacaaacaagacaaccggcaacaccgataagagagccttcgtcgagacctggcagtccttttaccggaagaagcttaaggaggtgtggaaacctgccgtgcggtctggcggatctggcggaggctccgtgaacgacctggtgaccttcaaggacgtggccatcgacttcagccaggaggagtggcagtggatgaaccccgcccagaagaggctgtacaggagcatgatgctggagaactaccagagcctggtgagcctgggcctgtgcgtgagcaagccctacgtgatcagcctgctggagcagggcagggagccctgggagatgaccagcgagatgaggaggagccccttcagcgactgggagagcatcggcggcccaagcagcggcgcccctcctcccagcggcggcagcccagccggctccccaacctctaccgaggagggcacctctgagtccgccacccccgagagcggccctggcacctccaccgagcccagcgagggcagcgcacccggcagccctgccggcagccccacctccacagaggagggaaccagcaccgagcccagcgaaggcagcgccccaggcaccagcaccgagcctagtgagcaggagattaaacggatcaacaagatcagaagaagacttgtgaaagacagcaacaccaagaaggccggcaagacaggccccatgaaaaccctgctggttagagtgatgacacccgatctgagagagcggctggaaaacctgagaaagaagcctgaaaatatcccccagcccatcagcaatacatctagagccaacctgaataagctgctgaccgattacaccgaaatgaagaaggcgatcctgcatgtgtactgggaagagttccagaaggaccctgtgggcctgatgagccgggtggcccagcctgccagcaagaagatcgatcagaacaagctgaaacctgagatggacgagaagggcaacctgaccaccgccggctttgcctgctctcagtgtggccagcccctgttcgtgtacaagctggagcaggtgtctgagaagggcaaggcttacaccaactacttcggacggtgcaatgtggccgagcacgaaaagctgatcctgctggcccagctgaagcccgagaaggatagcgacgaagccgtgacatatagcctgggaaagtttgggcagagggccctggatttctacagcattcatgtgaccaaggagtccacccaccccgtgaagcccctggcccagatcgccggaaacagatacgcctccggacctgtgggaaaggccctgagcgacgcatgtatgggcacaatcgcctccttcctgtctaagtaccaggacatcatcatcgaacaccagaaggtggtgaagggcaaccagaagagactggagagcctgcgggagctggccggcaaggaaaacctggaataccctagcgtgaccctgccacctcagcctcacaccaaggagggcgttgatgcctacaacgaagtgatcgcccgggtgcgaatgtgggtgaacctgaacctgtggcagaagctgaagctaagcagagatgatgccaagcctctgctgagactgaagggattcccttcctttcctctggtcgagagacaggccaacgaagtggactggtgggacatggtgtgtaacgtgaagaagctgatcaacgagaaaaaggaggatggcaaggtgttttggcagaatctggctggctacaagagacaggaagccctgagaccatacctgagcagcgaggaagatcggaagaagggaaagaaattcgctcggtaccagctgggcgacctgctgctgcacctggaaaagaagcacggcgaggactggggaaaggtgtacgacgaggcctgggagcggattgacaagaaagtggaaggcctgagcaagcacatcaagctggaagaggaacggagaagcgaggacgcccagagcaaggccgccctgaccgactggctgcgggctaaggccagcttcgtgatcgagggcctgaaggaggccgacaaggacgagttctgcagatgcgagctgaagctgcagaagtggtacggggacctgcggggaaagcccttcgccatcgaagccgagaacagcatcctggacatcagcggcttcagcaagcagtacaactgtgccttcatctggcagaaggacggcgtgaagaagctgaacctgtacctgatcatcaactacttcaagggcggcaagctgcggttcaagaagatcaaacctgaagccttcgaagccaacagattctacaccgtgatcaacaaaaagagcggcgagatcgtgcccatggaggtgaacttcaacttcgacgaccccaacctgatcatcctgcctctggcctttggcaagagacagggcagagaattcatctggaacgacctgctgtccctggaaaccggcagcctgaagctggccaacggaagagtgatcgagaagacactgtacaacagaagaacccggcaggatgagcctgccctgttcgtggccctgaccttcgagcggcgggaggtcctggactcctccaatatcaaaccaatgaacctgatcggcgtggcaagaggcgaaaacatccccgccgtgatcgccctgaccgaccccgagggctgcccactgagccggtttaaggatagcctgggaaacccaacccacatcctgagaatcggcgagagctataaggagaagcagcggaccatccaggccaagaaggaggtggagcagcggagagccggcggctacagccggaagtacgccagcaaagccaagaatctggcagacgatatggtgagaaacaccgctagagatctgctgtactacgccgtgacccaggatgccatgctgatcttcgccaacctgagccggggcttcggccggcagggcaagcggaccttcatggccgagagacagtacacacggatggaggactggctgaccgccaagctggcctacgagggcctgagcaagacctacctgtccaagacactggcccagtacacctccaagacatgcagcaactgtgggtttaccatcaccagcgccgactacgacagggtgctggagaagctgaagaagacagcaacaggctggatgaccacaattaacggcaaggagctgaaggtggagggccagattacctactacaacagatacaagagacagaacgtagtcaaggacctgtccgtcgagctggatagactgagcgaagaatctgtgaacaacgacatctcctcctggacaaagggcagaagcggagaagctctgagcctcctgaagaaaagattctcccatagacccgtgcaggagaagttcgtgtgcctgaactgcggcttcgagacacacgcagccgagcaagccgccctgaacatcgccagatcctggctgttcctgcggagccaggagtacaagaaataccagacaaacaagacaaccggcaacaccgataagagagccttcgtcgagacctggcagtccttttaccggaagaagcttaaggaggtgtggaaacctgccgtgcggtctggcggatctggcggaggctcctgtgaacgacctggtgaccttcaaggacgtggccatcgacttcagccaggaggagtggcagtggatgaaccccgcccagaagaggctgtacaggagcatgatgctggagaactaccagagcctggtgagcctgggcctgtgcgtgagcaagccctacgtgatcagcctgctggagcagggcagggagccctgggagatgaccagcgagatgaggaggagccccttcagcgactgggagagcatcggatctggctccggcagcggccccaagaaaaagagaaaagtctaagctgccttctgcggggcttgccttctggccatgcccttcttctctcccttgcacctgtacctcttggtctttgaataaagcctgagtaggaaggctagcaaaaaaaaaaaaaaaaaaaaaaaaaaaaaaaaaaaaaaaaaaaaaaaaaaaaaaaaaaaaaaaaaaaaaaaaaaaaaaaa

SEQ ID NO: 15607 - RNA, 9503 nt, synthetic construct
  source 1..9503: mol_type = other RNA
aggaaataagagagaaaagaagagtaagaagaaatataagagccaccatggcccctaagaagaagcgtaaagtgagccggatggaacgcctcgtctacgaggtgcggcagaagtgcagaaacatcgaggacatctgcatctcctgcggatctctgaacgtgaccctggagcacccactgttcatcggcggcatgtgccagaactgtaaaaactgttttctggagtgtgcctatcaatacgacgatgacggctaccagagctactgcaccatctgttgcggcggaagagaggtgctgatgtgtggaaataacaactgctgccggtgcttctgcgtggaatgcgtggacctgctggtgggccccggcgccgcccaggccgctattaaggaagatccttggaactgctacatgtgcggccacaagggcacatacggcctgctgagacggagagaggactggcctagcagactgcagatgttcttcgccaataaccacgaccaggagttcgacccccctaaggtgtaccctcccgtccccgccgagaagagaaagcccatccgggtcctgagcctgttcgatggcatcgccaccggtctgctggtgctgaaggacctgggcatccaggtggataggtacattgcctccgaggtgtgcgaggactccatcaccgtgggaatggtgcgtcatcagggcaagatcatgtacgtgggcgacgtgcggagcgtgacacagaagcatatccaggagtggggccctttcgacctggtgatcggcggcagcccttgcaatgacctgagcatcgtgaacccagcccggaagggcctgtacgagggaaccggcagactgttcttcgagttttacagactgctgcacgacgcccggcctaaggaaggcgacgaccggcccttcttttggctgttcgagaatgtggtggccatgggagtcagcgacaagcgggatattagccggttcctggagagcaaccccgtgatgatcgatgccaaggaagtgagcgccgcccaccgggccagatacttctggggcaatctgcctggcatgaacagacccctggccagcaccgtgaacgacaagctggagctgcaggagtgcctggagcacggccggatcgccaagttcagcaaggtgagaaccatcaccacccgaagcaacagcatcaaacaaggcaaggaccagcactttcctgtgttcatgaacgagaaggaggacatcctgtggtgtaccgagatggagagagtgttcgggttcccagtccactacacagatgtcagcaacatgtctagactggccagacagagactgctgggaagaagctggtccgtccctgtgatcagacacctgttcgcccctctgaaggagtacttcgcctgcgtgagcagcggcaacagcaacgccaacagccggggccccagcttctctagcggcctggtgccactgtccctgagagggagccacatgggccccatggagatctacaaaaccgtgagcgcctggaagcggcagcctgtgcgcgtgctgagcctgtttcggaatatcgataaagtcctgaaaagcctgggattcctggagagcggctctggctccggcggtggcaccctgaagtacgtggaggatgtgacaaacgtggtcagacgggatgtggagaagtggggccccttcgatctggtgtacggcagcacccaacccctgggcagctcttgtgaccggtgccctggctggtacatgtttcagttccaccggatcctgcagtacgccctgccgagacaggagtcccagcggccattcttttggattttcatggacaacttgctgctgaccgaggatgaccaggaaactaccactcggttcctgcagaccgaagccgtgaccctgcaggacgtgagaggccgggactaccagaacgccatgcgggtgtggtccaacatccctggactgaaaagcaagcacgcacctctgacccctaaagaagaggagtacctgcaggcccaggtgcggagcagaagcaagctggacgcccctaaggtggatctgctggtgaagaattgcctcctgcccctgagagagtacttcaagtatttcagccagaatagtctgcccctgggaggcagcggcggcggcgccctggtgacatttgaggacgtcgccgtgcggttcacccaggaggaatgggctctgctggatccttctcagaaaatcctgtaccgggacgtgatgagagagacataccggaatctgacctccgtgggcatcaactgggaatgttgggaccttgaagcctgcttcagaagcctgggaagaaacctgagagtgcaggtggtgaagagaaagtgcgagctgaccaacagcggcccctgcgccgagggcggcccaagcagcggcgcccctcctcccagcggcggcagcccagccggctccccaacctctaccgaggagggcacctctgagtccgccacccccgagagcggccctggcacctccaccgagcccagcgagggcagcgcacccggcagccctgccggcagccccacctccacagaggagggaaccagcaccgagcccagcgaaggcagcgccccaggcaccagcaccgagcctagtgagcaggagattaaacggatcaacaagatcagaagaagacttgtgaaagacagcaacaccaagaaggccggcaagacaggccccatgaaaaccctgctggttagagtgatgacacccgatctgagagagcggctggaaaacctgagaaagaagcctgaaaatatcccccagcccatcagcaatacatctagagccaacctgaataagctgctgaccgattacaccgaaatgaagaaggcgatcctgcatgtgtactgggaagagttccagaaggaccctgtgggcctgatgagccgggtggcccagcctgccagcaagaagatcgatcagaacaagctgaaacctgagatggacgagaagggcaacctgaccaccgccggctttgcctgctctcagtgtggccagcccctgttcgtgtacaagctggagcaggtgtctgagaagggcaaggcttacaccaactacttcggacggtgcaatgtggccgagcacgaaaagctgatcctgctggcccagctgaagcccgagaaggatagcgacgaagccgtgacatatagcctgggaaagtttgggcagagggccctggatttctacagcattcatgtgaccaaggagtccacccaccccgtgaagcccctggcccagatcgccggaaacagatacgcctccggacctgtgggaaaggccctgagcgacgcatgtatgggcacaatcgcctccttcctgtctaagtaccaggacatcatcatcgaacaccagaaggtggtgaagggcaaccagaagagactggagagcctgcgggagctggccggcaaggaaaacctggaataccctagcgtgaccctgccacctcagcctcacaccaaggagggcgttgatgcctacaacgaagtgatcgcccgggtgcgaatgtgggtgaacctgaacctgtggcagaagctgaagctaagcagagatgatgccaagcctctgctgagactgaagggattcccttcctttcctctggtcgagagacaggccaacgaagtggactggtgggacatggtgtgtaacgtgaagaagctgatcaacgagaaaaaggaggatggcaaggtgttttggcagaatctggctggctacaagagacaggaagccctgagaccatacctgagcagcgaggaagatcggaagaagggaaagaaattcgctcggtaccagctgggcgacctgctgctgcacctggaaaagaagcacggcgaggactggggaaaggtgtacgacgaggcctgggagcggattgacaagaaagtggaaggcctgagcaagcacatcaagctggaagaggaacggagaagcgaggacgcccagagcaaggccgccctgaccgactggctgcgggctaaggccagcttcgtgatcgagggcctgaaggaggccgacaaggacgagttctgcagatgcgagctgaagctgcagaagtggtacggggacctgcggggaaagcccttcgccatcgaagccgagaacagcatcctggacatcagcggcttcagcaagcagtacaactgtgccttcatctggcagaaggacggcgtgaagaagctgaacctgtacctgatcatcaactacttcaagggcggcaagctgcggttcaagaagatcaaacctgaagccttcgaagccaacagattctacaccgtgatcaacaaaaagagcggcgagatcgtgcccatggaggtgaacttcaacttcgacgaccccaacctgatcatcctgcctctggcctttggcaagagacagggcagagaattcatctggaacgacctgctgtccctggaaaccggcagcctgaagctggccaacggaagagtgatcgagaagacactgtacaacagaagaacccggcaggatgagcctgccctgttcgtggccctgaccttcgagcggcgggaggtcctggactcctccaatatcaaaccaatgaacctgatcggcgtggcaagaggcgaaaacatccccgccgtgatcgccctgaccgaccccgagggctgcccactgagccggtttaaggatagcctgggaaacccaacccacatcctgagaatcggcgagagctataaggagaagcagcggaccatccaggccaagaaggaggtggagcagcggagagccggcggctacagccggaagtacgccagcaaagccaagaatctggcagacgatatggtgagaaacaccgctagagatctgctgtactacgccgtgacccaggatgccatgctgatcttcgccaacctgagccggggcttcggccggcagggcaagcggaccttcatggccgagagacagtacacacggatggaggactggctgaccgccaagctggcctacgagggcctgagcaagacctacctgtccaagacactggcccagtacacctccaagacatgcagcaactgtgggtttaccatcaccagcgccgactacgacagggtgctggagaagctgaagaagacagcaacaggctggatgaccacaattaacggcaaggagctgaaggtggagggccagattacctactacaacagatacaagagacagaacgtagtcaaggacctgtccgtcgagctggatagactgagcgaagaatctgtgaacaacgacatctcctcctggacaaagggcagaagcggagaagctctgagcctcctgaagaaaagattctcccatagacccgtgcaggagaagttcgtgtgcctgaactgcggcttcgagacacacgcagccgagcaagccgccctgaacatcgccagatcctggctgttcctgcggagccaggagtacaagaaataccagacaaacaagacaaccggcaacaccgataagagagccttcgtcgagacctggcagtccttttaccggaagaagcttaaggaggtgtggaaacctgccgtgcggtctggcggatctggcggaggctccatcacctacgacgacgtgcacgtgaacttcacctgggaggagtggaccctgctggaccccttccagaagaacctgtacaaggacgtgatgctggagacctacaggaacctgaccaccatcggctacagctgggaggacagcaacatcgaggtgcactgccagagcagcggcaggcacgagaggcacgagaggagccacaccggcgagaagcccagcgtgtacacccagtgcgtggagaccttcgcccaccacggcggcccaagcagcggcgcccctcctcccagcggcggcagcccagccggctccccaacctctaccgaggagggcacctctgagtccgccacccccgagagcggccctggcacctccaccgagcccagcgagggcagcgcacccggcagccctgccggcagccccacctccacagaggagggaaccagcaccgagcccagcgaaggcagcgccccaggcaccagcaccgagcctagtgagcaggagattaaacggatcaacaagatcagaagaagacttgtgaaagacagcaacaccaagaaggccggcaagacaggccccatgaaaaccctgctggttagagtgatgacacccgatctgagagagcggctggaaaacctgagaaagaagcctgaaaatatcccccagcccatcagcaatacatctagagccaacctgaataagctgctgaccgattacaccgaaatgaagaaggcgatcctgcatgtgtactgggaagagttccagaaggaccctgtgggcctgatgagccgggtggcccagcctgccagcaagaagatcgatcagaacaagctgaaacctgagatggacgagaagggcaacctgaccaccgccggctttgcctgctctcagtgtggccagcccctgttcgtgtacaagctggagcaggtgtctgagaagggcaaggcttacaccaactacttcggacggtgcaatgtggccgagcacgaaaagctgatcctgctggcccagctgaagcccgagaaggatagcgacgaagccgtgacatatagcctgggaaagtttgggcagagggccctggatttctacagcattcatgtgaccaaggagtccacccaccccgtgaagcccctggcccagatcgccggaaacagatacgcctccggacctgtgggaaaggccctgagcgacgcatgtatgggcacaatcgcctccttcctgtctaagtaccaggacatcatcatcgaacaccagaaggtggtgaagggcaaccagaagagactggagagcctgcgggagctggccggcaaggaaaacctggaataccctagcgtgaccctgccacctcagcctcacaccaaggagggcgttgatgcctacaacgaagtgatcgcccgggtgcgaatgtgggtgaacctgaacctgtggcagaagctgaagctaagcagagatgatgccaagcctctgctgagactgaagggattcccttcctttcctctggtcgagagacaggccaacgaagtggactggtgggacatggtgtgtaacgtgaagaagctgatcaacgagaaaaaggaggatggcaaggtgttttggcagaatctggctggctacaagagacaggaagccctgagaccatacctgagcagcgaggaagatcggaagaagggaaagaaattcgctcggtaccagctgggcgacctgctgctgcacctggaaaagaagcacggcgaggactggggaaaggtgtacgacgaggcctgggagcggattgacaagaaagtggaaggcctgagcaagcacatcaagctggaagaggaacggagaagcgaggacgcccagagcaaggccgccctgaccgactggctgcgggctaaggccagcttcgtgatcgagggcctgaaggaggccgacaaggacgagttctgcagatgcgagctgaagctgcagaagtggtacggggacctgcggggaaagcccttcgccatcgaagccgagaacagcatcctggacatcagcggcttcagcaagcagtacaactgtgccttcatctggcagaaggacggcgtgaagaagctgaacctgtacctgatcatcaactacttcaagggcggcaagctgcggttcaagaagatcaaacctgaagccttcgaagccaacagattctacaccgtgatcaacaaaaagagcggcgagatcgtgcccatggaggtgaacttcaacttcgacgaccccaacctgatcatcctgcctctggcctttggcaagagacagggcagagaattcatctggaacgacctgctgtccctggaaaccggcagcctgaagctggccaacggaagagtgatcgagaagacactgtacaacagaagaacccggcaggatgagcctgccctgttcgtggccctgaccttcgagcggcgggaggtcctggactcctccaatatcaaaccaatgaacctgatcggcgtggcaagaggcgaaaacatccccgccgtgatcgccctgaccgaccccgagggctgcccactgagccggtttaaggatagcctgggaaacccaacccacatcctgagaatcggcgagagctataaggagaagcagcggaccatccaggccaagaaggaggtggagcagcggagagccggcggctacagccggaagtacgccagcaaagccaagaatctggcagacgatatggtgagaaacaccgctagagatctgctgtactacgccgtgacccaggatgccatgctgatcttcgccaacctgagccggggcttcggccggcagggcaagcggaccttcatggccgagagacagtacacacggatggaggactggctgaccgccaagctggcctacgagggcctgagcaagacctacctgtccaagacactggcccagtacacctccaagacatgcagcaactgtgggtttaccatcaccagcgccgactacgacagggtgctggagaagctgaagaagacagcaacaggctggatgaccacaattaacggcaaggagctgaaggtggagggccagattacctactacaacagatacaagagacagaacgtagtcaaggacctgtccgtcgagctggatagactgagcgaagaatctgtgaacaacgacatctcctcctggacaaagggcagaagcggagaagctctgagcctcctgaagaaaagattctcccatagacccgtgcaggagaagttcgtgtgcctgaactgcggcttcgagacacacgcagccgagcaagccgccctgaacatcgccagatcctggctgttcctgcggagccaggagtacaagaaataccagacaaacaagacaaccggcaacaccgataagagagccttcgtcgagacctggcagtccttttaccggaagaagcttaaggaggtgtggaaacctgccgtgcggtctggcggatctggcggaggctcctatcacctacgacgacgtgcacgtgaacttcacctgggaggagtggaccctgctggaccccttccagaagaacctgtacaaggacgtgatgctggagacctacaggaacctgaccaccatcggctacagctgggaggacagcaacatcgaggtgcactgccagagcagcggcaggcacgagaggcacgagaggagccacaccggcgagaagcccagcgtgtacacccagtgcgtggagaccttcgcccaccacggatctggctccggcagcggccccaagaaaaagagaaaagtctaagctgccttctgcggggcttgccttctggccatgcccttcttctctcccttgcacctgtacctcttggtctttgaataaagcctgagtaggaaggctagcaaaaaaaaaaaaaaaaaaaaaaaaaaaaaaaaaaaaaaaaaaaaaaaaaaaaaaaaaaaaaaaaaaaaaaaaaaaaaaaa

SEQ ID NO: 15608 - RNA, 9485 nt, synthetic construct
  source 1..9485: mol_type = other RNA
aggaaataagagagaaaagaagagtaagaagaaatataagagccaccatggcccctaagaagaagcgtaaagtgagccggatggaacgcctcgtctacgaggtgcggcagaagtgcagaaacatcgaggacatctgcatctcctgcggatctctgaacgtgaccctggagcacccactgttcatcggcggcatgtgccagaactgtaaaaactgttttctggagtgtgcctatcaatacgacgatgacggctaccagagctactgcaccatctgttgcggcggaagagaggtgctgatgtgtggaaataacaactgctgccggtgcttctgcgtggaatgcgtggacctgctggtgggccccggcgccgcccaggccgctattaaggaagatccttggaactgctacatgtgcggccacaagggcacatacggcctgctgagacggagagaggactggcctagcagactgcagatgttcttcgccaataaccacgaccaggagttcgacccccctaaggtgtaccctcccgtccccgccgagaagagaaagcccatccgggtcctgagcctgttcgatggcatcgccaccggtctgctggtgctgaaggacctgggcatccaggtggataggtacattgcctccgaggtgtgcgaggactccatcaccgtgggaatggtgcgtcatcagggcaagatcatgtacgtgggcgacgtgcggagcgtgacacagaagcatatccaggagtggggccctttcgacctggtgatcggcggcagcccttgcaatgacctgagcatcgtgaacccagcccggaagggcctgtacgagggaaccggcagactgttcttcgagttttacagactgctgcacgacgcccggcctaaggaaggcgacgaccggcccttcttttggctgttcgagaatgtggtggccatgggagtcagcgacaagcgggatattagccggttcctggagagcaaccccgtgatgatcgatgccaaggaagtgagcgccgcccaccgggccagatacttctggggcaatctgcctggcatgaacagacccctggccagcaccgtgaacgacaagctggagctgcaggagtgcctggagcacggccggatcgccaagttcagcaaggtgagaaccatcaccacccgaagcaacagcatcaaacaaggcaaggaccagcactttcctgtgttcatgaacgagaaggaggacatcctgtggtgtaccgagatggagagagtgttcgggttcccagtccactacacagatgtcagcaacatgtctagactggccagacagagactgctgggaagaagctggtccgtccctgtgatcagacacctgttcgcccctctgaaggagtacttcgcctgcgtgagcagcggcaacagcaacgccaacagccggggccccagcttctctagcggcctggtgccactgtccctgagagggagccacatgggccccatggagatctacaaaaccgtgagcgcctggaagcggcagcctgtgcgcgtgctgagcctgtttcggaatatcgataaagtcctgaaaagcctgggattcctggagagcggctctggctccggcggtggcaccctgaagtacgtggaggatgtgacaaacgtggtcagacgggatgtggagaagtggggccccttcgatctggtgtacggcagcacccaacccctgggcagctcttgtgaccggtgccctggctggtacatgtttcagttccaccggatcctgcagtacgccctgccgagacaggagtcccagcggccattcttttggattttcatggacaacttgctgctgaccgaggatgaccaggaaactaccactcggttcctgcagaccgaagccgtgaccctgcaggacgtgagaggccgggactaccagaacgccatgcgggtgtggtccaacatccctggactgaaaagcaagcacgcacctctgacccctaaagaagaggagtacctgcaggcccaggtgcggagcagaagcaagctggacgcccctaaggtggatctgctggtgaagaattgcctcctgcccctgagagagtacttcaagtatttcagccagaatagtctgcccctgggaggcagcggcggcggcgccctggtgacatttgaggacgtcgccgtgcggttcacccaggaggaatgggctctgctggatccttctcagaaaatcctgtaccgggacgtgatgagagagacataccggaatctgacctccgtgggcatcaactgggaatgttgggaccttgaagcctgcttcagaagcctgggaagaaacctgagagtgcaggtggtgaagagaaagtgcgagctgaccaacagcggcccctgcgccgagggcggcccaagcagcggcgcccctcctcccagcggcggcagcccagccggctccccaacctctaccgaggagggcacctctgagtccgccacccccgagagcggccctggcacctccaccgagcccagcgagggcagcgcacccggcagccctgccggcagccccacctccacagaggagggaaccagcaccgagcccagcgaaggcagcgccccaggcaccagcaccgagcctagtgagcaggagattaaacggatcaacaagatcagaagaagacttgtgaaagacagcaacaccaagaaggccggcaagacaggccccatgaaaaccctgctggttagagtgatgacacccgatctgagagagcggctggaaaacctgagaaagaagcctgaaaatatcccccagcccatcagcaatacatctagagccaacctgaataagctgctgaccgattacaccgaaatgaagaaggcgatcctgcatgtgtactgggaagagttccagaaggaccctgtgggcctgatgagccgggtggcccagcctgccagcaagaagatcgatcagaacaagctgaaacctgagatggacgagaagggcaacctgaccaccgccggctttgcctgctctcagtgtggccagcccctgttcgtgtacaagctggagcaggtgtctgagaagggcaaggcttacaccaactacttcggacggtgcaatgtggccgagcacgaaaagctgatcctgctggcccagctgaagcccgagaaggatagcgacgaagccgtgacatatagcctgggaaagtttgggcagagggccctggatttctacagcattcatgtgaccaaggagtccacccaccccgtgaagcccctggcccagatcgccggaaacagatacgcctccggacctgtgggaaaggccctgagcgacgcatgtatgggcacaatcgcctccttcctgtctaagtaccaggacatcatcatcgaacaccagaaggtggtgaagggcaaccagaagagactggagagcctgcgggagctggccggcaaggaaaacctggaataccctagcgtgaccctgccacctcagcctcacaccaaggagggcgttgatgcctacaacgaagtgatcgcccgggtgcgaatgtgggtgaacctgaacctgtggcagaagctgaagctaagcagagatgatgccaagcctctgctgagactgaagggattcccttcctttcctctggtcgagagacaggccaacgaagtggactggtgggacatggtgtgtaacgtgaagaagctgatcaacgagaaaaaggaggatggcaaggtgttttggcagaatctggctggctacaagagacaggaagccctgagaccatacctgagcagcgaggaagatcggaagaagggaaagaaattcgctcggtaccagctgggcgacctgctgctgcacctggaaaagaagcacggcgaggactggggaaaggtgtacgacgaggcctgggagcggattgacaagaaagtggaaggcctgagcaagcacatcaagctggaagaggaacggagaagcgaggacgcccagagcaaggccgccctgaccgactggctgcgggctaaggccagcttcgtgatcgagggcctgaaggaggccgacaaggacgagttctgcagatgcgagctgaagctgcagaagtggtacggggacctgcggggaaagcccttcgccatcgaagccgagaacagcatcctggacatcagcggcttcagcaagcagtacaactgtgccttcatctggcagaaggacggcgtgaagaagctgaacctgtacctgatcatcaactacttcaagggcggcaagctgcggttcaagaagatcaaacctgaagccttcgaagccaacagattctacaccgtgatcaacaaaaagagcggcgagatcgtgcccatggaggtgaacttcaacttcgacgaccccaacctgatcatcctgcctctggcctttggcaagagacagggcagagaattcatctggaacgacctgctgtccctggaaaccggcagcctgaagctggccaacggaagagtgatcgagaagacactgtacaacagaagaacccggcaggatgagcctgccctgttcgtggccctgaccttcgagcggcgggaggtcctggactcctccaatatcaaaccaatgaacctgatcggcgtggcaagaggcgaaaacatccccgccgtgatcgccctgaccgaccccgagggctgcccactgagccggtttaaggatagcctgggaaacccaacccacatcctgagaatcggcgagagctataaggagaagcagcggaccatccaggccaagaaggaggtggagcagcggagagccggcggctacagccggaagtacgccagcaaagccaagaatctggcagacgatatggtgagaaacaccgctagagatctgctgtactacgccgtgacccaggatgccatgctgatcttcgccaacctgagccggggcttcggccggcagggcaagcggaccttcatggccgagagacagtacacacggatggaggactggctgaccgccaagctggcctacgagggcctgagcaagacctacctgtccaagacactggcccagtacacctccaagacatgcagcaactgtgggtttaccatcaccagcgccgactacgacagggtgctggagaagctgaagaagacagcaacaggctggatgaccacaattaacggcaaggagctgaaggtggagggccagattacctactacaacagatacaagagacagaacgtagtcaaggacctgtccgtcgagctggatagactgagcgaagaatctgtgaacaacgacatctcctcctggacaaagggcagaagcggagaagctctgagcctcctgaagaaaagattctcccatagacccgtgcaggagaagttcgtgtgcctgaactgcggcttcgagacacacgcagccgagcaagccgccctgaacatcgccagatcctggctgttcctgcggagccaggagtacaagaaataccagacaaacaagacaaccggcaacaccgataagagagccttcgtcgagacctggcagtccttttaccggaagaagcttaaggaggtgtggaaacctgccgtgcggtctggcggatctggcggaggctccgacgccgtgacctaccaggacctgcacatcaccttcacccaggaggagtgggccctgctggacagcagccagaggaacctgtacaaggacgtgatgctggagacctacatgaacctgaacgccatcggctacaagtgggaggacaacgacatcgagcagcactgcaggagcccccagaggcacggcaggcacgagaggagccccaccagggagaagcccagcgcctacatgcagtgcgacaagggcggcccaagcagcggcgcccctcctcccagcggcggcagcccagccggctccccaacctctaccgaggagggcacctctgagtccgccacccccgagagcggccctggcacctccaccgagcccagcgagggcagcgcacccggcagccctgccggcagccccacctccacagaggagggaaccagcaccgagcccagcgaaggcagcgccccaggcaccagcaccgagcctagtgagcaggagattaaacggatcaacaagatcagaagaagacttgtgaaagacagcaacaccaagaaggccggcaagacaggccccatgaaaaccctgctggttagagtgatgacacccgatctgagagagcggctggaaaacctgagaaagaagcctgaaaatatcccccagcccatcagcaatacatctagagccaacctgaataagctgctgaccgattacaccgaaatgaagaaggcgatcctgcatgtgtactgggaagagttccagaaggaccctgtgggcctgatgagccgggtggcccagcctgccagcaagaagatcgatcagaacaagctgaaacctgagatggacgagaagggcaacctgaccaccgccggctttgcctgctctcagtgtggccagcccctgttcgtgtacaagctggagcaggtgtctgagaagggcaaggcttacaccaactacttcggacggtgcaatgtggccgagcacgaaaagctgatcctgctggcccagctgaagcccgagaaggatagcgacgaagccgtgacatatagcctgggaaagtttgggcagagggccctggatttctacagcattcatgtgaccaaggagtccacccaccccgtgaagcccctggcccagatcgccggaaacagatacgcctccggacctgtgggaaaggccctgagcgacgcatgtatgggcacaatcgcctccttcctgtctaagtaccaggacatcatcatcgaacaccagaaggtggtgaagggcaaccagaagagactggagagcctgcgggagctggccggcaaggaaaacctggaataccctagcgtgaccctgccacctcagcctcacaccaaggagggcgttgatgcctacaacgaagtgatcgcccgggtgcgaatgtgggtgaacctgaacctgtggcagaagctgaagctaagcagagatgatgccaagcctctgctgagactgaagggattcccttcctttcctctggtcgagagacaggccaacgaagtggactggtgggacatggtgtgtaacgtgaagaagctgatcaacgagaaaaaggaggatggcaaggtgttttggcagaatctggctggctacaagagacaggaagccctgagaccatacctgagcagcgaggaagatcggaagaagggaaagaaattcgctcggtaccagctgggcgacctgctgctgcacctggaaaagaagcacggcgaggactggggaaaggtgtacgacgaggcctgggagcggattgacaagaaagtggaaggcctgagcaagcacatcaagctggaagaggaacggagaagcgaggacgcccagagcaaggccgccctgaccgactggctgcgggctaaggccagcttcgtgatcgagggcctgaaggaggccgacaaggacgagttctgcagatgcgagctgaagctgcagaagtggtacggggacctgcggggaaagcccttcgccatcgaagccgagaacagcatcctggacatcagcggcttcagcaagcagtacaactgtgccttcatctggcagaaggacggcgtgaagaagctgaacctgtacctgatcatcaactacttcaagggcggcaagctgcggttcaagaagatcaaacctgaagccttcgaagccaacagattctacaccgtgatcaacaaaaagagcggcgagatcgtgcccatggaggtgaacttcaacttcgacgaccccaacctgatcatcctgcctctggcctttggcaagagacagggcagagaattcatctggaacgacctgctgtccctggaaaccggcagcctgaagctggccaacggaagagtgatcgagaagacactgtacaacagaagaacccggcaggatgagcctgccctgttcgtggccctgaccttcgagcggcgggaggtcctggactcctccaatatcaaaccaatgaacctgatcggcgtggcaagaggcgaaaacatccccgccgtgatcgccctgaccgaccccgagggctgcccactgagccggtttaaggatagcctgggaaacccaacccacatcctgagaatcggcgagagctataaggagaagcagcggaccatccaggccaagaaggaggtggagcagcggagagccggcggctacagccggaagtacgccagcaaagccaagaatctggcagacgatatggtgagaaacaccgctagagatctgctgtactacgccgtgacccaggatgccatgctgatcttcgccaacctgagccggggcttcggccggcagggcaagcggaccttcatggccgagagacagtacacacggatggaggactggctgaccgccaagctggcctacgagggcctgagcaagacctacctgtccaagacactggcccagtacacctccaagacatgcagcaactgtgggtttaccatcaccagcgccgactacgacagggtgctggagaagctgaagaagacagcaacaggctggatgaccacaattaacggcaaggagctgaaggtggagggccagattacctactacaacagatacaagagacagaacgtagtcaaggacctgtccgtcgagctggatagactgagcgaagaatctgtgaacaacgacatctcctcctggacaaagggcagaagcggagaagctctgagcctcctgaagaaaagattctcccatagacccgtgcaggagaagttcgtgtgcctgaactgcggcttcgagacacacgcagccgagcaagccgccctgaacatcgccagatcctggctgttcctgcggagccaggagtacaagaaataccagacaaacaagacaaccggcaacaccgataagagagccttcgtcgagacctggcagtccttttaccggaagaagcttaaggaggtgtggaaacctgccgtgcggtctggcggatctggcggaggctcctgacgccgtgacctaccaggacctgcacatcaccttcacccaggaggagtgggccctgctggacagcagccagaggaacctgtacaaggacgtgatgctggagacctacatgaacctgaacgccatcggctacaagtgggaggacaacgacatcgagcagcactgcaggagcccccagaggcacggcaggcacgagaggagccccaccagggagaagcccagcgcctacatgcagtgcgacaagggatctggctccggcagcggccccaagaaaaagagaaaagtctaagctgccttctgcggggcttgccttctggccatgcccttcttctctcccttgcacctgtacctcttggtctttgaataaagcctgagtaggaaggctagcaaaaaaaaaaaaaaaaaaaaaaaaaaaaaaaaaaaaaaaaaaaaaaaaaaaaaaaaaaaaaaaaaaaaaaaaaaaaaaaa

SEQ ID NO: 15609 - RNA, 9485 nt, synthetic construct
  source 1..9485: mol_type = other RNA
aggaaataagagagaaaagaagagtaagaagaaatataagagccaccatggcccctaagaagaagcgtaaagtgagccggatggaacgcctcgtctacgaggtgcggcagaagtgcagaaacatcgaggacatctgcatctcctgcggatctctgaacgtgaccctggagcacccactgttcatcggcggcatgtgccagaactgtaaaaactgttttctggagtgtgcctatcaatacgacgatgacggctaccagagctactgcaccatctgttgcggcggaagagaggtgctgatgtgtggaaataacaactgctgccggtgcttctgcgtggaatgcgtggacctgctggtgggccccggcgccgcccaggccgctattaaggaagatccttggaactgctacatgtgcggccacaagggcacatacggcctgctgagacggagagaggactggcctagcagactgcagatgttcttcgccaataaccacgaccaggagttcgacccccctaaggtgtaccctcccgtccccgccgagaagagaaagcccatccgggtcctgagcctgttcgatggcatcgccaccggtctgctggtgctgaaggacctgggcatccaggtggataggtacattgcctccgaggtgtgcgaggactccatcaccgtgggaatggtgcgtcatcagggcaagatcatgtacgtgggcgacgtgcggagcgtgacacagaagcatatccaggagtggggccctttcgacctggtgatcggcggcagcccttgcaatgacctgagcatcgtgaacccagcccggaagggcctgtacgagggaaccggcagactgttcttcgagttttacagactgctgcacgacgcccggcctaaggaaggcgacgaccggcccttcttttggctgttcgagaatgtggtggccatgggagtcagcgacaagcgggatattagccggttcctggagagcaaccccgtgatgatcgatgccaaggaagtgagcgccgcccaccgggccagatacttctggggcaatctgcctggcatgaacagacccctggccagcaccgtgaacgacaagctggagctgcaggagtgcctggagcacggccggatcgccaagttcagcaaggtgagaaccatcaccacccgaagcaacagcatcaaacaaggcaaggaccagcactttcctgtgttcatgaacgagaaggaggacatcctgtggtgtaccgagatggagagagtgttcgggttcccagtccactacacagatgtcagcaacatgtctagactggccagacagagactgctgggaagaagctggtccgtccctgtgatcagacacctgttcgcccctctgaaggagtacttcgcctgcgtgagcagcggcaacagcaacgccaacagccggggccccagcttctctagcggcctggtgccactgtccctgagagggagccacatgggccccatggagatctacaaaaccgtgagcgcctggaagcggcagcctgtgcgcgtgctgagcctgtttcggaatatcgataaagtcctgaaaagcctgggattcctggagagcggctctggctccggcggtggcaccctgaagtacgtggaggatgtgacaaacgtggtcagacgggatgtggagaagtggggccccttcgatctggtgtacggcagcacccaacccctgggcagctcttgtgaccggtgccctggctggtacatgtttcagttccaccggatcctgcagtacgccctgccgagacaggagtcccagcggccattcttttggattttcatggacaacttgctgctgaccgaggatgaccaggaaactaccactcggttcctgcagaccgaagccgtgaccctgcaggacgtgagaggccgggactaccagaacgccatgcgggtgtggtccaacatccctggactgaaaagcaagcacgcacctctgacccctaaagaagaggagtacctgcaggcccaggtgcggagcagaagcaagctggacgcccctaaggtggatctgctggtgaagaattgcctcctgcccctgagagagtacttcaagtatttcagccagaatagtctgcccctgggaggcagcggcggcggcgccctggtgacatttgaggacgtcgccgtgcggttcacccaggaggaatgggctctgctggatccttctcagaaaatcctgtaccgggacgtgatgagagagacataccggaatctgacctccgtgggcatcaactgggaatgttgggaccttgaagcctgcttcagaagcctgggaagaaacctgagagtgcaggtggtgaagagaaagtgcgagctgaccaacagcggcccctgcgccgagggcggcccaagcagcggcgcccctcctcccagcggcggcagcccagccggctccccaacctctaccgaggagggcacctctgagtccgccacccccgagagcggccctggcacctccaccgagcccagcgagggcagcgcacccggcagccctgccggcagccccacctccacagaggagggaaccagcaccgagcccagcgaaggcagcgccccaggcaccagcaccgagcctagtgagcaggagattaaacggatcaacaagatcagaagaagacttgtgaaagacagcaacaccaagaaggccggcaagacaggccccatgaaaaccctgctggttagagtgatgacacccgatctgagagagcggctggaaaacctgagaaagaagcctgaaaatatcccccagcccatcagcaatacatctagagccaacctgaataagctgctgaccgattacaccgaaatgaagaaggcgatcctgcatgtgtactgggaagagttccagaaggaccctgtgggcctgatgagccgggtggcccagcctgccagcaagaagatcgatcagaacaagctgaaacctgagatggacgagaagggcaacctgaccaccgccggctttgcctgctctcagtgtggccagcccctgttcgtgtacaagctggagcaggtgtctgagaagggcaaggcttacaccaactacttcggacggtgcaatgtggccgagcacgaaaagctgatcctgctggcccagctgaagcccgagaaggatagcgacgaagccgtgacatatagcctgggaaagtttgggcagagggccctggatttctacagcattcatgtgaccaaggagtccacccaccccgtgaagcccctggcccagatcgccggaaacagatacgcctccggacctgtgggaaaggccctgagcgacgcatgtatgggcacaatcgcctccttcctgtctaagtaccaggacatcatcatcgaacaccagaaggtggtgaagggcaaccagaagagactggagagcctgcgggagctggccggcaaggaaaacctggaataccctagcgtgaccctgccacctcagcctcacaccaaggagggcgttgatgcctacaacgaagtgatcgcccgggtgcgaatgtgggtgaacctgaacctgtggcagaagctgaagctaagcagagatgatgccaagcctctgctgagactgaagggattcccttcctttcctctggtcgagagacaggccaacgaagtggactggtgggacatggtgtgtaacgtgaagaagctgatcaacgagaaaaaggaggatggcaaggtgttttggcagaatctggctggctacaagagacaggaagccctgagaccatacctgagcagcgaggaagatcggaagaagggaaagaaattcgctcggtaccagctgggcgacctgctgctgcacctggaaaagaagcacggcgaggactggggaaaggtgtacgacgaggcctgggagcggattgacaagaaagtggaaggcctgagcaagcacatcaagctggaagaggaacggagaagcgaggacgcccagagcaaggccgccctgaccgactggctgcgggctaaggccagcttcgtgatcgagggcctgaaggaggccgacaaggacgagttctgcagatgcgagctgaagctgcagaagtggtacggggacctgcggggaaagcccttcgccatcgaagccgagaacagcatcctggacatcagcggcttcagcaagcagtacaactgtgccttcatctggcagaaggacggcgtgaagaagctgaacctgtacctgatcatcaactacttcaagggcggcaagctgcggttcaagaagatcaaacctgaagccttcgaagccaacagattctacaccgtgatcaacaaaaagagcggcgagatcgtgcccatggaggtgaacttcaacttcgacgaccccaacctgatcatcctgcctctggcctttggcaagagacagggcagagaattcatctggaacgacctgctgtccctggaaaccggcagcctgaagctggccaacggaagagtgatcgagaagacactgtacaacagaagaacccggcaggatgagcctgccctgttcgtggccctgaccttcgagcggcgggaggtcctggactcctccaatatcaaaccaatgaacctgatcggcgtggcaagaggcgaaaacatccccgccgtgatcgccctgaccgaccccgagggctgcccactgagccggtttaaggatagcctgggaaacccaacccacatcctgagaatcggcgagagctataaggagaagcagcggaccatccaggccaagaaggaggtggagcagcggagagccggcggctacagccggaagtacgccagcaaagccaagaatctggcagacgatatggtgagaaacaccgctagagatctgctgtactacgccgtgacccaggatgccatgctgatcttcgccaacctgagccggggcttcggccggcagggcaagcggaccttcatggccgagagacagtacacacggatggaggactggctgaccgccaagctggcctacgagggcctgagcaagacctacctgtccaagacactggcccagtacacctccaagacatgcagcaactgtgggtttaccatcaccagcgccgactacgacagggtgctggagaagctgaagaagacagcaacaggctggatgaccacaattaacggcaaggagctgaaggtggagggccagattacctactacaacagatacaagagacagaacgtagtcaaggacctgtccgtcgagctggatagactgagcgaagaatctgtgaacaacgacatctcctcctggacaaagggcagaagcggagaagctctgagcctcctgaagaaaagattctcccatagacccgtgcaggagaagttcgtgtgcctgaactgcggcttcgagacacacgcagccgagcaagccgccctgaacatcgccagatcctggctgttcctgcggagccaggagtacaagaaataccagacaaacaagacaaccggcaacaccgataagagagccttcgtcgagacctggcagtccttttaccggaagaagcttaaggaggtgtggaaacctgccgtgcggtctggcggatctggcggaggctccagccagagcctggtgaccttcggcgacgtggccgtggacttcagcagggaggagtgggagtggctgagcagcgcccagaggaacctgtacaggaccgtgatgctggagaactacaggaacctggtgagcctgggcctgtgcatcagcaagcccgagatgatcagcagcctggagcagaggaaggagccctggatggccaagaggaggctgaccaggggcaggtgccccgacctgaagatcgtgggcggcccaagcagcggcgcccctcctcccagcggcggcagcccagccggctccccaacctctaccgaggagggcacctctgagtccgccacccccgagagcggccctggcacctccaccgagcccagcgagggcagcgcacccggcagccctgccggcagccccacctccacagaggagggaaccagcaccgagcccagcgaaggcagcgccccaggcaccagcaccgagcctagtgagcaggagattaaacggatcaacaagatcagaagaagacttgtgaaagacagcaacaccaagaaggccggcaagacaggccccatgaaaaccctgctggttagagtgatgacacccgatctgagagagcggctggaaaacctgagaaagaagcctgaaaatatcccccagcccatcagcaatacatctagagccaacctgaataagctgctgaccgattacaccgaaatgaagaaggcgatcctgcatgtgtactgggaagagttccagaaggaccctgtgggcctgatgagccgggtggcccagcctgccagcaagaagatcgatcagaacaagctgaaacctgagatggacgagaagggcaacctgaccaccgccggctttgcctgctctcagtgtggccagcccctgttcgtgtacaagctggagcaggtgtctgagaagggcaaggcttacaccaactacttcggacggtgcaatgtggccgagcacgaaaagctgatcctgctggcccagctgaagcccgagaaggatagcgacgaagccgtgacatatagcctgggaaagtttgggcagagggccctggatttctacagcattcatgtgaccaaggagtccacccaccccgtgaagcccctggcccagatcgccggaaacagatacgcctccggacctgtgggaaaggccctgagcgacgcatgtatgggcacaatcgcctccttcctgtctaagtaccaggacatcatcatcgaacaccagaaggtggtgaagggcaaccagaagagactggagagcctgcgggagctggccggcaaggaaaacctggaataccctagcgtgaccctgccacctcagcctcacaccaaggagggcgttgatgcctacaacgaagtgatcgcccgggtgcgaatgtgggtgaacctgaacctgtggcagaagctgaagctaagcagagatgatgccaagcctctgctgagactgaagggattcccttcctttcctctggtcgagagacaggccaacgaagtggactggtgggacatggtgtgtaacgtgaagaagctgatcaacgagaaaaaggaggatggcaaggtgttttggcagaatctggctggctacaagagacaggaagccctgagaccatacctgagcagcgaggaagatcggaagaagggaaagaaattcgctcggtaccagctgggcgacctgctgctgcacctggaaaagaagcacggcgaggactggggaaaggtgtacgacgaggcctgggagcggattgacaagaaagtggaaggcctgagcaagcacatcaagctggaagaggaacggagaagcgaggacgcccagagcaaggccgccctgaccgactggctgcgggctaaggccagcttcgtgatcgagggcctgaaggaggccgacaaggacgagttctgcagatgcgagctgaagctgcagaagtggtacggggacctgcggggaaagcccttcgccatcgaagccgagaacagcatcctggacatcagcggcttcagcaagcagtacaactgtgccttcatctggcagaaggacggcgtgaagaagctgaacctgtacctgatcatcaactacttcaagggcggcaagctgcggttcaagaagatcaaacctgaagccttcgaagccaacagattctacaccgtgatcaacaaaaagagcggcgagatcgtgcccatggaggtgaacttcaacttcgacgaccccaacctgatcatcctgcctctggcctttggcaagagacagggcagagaattcatctggaacgacctgctgtccctggaaaccggcagcctgaagctggccaacggaagagtgatcgagaagacactgtacaacagaagaacccggcaggatgagcctgccctgttcgtggccctgaccttcgagcggcgggaggtcctggactcctccaatatcaaaccaatgaacctgatcggcgtggcaagaggcgaaaacatccccgccgtgatcgccctgaccgaccccgagggctgcccactgagccggtttaaggatagcctgggaaacccaacccacatcctgagaatcggcgagagctataaggagaagcagcggaccatccaggccaagaaggaggtggagcagcggagagccggcggctacagccggaagtacgccagcaaagccaagaatctggcagacgatatggtgagaaacaccgctagagatctgctgtactacgccgtgacccaggatgccatgctgatcttcgccaacctgagccggggcttcggccggcagggcaagcggaccttcatggccgagagacagtacacacggatggaggactggctgaccgccaagctggcctacgagggcctgagcaagacctacctgtccaagacactggcccagtacacctccaagacatgcagcaactgtgggtttaccatcaccagcgccgactacgacagggtgctggagaagctgaagaagacagcaacaggctggatgaccacaattaacggcaaggagctgaaggtggagggccagattacctactacaacagatacaagagacagaacgtagtcaaggacctgtccgtcgagctggatagactgagcgaagaatctgtgaacaacgacatctcctcctggacaaagggcagaagcggagaagctctgagcctcctgaagaaaagattctcccatagacccgtgcaggagaagttcgtgtgcctgaactgcggcttcgagacacacgcagccgagcaagccgccctgaacatcgccagatcctggctgttcctgcggagccaggagtacaagaaataccagacaaacaagacaaccggcaacaccgataagagagccttcgtcgagacctggcagtccttttaccggaagaagcttaaggaggtgtggaaacctgccgtgcggtctggcggatctggcggaggctcctagccagagcctggtgaccttcggcgacgtggccgtggacttcagcagggaggagtgggagtggctgagcagcgcccagaggaacctgtacaggaccgtgatgctggagaactacaggaacctggtgagcctgggcctgtgcatcagcaagcccgagatgatcagcagcctggagcagaggaaggagccctggatggccaagaggaggctgaccaggggcaggtgccccgacctgaagatcgtgggatctggctccggcagcggccccaagaaaaagagaaaagtctaagctgccttctgcggggcttgccttctggccatgcccttcttctctcccttgcacctgtacctcttggtctttgaataaagcctgagtaggaaggctagcaaaaaaaaaaaaaaaaaaaaaaaaaaaaaaaaaaaaaaaaaaaaaaaaaaaaaaaaaaaaaaaaaaaaaaaaaaaaaaaa

SEQ ID NO: 15610 - RNA, 9485 nt, synthetic construct
  source 1..9485: mol_type = other RNA
aggaaataagagagaaaagaagagtaagaagaaatataagagccaccatggcccctaagaagaagcgtaaagtgagccggatggaacgcctcgtctacgaggtgcggcagaagtgcagaaacatcgaggacatctgcatctcctgcggatctctgaacgtgaccctggagcacccactgttcatcggcggcatgtgccagaactgtaaaaactgttttctggagtgtgcctatcaatacgacgatgacggctaccagagctactgcaccatctgttgcggcggaagagaggtgctgatgtgtggaaataacaactgctgccggtgcttctgcgtggaatgcgtggacctgctggtgggccccggcgccgcccaggccgctattaaggaagatccttggaactgctacatgtgcggccacaagggcacatacggcctgctgagacggagagaggactggcctagcagactgcagatgttcttcgccaataaccacgaccaggagttcgacccccctaaggtgtaccctcccgtccccgccgagaagagaaagcccatccgggtcctgagcctgttcgatggcatcgccaccggtctgctggtgctgaaggacctgggcatccaggtggataggtacattgcctccgaggtgtgcgaggactccatcaccgtgggaatggtgcgtcatcagggcaagatcatgtacgtgggcgacgtgcggagcgtgacacagaagcatatccaggagtggggccctttcgacctggtgatcggcggcagcccttgcaatgacctgagcatcgtgaacccagcccggaagggcctgtacgagggaaccggcagactgttcttcgagttttacagactgctgcacgacgcccggcctaaggaaggcgacgaccggcccttcttttggctgttcgagaatgtggtggccatgggagtcagcgacaagcgggatattagccggttcctggagagcaaccccgtgatgatcgatgccaaggaagtgagcgccgcccaccgggccagatacttctggggcaatctgcctggcatgaacagacccctggccagcaccgtgaacgacaagctggagctgcaggagtgcctggagcacggccggatcgccaagttcagcaaggtgagaaccatcaccacccgaagcaacagcatcaaacaaggcaaggaccagcactttcctgtgttcatgaacgagaaggaggacatcctgtggtgtaccgagatggagagagtgttcgggttcccagtccactacacagatgtcagcaacatgtctagactggccagacagagactgctgggaagaagctggtccgtccctgtgatcagacacctgttcgcccctctgaaggagtacttcgcctgcgtgagcagcggcaacagcaacgccaacagccggggccccagcttctctagcggcctggtgccactgtccctgagagggagccacatgggccccatggagatctacaaaaccgtgagcgcctggaagcggcagcctgtgcgcgtgctgagcctgtttcggaatatcgataaagtcctgaaaagcctgggattcctggagagcggctctggctccggcggtggcaccctgaagtacgtggaggatgtgacaaacgtggtcagacgggatgtggagaagtggggccccttcgatctggtgtacggcagcacccaacccctgggcagctcttgtgaccggtgccctggctggtacatgtttcagttccaccggatcctgcagtacgccctgccgagacaggagtcccagcggccattcttttggattttcatggacaacttgctgctgaccgaggatgaccaggaaactaccactcggttcctgcagaccgaagccgtgaccctgcaggacgtgagaggccgggactaccagaacgccatgcgggtgtggtccaacatccctggactgaaaagcaagcacgcacctctgacccctaaagaagaggagtacctgcaggcccaggtgcggagcagaagcaagctggacgcccctaaggtggatctgctggtgaagaattgcctcctgcccctgagagagtacttcaagtatttcagccagaatagtctgcccctgggaggcagcggcggcggcgccctggtgacatttgaggacgtcgccgtgcggttcacccaggaggaatgggctctgctggatccttctcagaaaatcctgtaccgggacgtgatgagagagacataccggaatctgacctccgtgggcatcaactgggaatgttgggaccttgaagcctgcttcagaagcctgggaagaaacctgagagtgcaggtggtgaagagaaagtgcgagctgaccaacagcggcccctgcgccgagggcggcccaagcagcggcgcccctcctcccagcggcggcagcccagccggctccccaacctctaccgaggagggcacctctgagtccgccacccccgagagcggccctggcacctccaccgagcccagcgagggcagcgcacccggcagccctgccggcagccccacctccacagaggagggaaccagcaccgagcccagcgaaggcagcgccccaggcaccagcaccgagcctagtgagcaggagattaaacggatcaacaagatcagaagaagacttgtgaaagacagcaacaccaagaaggccggcaagacaggccccatgaaaaccctgctggttagagtgatgacacccgatctgagagagcggctggaaaacctgagaaagaagcctgaaaatatcccccagcccatcagcaatacatctagagccaacctgaataagctgctgaccgattacaccgaaatgaagaaggcgatcctgcatgtgtactgggaagagttccagaaggaccctgtgggcctgatgagccgggtggcccagcctgccagcaagaagatcgatcagaacaagctgaaacctgagatggacgagaagggcaacctgaccaccgccggctttgcctgctctcagtgtggccagcccctgttcgtgtacaagctggagcaggtgtctgagaagggcaaggcttacaccaactacttcggacggtgcaatgtggccgagcacgaaaagctgatcctgctggcccagctgaagcccgagaaggatagcgacgaagccgtgacatatagcctgggaaagtttgggcagagggccctggatttctacagcattcatgtgaccaaggagtccacccaccccgtgaagcccctggcccagatcgccggaaacagatacgcctccggacctgtgggaaaggccctgagcgacgcatgtatgggcacaatcgcctccttcctgtctaagtaccaggacatcatcatcgaacaccagaaggtggtgaagggcaaccagaagagactggagagcctgcgggagctggccggcaaggaaaacctggaataccctagcgtgaccctgccacctcagcctcacaccaaggagggcgttgatgcctacaacgaagtgatcgcccgggtgcgaatgtgggtgaacctgaacctgtggcagaagctgaagctaagcagagatgatgccaagcctctgctgagactgaagggattcccttcctttcctctggtcgagagacaggccaacgaagtggactggtgggacatggtgtgtaacgtgaagaagctgatcaacgagaaaaaggaggatggcaaggtgttttggcagaatctggctggctacaagagacaggaagccctgagaccatacctgagcagcgaggaagatcggaagaagggaaagaaattcgctcggtaccagctgggcgacctgctgctgcacctggaaaagaagcacggcgaggactggggaaaggtgtacgacgaggcctgggagcggattgacaagaaagtggaaggcctgagcaagcacatcaagctggaagaggaacggagaagcgaggacgcccagagcaaggccgccctgaccgactggctgcgggctaaggccagcttcgtgatcgagggcctgaaggaggccgacaaggacgagttctgcagatgcgagctgaagctgcagaagtggtacggggacctgcggggaaagcccttcgccatcgaagccgagaacagcatcctggacatcagcggcttcagcaagcagtacaactgtgccttcatctggcagaaggacggcgtgaagaagctgaacctgtacctgatcatcaactacttcaagggcggcaagctgcggttcaagaagatcaaacctgaagccttcgaagccaacagattctacaccgtgatcaacaaaaagagcggcgagatcgtgcccatggaggtgaacttcaacttcgacgaccccaacctgatcatcctgcctctggcctttggcaagagacagggcagagaattcatctggaacgacctgctgtccctggaaaccggcagcctgaagctggccaacggaagagtgatcgagaagacactgtacaacagaagaacccggcaggatgagcctgccctgttcgtggccctgaccttcgagcggcgggaggtcctggactcctccaatatcaaaccaatgaacctgatcggcgtggcaagaggcgaaaacatccccgccgtgatcgccctgaccgaccccgagggctgcccactgagccggtttaaggatagcctgggaaacccaacccacatcctgagaatcggcgagagctataaggagaagcagcggaccatccaggccaagaaggaggtggagcagcggagagccggcggctacagccggaagtacgccagcaaagccaagaatctggcagacgatatggtgagaaacaccgctagagatctgctgtactacgccgtgacccaggatgccatgctgatcttcgccaacctgagccggggcttcggccggcagggcaagcggaccttcatggccgagagacagtacacacggatggaggactggctgaccgccaagctggcctacgagggcctgagcaagacctacctgtccaagacactggcccagtacacctccaagacatgcagcaactgtgggtttaccatcaccagcgccgactacgacagggtgctggagaagctgaagaagacagcaacaggctggatgaccacaattaacggcaaggagctgaaggtggagggccagattacctactacaacagatacaagagacagaacgtagtcaaggacctgtccgtcgagctggatagactgagcgaagaatctgtgaacaacgacatctcctcctggacaaagggcagaagcggagaagctctgagcctcctgaagaaaagattctcccatagacccgtgcaggagaagttcgtgtgcctgaactgcggcttcgagacacacgcagccgagcaagccgccctgaacatcgccagatcctggctgttcctgcggagccaggagtacaagaaataccagacaaacaagacaaccggcaacaccgataagagagccttcgtcgagacctggcagtccttttaccggaagaagcttaaggaggtgtggaaacctgccgtgcggtctggcggatctggcggaggctccagccagggcctggtgagcttcaaggacgtggccgtggacttcacccaggacgagtggcagcagctggaccccgcccagaggaccctgtacagggacgtgatgctggagaactacagccacctggtgagcatgggctaccccgtgagcaagcccgacgtgatcagcaagctggagcagggcgaggacccctggatcatcaagagggacatcagcaactggatctaccccgacgagaaccaggccggcggcccaagcagcggcgcccctcctcccagcggcggcagcccagccggctccccaacctctaccgaggagggcacctctgagtccgccacccccgagagcggccctggcacctccaccgagcccagcgagggcagcgcacccggcagccctgccggcagccccacctccacagaggagggaaccagcaccgagcccagcgaaggcagcgccccaggcaccagcaccgagcctagtgagcaggagattaaacggatcaacaagatcagaagaagacttgtgaaagacagcaacaccaagaaggccggcaagacaggccccatgaaaaccctgctggttagagtgatgacacccgatctgagagagcggctggaaaacctgagaaagaagcctgaaaatatcccccagcccatcagcaatacatctagagccaacctgaataagctgctgaccgattacaccgaaatgaagaaggcgatcctgcatgtgtactgggaagagttccagaaggaccctgtgggcctgatgagccgggtggcccagcctgccagcaagaagatcgatcagaacaagctgaaacctgagatggacgagaagggcaacctgaccaccgccggctttgcctgctctcagtgtggccagcccctgttcgtgtacaagctggagcaggtgtctgagaagggcaaggcttacaccaactacttcggacggtgcaatgtggccgagcacgaaaagctgatcctgctggcccagctgaagcccgagaaggatagcgacgaagccgtgacatatagcctgggaaagtttgggcagagggccctggatttctacagcattcatgtgaccaaggagtccacccaccccgtgaagcccctggcccagatcgccggaaacagatacgcctccggacctgtgggaaaggccctgagcgacgcatgtatgggcacaatcgcctccttcctgtctaagtaccaggacatcatcatcgaacaccagaaggtggtgaagggcaaccagaagagactggagagcctgcgggagctggccggcaaggaaaacctggaataccctagcgtgaccctgccacctcagcctcacaccaaggagggcgttgatgcctacaacgaagtgatcgcccgggtgcgaatgtgggtgaacctgaacctgtggcagaagctgaagctaagcagagatgatgccaagcctctgctgagactgaagggattcccttcctttcctctggtcgagagacaggccaacgaagtggactggtgggacatggtgtgtaacgtgaagaagctgatcaacgagaaaaaggaggatggcaaggtgttttggcagaatctggctggctacaagagacaggaagccctgagaccatacctgagcagcgaggaagatcggaagaagggaaagaaattcgctcggtaccagctgggcgacctgctgctgcacctggaaaagaagcacggcgaggactggggaaaggtgtacgacgaggcctgggagcggattgacaagaaagtggaaggcctgagcaagcacatcaagctggaagaggaacggagaagcgaggacgcccagagcaaggccgccctgaccgactggctgcgggctaaggccagcttcgtgatcgagggcctgaaggaggccgacaaggacgagttctgcagatgcgagctgaagctgcagaagtggtacggggacctgcggggaaagcccttcgccatcgaagccgagaacagcatcctggacatcagcggcttcagcaagcagtacaactgtgccttcatctggcagaaggacggcgtgaagaagctgaacctgtacctgatcatcaactacttcaagggcggcaagctgcggttcaagaagatcaaacctgaagccttcgaagccaacagattctacaccgtgatcaacaaaaagagcggcgagatcgtgcccatggaggtgaacttcaacttcgacgaccccaacctgatcatcctgcctctggcctttggcaagagacagggcagagaattcatctggaacgacctgctgtccctggaaaccggcagcctgaagctggccaacggaagagtgatcgagaagacactgtacaacagaagaacccggcaggatgagcctgccctgttcgtggccctgaccttcgagcggcgggaggtcctggactcctccaatatcaaaccaatgaacctgatcggcgtggcaagaggcgaaaacatccccgccgtgatcgccctgaccgaccccgagggctgcccactgagccggtttaaggatagcctgggaaacccaacccacatcctgagaatcggcgagagctataaggagaagcagcggaccatccaggccaagaaggaggtggagcagcggagagccggcggctacagccggaagtacgccagcaaagccaagaatctggcagacgatatggtgagaaacaccgctagagatctgctgtactacgccgtgacccaggatgccatgctgatcttcgccaacctgagccggggcttcggccggcagggcaagcggaccttcatggccgagagacagtacacacggatggaggactggctgaccgccaagctggcctacgagggcctgagcaagacctacctgtccaagacactggcccagtacacctccaagacatgcagcaactgtgggtttaccatcaccagcgccgactacgacagggtgctggagaagctgaagaagacagcaacaggctggatgaccacaattaacggcaaggagctgaaggtggagggccagattacctactacaacagatacaagagacagaacgtagtcaaggacctgtccgtcgagctggatagactgagcgaagaatctgtgaacaacgacatctcctcctggacaaagggcagaagcggagaagctctgagcctcctgaagaaaagattctcccatagacccgtgcaggagaagttcgtgtgcctgaactgcggcttcgagacacacgcagccgagcaagccgccctgaacatcgccagatcctggctgttcctgcggagccaggagtacaagaaataccagacaaacaagacaaccggcaacaccgataagagagccttcgtcgagacctggcagtccttttaccggaagaagcttaaggaggtgtggaaacctgccgtgcggtctggcggatctggcggaggctcctagccagggcctggtgagcttcaaggacgtggccgtggacttcacccaggacgagtggcagcagctggaccccgcccagaggaccctgtacagggacgtgatgctggagaactacagccacctggtgagcatgggctaccccgtgagcaagcccgacgtgatcagcaagctggagcagggcgaggacccctggatcatcaagagggacatcagcaactggatctaccccgacgagaaccaggccggatctggctccggcagcggccccaagaaaaagagaaaagtctaagctgccttctgcggggcttgccttctggccatgcccttcttctctcccttgcacctgtacctcttggtctttgaataaagcctgagtaggaaggctagcaaaaaaaaaaaaaaaaaaaaaaaaaaaaaaaaaaaaaaaaaaaaaaaaaaaaaaaaaaaaaaaaaaaaaaaaaaaaaaaa

SEQ ID NO: 15611 - RNA, 9485 nt, synthetic construct
  source 1..9485: mol_type = other RNA
aggaaataagagagaaaagaagagtaagaagaaatataagagccaccatggcccctaagaagaagcgtaaagtgagccggatggaacgcctcgtctacgaggtgcggcagaagtgcagaaacatcgaggacatctgcatctcctgcggatctctgaacgtgaccctggagcacccactgttcatcggcggcatgtgccagaactgtaaaaactgttttctggagtgtgcctatcaatacgacgatgacggctaccagagctactgcaccatctgttgcggcggaagagaggtgctgatgtgtggaaataacaactgctgccggtgcttctgcgtggaatgcgtggacctgctggtgggccccggcgccgcccaggccgctattaaggaagatccttggaactgctacatgtgcggccacaagggcacatacggcctgctgagacggagagaggactggcctagcagactgcagatgttcttcgccaataaccacgaccaggagttcgacccccctaaggtgtaccctcccgtccccgccgagaagagaaagcccatccgggtcctgagcctgttcgatggcatcgccaccggtctgctggtgctgaaggacctgggcatccaggtggataggtacattgcctccgaggtgtgcgaggactccatcaccgtgggaatggtgcgtcatcagggcaagatcatgtacgtgggcgacgtgcggagcgtgacacagaagcatatccaggagtggggccctttcgacctggtgatcggcggcagcccttgcaatgacctgagcatcgtgaacccagcccggaagggcctgtacgagggaaccggcagactgttcttcgagttttacagactgctgcacgacgcccggcctaaggaaggcgacgaccggcccttcttttggctgttcgagaatgtggtggccatgggagtcagcgacaagcgggatattagccggttcctggagagcaaccccgtgatgatcgatgccaaggaagtgagcgccgcccaccgggccagatacttctggggcaatctgcctggcatgaacagacccctggccagcaccgtgaacgacaagctggagctgcaggagtgcctggagcacggccggatcgccaagttcagcaaggtgagaaccatcaccacccgaagcaacagcatcaaacaaggcaaggaccagcactttcctgtgttcatgaacgagaaggaggacatcctgtggtgtaccgagatggagagagtgttcgggttcccagtccactacacagatgtcagcaacatgtctagactggccagacagagactgctgggaagaagctggtccgtccctgtgatcagacacctgttcgcccctctgaaggagtacttcgcctgcgtgagcagcggcaacagcaacgccaacagccggggccccagcttctctagcggcctggtgccactgtccctgagagggagccacatgggccccatggagatctacaaaaccgtgagcgcctggaagcggcagcctgtgcgcgtgctgagcctgtttcggaatatcgataaagtcctgaaaagcctgggattcctggagagcggctctggctccggcggtggcaccctgaagtacgtggaggatgtgacaaacgtggtcagacgggatgtggagaagtggggccccttcgatctggtgtacggcagcacccaacccctgggcagctcttgtgaccggtgccctggctggtacatgtttcagttccaccggatcctgcagtacgccctgccgagacaggagtcccagcggccattcttttggattttcatggacaacttgctgctgaccgaggatgaccaggaaactaccactcggttcctgcagaccgaagccgtgaccctgcaggacgtgagaggccgggactaccagaacgccatgcgggtgtggtccaacatccctggactgaaaagcaagcacgcacctctgacccctaaagaagaggagtacctgcaggcccaggtgcggagcagaagcaagctggacgcccctaaggtggatctgctggtgaagaattgcctcctgcccctgagagagtacttcaagtatttcagccagaatagtctgcccctgggaggcagcggcggcggcgccctggtgacatttgaggacgtcgccgtgcggttcacccaggaggaatgggctctgctggatccttctcagaaaatcctgtaccgggacgtgatgagagagacataccggaatctgacctccgtgggcatcaactgggaatgttgggaccttgaagcctgcttcagaagcctgggaagaaacctgagagtgcaggtggtgaagagaaagtgcgagctgaccaacagcggcccctgcgccgagggcggcccaagcagcggcgcccctcctcccagcggcggcagcccagccggctccccaacctctaccgaggagggcacctctgagtccgccacccccgagagcggccctggcacctccaccgagcccagcgagggcagcgcacccggcagccctgccggcagccccacctccacagaggagggaaccagcaccgagcccagcgaaggcagcgccccaggcaccagcaccgagcctagtgagcaggagattaaacggatcaacaagatcagaagaagacttgtgaaagacagcaacaccaagaaggccggcaagacaggccccatgaaaaccctgctggttagagtgatgacacccgatctgagagagcggctggaaaacctgagaaagaagcctgaaaatatcccccagcccatcagcaatacatctagagccaacctgaataagctgctgaccgattacaccgaaatgaagaaggcgatcctgcatgtgtactgggaagagttccagaaggaccctgtgggcctgatgagccgggtggcccagcctgccagcaagaagatcgatcagaacaagctgaaacctgagatggacgagaagggcaacctgaccaccgccggctttgcctgctctcagtgtggccagcccctgttcgtgtacaagctggagcaggtgtctgagaagggcaaggcttacaccaactacttcggacggtgcaatgtggccgagcacgaaaagctgatcctgctggcccagctgaagcccgagaaggatagcgacgaagccgtgacatatagcctgggaaagtttgggcagagggccctggatttctacagcattcatgtgaccaaggagtccacccaccccgtgaagcccctggcccagatcgccggaaacagatacgcctccggacctgtgggaaaggccctgagcgacgcatgtatgggcacaatcgcctccttcctgtctaagtaccaggacatcatcatcgaacaccagaaggtggtgaagggcaaccagaagagactggagagcctgcgggagctggccggcaaggaaaacctggaataccctagcgtgaccctgccacctcagcctcacaccaaggagggcgttgatgcctacaacgaagtgatcgcccgggtgcgaatgtgggtgaacctgaacctgtggcagaagctgaagctaagcagagatgatgccaagcctctgctgagactgaagggattcccttcctttcctctggtcgagagacaggccaacgaagtggactggtgggacatggtgtgtaacgtgaagaagctgatcaacgagaaaaaggaggatggcaaggtgttttggcagaatctggctggctacaagagacaggaagccctgagaccatacctgagcagcgaggaagatcggaagaagggaaagaaattcgctcggtaccagctgggcgacctgctgctgcacctggaaaagaagcacggcgaggactggggaaaggtgtacgacgaggcctgggagcggattgacaagaaagtggaaggcctgagcaagcacatcaagctggaagaggaacggagaagcgaggacgcccagagcaaggccgccctgaccgactggctgcgggctaaggccagcttcgtgatcgagggcctgaaggaggccgacaaggacgagttctgcagatgcgagctgaagctgcagaagtggtacggggacctgcggggaaagcccttcgccatcgaagccgagaacagcatcctggacatcagcggcttcagcaagcagtacaactgtgccttcatctggcagaaggacggcgtgaagaagctgaacctgtacctgatcatcaactacttcaagggcggcaagctgcggttcaagaagatcaaacctgaagccttcgaagccaacagattctacaccgtgatcaacaaaaagagcggcgagatcgtgcccatggaggtgaacttcaacttcgacgaccccaacctgatcatcctgcctctggcctttggcaagagacagggcagagaattcatctggaacgacctgctgtccctggaaaccggcagcctgaagctggccaacggaagagtgatcgagaagacactgtacaacagaagaacccggcaggatgagcctgccctgttcgtggccctgaccttcgagcggcgggaggtcctggactcctccaatatcaaaccaatgaacctgatcggcgtggcaagaggcgaaaacatccccgccgtgatcgccctgaccgaccccgagggctgcccactgagccggtttaaggatagcctgggaaacccaacccacatcctgagaatcggcgagagctataaggagaagcagcggaccatccaggccaagaaggaggtggagcagcggagagccggcggctacagccggaagtacgccagcaaagccaagaatctggcagacgatatggtgagaaacaccgctagagatctgctgtactacgccgtgacccaggatgccatgctgatcttcgccaacctgagccggggcttcggccggcagggcaagcggaccttcatggccgagagacagtacacacggatggaggactggctgaccgccaagctggcctacgagggcctgagcaagacctacctgtccaagacactggcccagtacacctccaagacatgcagcaactgtgggtttaccatcaccagcgccgactacgacagggtgctggagaagctgaagaagacagcaacaggctggatgaccacaattaacggcaaggagctgaaggtggagggccagattacctactacaacagatacaagagacagaacgtagtcaaggacctgtccgtcgagctggatagactgagcgaagaatctgtgaacaacgacatctcctcctggacaaagggcagaagcggagaagctctgagcctcctgaagaaaagattctcccatagacccgtgcaggagaagttcgtgtgcctgaactgcggcttcgagacacacgcagccgagcaagccgccctgaacatcgccagatcctggctgttcctgcggagccaggagtacaagaaataccagacaaacaagacaaccggcaacaccgataagagagccttcgtcgagacctggcagtccttttaccggaagaagcttaaggaggtgtggaaacctgccgtgcggtctggcggatctggcggaggctccgtgcacggcagcgtgaccttcagggacgtggccatcgacttcagccaggaggagtgggagtgcctgcagcccgagcagaggaccctgtacagggacgtgatgctggagaactacagccacctgatcagcctgggcagcagcatcagcaagcccgacgtgatcaccctgctggagcaggagaaggagccctggatggtggtgaggaaggagaccagcaggtggtaccccgacctggagagcaagggcggcccaagcagcggcgcccctcctcccagcggcggcagcccagccggctccccaacctctaccgaggagggcacctctgagtccgccacccccgagagcggccctggcacctccaccgagcccagcgagggcagcgcacccggcagccctgccggcagccccacctccacagaggagggaaccagcaccgagcccagcgaaggcagcgccccaggcaccagcaccgagcctagtgagcaggagattaaacggatcaacaagatcagaagaagacttgtgaaagacagcaacaccaagaaggccggcaagacaggccccatgaaaaccctgctggttagagtgatgacacccgatctgagagagcggctggaaaacctgagaaagaagcctgaaaatatcccccagcccatcagcaatacatctagagccaacctgaataagctgctgaccgattacaccgaaatgaagaaggcgatcctgcatgtgtactgggaagagttccagaaggaccctgtgggcctgatgagccgggtggcccagcctgccagcaagaagatcgatcagaacaagctgaaacctgagatggacgagaagggcaacctgaccaccgccggctttgcctgctctcagtgtggccagcccctgttcgtgtacaagctggagcaggtgtctgagaagggcaaggcttacaccaactacttcggacggtgcaatgtggccgagcacgaaaagctgatcctgctggcccagctgaagcccgagaaggatagcgacgaagccgtgacatatagcctgggaaagtttgggcagagggccctggatttctacagcattcatgtgaccaaggagtccacccaccccgtgaagcccctggcccagatcgccggaaacagatacgcctccggacctgtgggaaaggccctgagcgacgcatgtatgggcacaatcgcctccttcctgtctaagtaccaggacatcatcatcgaacaccagaaggtggtgaagggcaaccagaagagactggagagcctgcgggagctggccggcaaggaaaacctggaataccctagcgtgaccctgccacctcagcctcacaccaaggagggcgttgatgcctacaacgaagtgatcgcccgggtgcgaatgtgggtgaacctgaacctgtggcagaagctgaagctaagcagagatgatgccaagcctctgctgagactgaagggattcccttcctttcctctggtcgagagacaggccaacgaagtggactggtgggacatggtgtgtaacgtgaagaagctgatcaacgagaaaaaggaggatggcaaggtgttttggcagaatctggctggctacaagagacaggaagccctgagaccatacctgagcagcgaggaagatcggaagaagggaaagaaattcgctcggtaccagctgggcgacctgctgctgcacctggaaaagaagcacggcgaggactggggaaaggtgtacgacgaggcctgggagcggattgacaagaaagtggaaggcctgagcaagcacatcaagctggaagaggaacggagaagcgaggacgcccagagcaaggccgccctgaccgactggctgcgggctaaggccagcttcgtgatcgagggcctgaaggaggccgacaaggacgagttctgcagatgcgagctgaagctgcagaagtggtacggggacctgcggggaaagcccttcgccatcgaagccgagaacagcatcctggacatcagcggcttcagcaagcagtacaactgtgccttcatctggcagaaggacggcgtgaagaagctgaacctgtacctgatcatcaactacttcaagggcggcaagctgcggttcaagaagatcaaacctgaagccttcgaagccaacagattctacaccgtgatcaacaaaaagagcggcgagatcgtgcccatggaggtgaacttcaacttcgacgaccccaacctgatcatcctgcctctggcctttggcaagagacagggcagagaattcatctggaacgacctgctgtccctggaaaccggcagcctgaagctggccaacggaagagtgatcgagaagacactgtacaacagaagaacccggcaggatgagcctgccctgttcgtggccctgaccttcgagcggcgggaggtcctggactcctccaatatcaaaccaatgaacctgatcggcgtggcaagaggcgaaaacatccccgccgtgatcgccctgaccgaccccgagggctgcccactgagccggtttaaggatagcctgggaaacccaacccacatcctgagaatcggcgagagctataaggagaagcagcggaccatccaggccaagaaggaggtggagcagcggagagccggcggctacagccggaagtacgccagcaaagccaagaatctggcagacgatatggtgagaaacaccgctagagatctgctgtactacgccgtgacccaggatgccatgctgatcttcgccaacctgagccggggcttcggccggcagggcaagcggaccttcatggccgagagacagtacacacggatggaggactggctgaccgccaagctggcctacgagggcctgagcaagacctacctgtccaagacactggcccagtacacctccaagacatgcagcaactgtgggtttaccatcaccagcgccgactacgacagggtgctggagaagctgaagaagacagcaacaggctggatgaccacaattaacggcaaggagctgaaggtggagggccagattacctactacaacagatacaagagacagaacgtagtcaaggacctgtccgtcgagctggatagactgagcgaagaatctgtgaacaacgacatctcctcctggacaaagggcagaagcggagaagctctgagcctcctgaagaaaagattctcccatagacccgtgcaggagaagttcgtgtgcctgaactgcggcttcgagacacacgcagccgagcaagccgccctgaacatcgccagatcctggctgttcctgcggagccaggagtacaagaaataccagacaaacaagacaaccggcaacaccgataagagagccttcgtcgagacctggcagtccttttaccggaagaagcttaaggaggtgtggaaacctgccgtgcggtctggcggatctggcggaggctcctgtgcacggcagcgtgaccttcagggacgtggccatcgacttcagccaggaggagtgggagtgcctgcagcccgagcagaggaccctgtacagggacgtgatgctggagaactacagccacctgatcagcctgggcagcagcatcagcaagcccgacgtgatcaccctgctggagcaggagaaggagccctggatggtggtgaggaaggagaccagcaggtggtaccccgacctggagagcaagggatctggctccggcagcggccccaagaaaaagagaaaagtctaagctgccttctgcggggcttgccttctggccatgcccttcttctctcccttgcacctgtacctcttggtctttgaataaagcctgagtaggaaggctagcaaaaaaaaaaaaaaaaaaaaaaaaaaaaaaaaaaaaaaaaaaaaaaaaaaaaaaaaaaaaaaaaaaaaaaaaaaaaaaaa

SEQ ID NO: 15612 - RNA, 9485 nt, synthetic construct
  source 1..9485: mol_type = other RNA
aggaaataagagagaaaagaagagtaagaagaaatataagagccaccatggcccctaagaagaagcgtaaagtgagccggatggaacgcctcgtctacgaggtgcggcagaagtgcagaaacatcgaggacatctgcatctcctgcggatctctgaacgtgaccctggagcacccactgttcatcggcggcatgtgccagaactgtaaaaactgttttctggagtgtgcctatcaatacgacgatgacggctaccagagctactgcaccatctgttgcggcggaagagaggtgctgatgtgtggaaataacaactgctgccggtgcttctgcgtggaatgcgtggacctgctggtgggccccggcgccgcccaggccgctattaaggaagatccttggaactgctacatgtgcggccacaagggcacatacggcctgctgagacggagagaggactggcctagcagactgcagatgttcttcgccaataaccacgaccaggagttcgacccccctaaggtgtaccctcccgtccccgccgagaagagaaagcccatccgggtcctgagcctgttcgatggcatcgccaccggtctgctggtgctgaaggacctgggcatccaggtggataggtacattgcctccgaggtgtgcgaggactccatcaccgtgggaatggtgcgtcatcagggcaagatcatgtacgtgggcgacgtgcggagcgtgacacagaagcatatccaggagtggggccctttcgacctggtgatcggcggcagcccttgcaatgacctgagcatcgtgaacccagcccggaagggcctgtacgagggaaccggcagactgttcttcgagttttacagactgctgcacgacgcccggcctaaggaaggcgacgaccggcccttcttttggctgttcgagaatgtggtggccatgggagtcagcgacaagcgggatattagccggttcctggagagcaaccccgtgatgatcgatgccaaggaagtgagcgccgcccaccgggccagatacttctggggcaatctgcctggcatgaacagacccctggccagcaccgtgaacgacaagctggagctgcaggagtgcctggagcacggccggatcgccaagttcagcaaggtgagaaccatcaccacccgaagcaacagcatcaaacaaggcaaggaccagcactttcctgtgttcatgaacgagaaggaggacatcctgtggtgtaccgagatggagagagtgttcgggttcccagtccactacacagatgtcagcaacatgtctagactggccagacagagactgctgggaagaagctggtccgtccctgtgatcagacacctgttcgcccctctgaaggagtacttcgcctgcgtgagcagcggcaacagcaacgccaacagccggggccccagcttctctagcggcctggtgccactgtccctgagagggagccacatgggccccatggagatctacaaaaccgtgagcgcctggaagcggcagcctgtgcgcgtgctgagcctgtttcggaatatcgataaagtcctgaaaagcctgggattcctggagagcggctctggctccggcggtggcaccctgaagtacgtggaggatgtgacaaacgtggtcagacgggatgtggagaagtggggccccttcgatctggtgtacggcagcacccaacccctgggcagctcttgtgaccggtgccctggctggtacatgtttcagttccaccggatcctgcagtacgccctgccgagacaggagtcccagcggccattcttttggattttcatggacaacttgctgctgaccgaggatgaccaggaaactaccactcggttcctgcagaccgaagccgtgaccctgcaggacgtgagaggccgggactaccagaacgccatgcgggtgtggtccaacatccctggactgaaaagcaagcacgcacctctgacccctaaagaagaggagtacctgcaggcccaggtgcggagcagaagcaagctggacgcccctaaggtggatctgctggtgaagaattgcctcctgcccctgagagagtacttcaagtatttcagccagaatagtctgcccctgggaggcagcggcggcggcgccctggtgacatttgaggacgtcgccgtgcggttcacccaggaggaatgggctctgctggatccttctcagaaaatcctgtaccgggacgtgatgagagagacataccggaatctgacctccgtgggcatcaactgggaatgttgggaccttgaagcctgcttcagaagcctgggaagaaacctgagagtgcaggtggtgaagagaaagtgcgagctgaccaacagcggcccctgcgccgagggcggcccaagcagcggcgcccctcctcccagcggcggcagcccagccggctccccaacctctaccgaggagggcacctctgagtccgccacccccgagagcggccctggcacctccaccgagcccagcgagggcagcgcacccggcagccctgccggcagccccacctccacagaggagggaaccagcaccgagcccagcgaaggcagcgccccaggcaccagcaccgagcctagtgagcaggagattaaacggatcaacaagatcagaagaagacttgtgaaagacagcaacaccaagaaggccggcaagacaggccccatgaaaaccctgctggttagagtgatgacacccgatctgagagagcggctggaaaacctgagaaagaagcctgaaaatatcccccagcccatcagcaatacatctagagccaacctgaataagctgctgaccgattacaccgaaatgaagaaggcgatcctgcatgtgtactgggaagagttccagaaggaccctgtgggcctgatgagccgggtggcccagcctgccagcaagaagatcgatcagaacaagctgaaacctgagatggacgagaagggcaacctgaccaccgccggctttgcctgctctcagtgtggccagcccctgttcgtgtacaagctggagcaggtgtctgagaagggcaaggcttacaccaactacttcggacggtgcaatgtggccgagcacgaaaagctgatcctgctggcccagctgaagcccgagaaggatagcgacgaagccgtgacatatagcctgggaaagtttgggcagagggccctggatttctacagcattcatgtgaccaaggagtccacccaccccgtgaagcccctggcccagatcgccggaaacagatacgcctccggacctgtgggaaaggccctgagcgacgcatgtatgggcacaatcgcctccttcctgtctaagtaccaggacatcatcatcgaacaccagaaggtggtgaagggcaaccagaagagactggagagcctgcgggagctggccggcaaggaaaacctggaataccctagcgtgaccctgccacctcagcctcacaccaaggagggcgttgatgcctacaacgaagtgatcgcccgggtgcgaatgtgggtgaacctgaacctgtggcagaagctgaagctaagcagagatgatgccaagcctctgctgagactgaagggattcccttcctttcctctggtcgagagacaggccaacgaagtggactggtgggacatggtgtgtaacgtgaagaagctgatcaacgagaaaaaggaggatggcaaggtgttttggcagaatctggctggctacaagagacaggaagccctgagaccatacctgagcagcgaggaagatcggaagaagggaaagaaattcgctcggtaccagctgggcgacctgctgctgcacctggaaaagaagcacggcgaggactggggaaaggtgtacgacgaggcctgggagcggattgacaagaaagtggaaggcctgagcaagcacatcaagctggaagaggaacggagaagcgaggacgcccagagcaaggccgccctgaccgactggctgcgggctaaggccagcttcgtgatcgagggcctgaaggaggccgacaaggacgagttctgcagatgcgagctgaagctgcagaagtggtacggggacctgcggggaaagcccttcgccatcgaagccgagaacagcatcctggacatcagcggcttcagcaagcagtacaactgtgccttcatctggcagaaggacggcgtgaagaagctgaacctgtacctgatcatcaactacttcaagggcggcaagctgcggttcaagaagatcaaacctgaagccttcgaagccaacagattctacaccgtgatcaacaaaaagagcggcgagatcgtgcccatggaggtgaacttcaacttcgacgaccccaacctgatcatcctgcctctggcctttggcaagagacagggcagagaattcatctggaacgacctgctgtccctggaaaccggcagcctgaagctggccaacggaagagtgatcgagaagacactgtacaacagaagaacccggcaggatgagcctgccctgttcgtggccctgaccttcgagcggcgggaggtcctggactcctccaatatcaaaccaatgaacctgatcggcgtggcaagaggcgaaaacatccccgccgtgatcgccctgaccgaccccgagggctgcccactgagccggtttaaggatagcctgggaaacccaacccacatcctgagaatcggcgagagctataaggagaagcagcggaccatccaggccaagaaggaggtggagcagcggagagccggcggctacagccggaagtacgccagcaaagccaagaatctggcagacgatatggtgagaaacaccgctagagatctgctgtactacgccgtgacccaggatgccatgctgatcttcgccaacctgagccggggcttcggccggcagggcaagcggaccttcatggccgagagacagtacacacggatggaggactggctgaccgccaagctggcctacgagggcctgagcaagacctacctgtccaagacactggcccagtacacctccaagacatgcagcaactgtgggtttaccatcaccagcgccgactacgacagggtgctggagaagctgaagaagacagcaacaggctggatgaccacaattaacggcaaggagctgaaggtggagggccagattacctactacaacagatacaagagacagaacgtagtcaaggacctgtccgtcgagctggatagactgagcgaagaatctgtgaacaacgacatctcctcctggacaaagggcagaagcggagaagctctgagcctcctgaagaaaagattctcccatagacccgtgcaggagaagttcgtgtgcctgaactgcggcttcgagacacacgcagccgagcaagccgccctgaacatcgccagatcctggctgttcctgcggagccaggagtacaagaaataccagacaaacaagacaaccggcaacaccgataagagagccttcgtcgagacctggcagtccttttaccggaagaagcttaaggaggtgtggaaacctgccgtgcggtctggcggatctggcggaggctccgccctgaggagcgtgatgttcagcgacgtgagcatcgacttcagccccgaggagtgggagtacctggacctggagcagaaggacctgtacagggacgtgatgctggagaactacagcaacctggtgagcctggccggctgcttcatcagcaagcccgacgtgatcagcagcctggagcagggcaaggagccctggaaggtggtgaggaagggcaggaggcagtaccccgacctggagaccaagggcggcccaagcagcggcgcccctcctcccagcggcggcagcccagccggctccccaacctctaccgaggagggcacctctgagtccgccacccccgagagcggccctggcacctccaccgagcccagcgagggcagcgcacccggcagccctgccggcagccccacctccacagaggagggaaccagcaccgagcccagcgaaggcagcgccccaggcaccagcaccgagcctagtgagcaggagattaaacggatcaacaagatcagaagaagacttgtgaaagacagcaacaccaagaaggccggcaagacaggccccatgaaaaccctgctggttagagtgatgacacccgatctgagagagcggctggaaaacctgagaaagaagcctgaaaatatcccccagcccatcagcaatacatctagagccaacctgaataagctgctgaccgattacaccgaaatgaagaaggcgatcctgcatgtgtactgggaagagttccagaaggaccctgtgggcctgatgagccgggtggcccagcctgccagcaagaagatcgatcagaacaagctgaaacctgagatggacgagaagggcaacctgaccaccgccggctttgcctgctctcagtgtggccagcccctgttcgtgtacaagctggagcaggtgtctgagaagggcaaggcttacaccaactacttcggacggtgcaatgtggccgagcacgaaaagctgatcctgctggcccagctgaagcccgagaaggatagcgacgaagccgtgacatatagcctgggaaagtttgggcagagggccctggatttctacagcattcatgtgaccaaggagtccacccaccccgtgaagcccctggcccagatcgccggaaacagatacgcctccggacctgtgggaaaggccctgagcgacgcatgtatgggcacaatcgcctccttcctgtctaagtaccaggacatcatcatcgaacaccagaaggtggtgaagggcaaccagaagagactggagagcctgcgggagctggccggcaaggaaaacctggaataccctagcgtgaccctgccacctcagcctcacaccaaggagggcgttgatgcctacaacgaagtgatcgcccgggtgcgaatgtgggtgaacctgaacctgtggcagaagctgaagctaagcagagatgatgccaagcctctgctgagactgaagggattcccttcctttcctctggtcgagagacaggccaacgaagtggactggtgggacatggtgtgtaacgtgaagaagctgatcaacgagaaaaaggaggatggcaaggtgttttggcagaatctggctggctacaagagacaggaagccctgagaccatacctgagcagcgaggaagatcggaagaagggaaagaaattcgctcggtaccagctgggcgacctgctgctgcacctggaaaagaagcacggcgaggactggggaaaggtgtacgacgaggcctgggagcggattgacaagaaagtggaaggcctgagcaagcacatcaagctggaagaggaacggagaagcgaggacgcccagagcaaggccgccctgaccgactggctgcgggctaaggccagcttcgtgatcgagggcctgaaggaggccgacaaggacgagttctgcagatgcgagctgaagctgcagaagtggtacggggacctgcggggaaagcccttcgccatcgaagccgagaacagcatcctggacatcagcggcttcagcaagcagtacaactgtgccttcatctggcagaaggacggcgtgaagaagctgaacctgtacctgatcatcaactacttcaagggcggcaagctgcggttcaagaagatcaaacctgaagccttcgaagccaacagattctacaccgtgatcaacaaaaagagcggcgagatcgtgcccatggaggtgaacttcaacttcgacgaccccaacctgatcatcctgcctctggcctttggcaagagacagggcagagaattcatctggaacgacctgctgtccctggaaaccggcagcctgaagctggccaacggaagagtgatcgagaagacactgtacaacagaagaacccggcaggatgagcctgccctgttcgtggccctgaccttcgagcggcgggaggtcctggactcctccaatatcaaaccaatgaacctgatcggcgtggcaagaggcgaaaacatccccgccgtgatcgccctgaccgaccccgagggctgcccactgagccggtttaaggatagcctgggaaacccaacccacatcctgagaatcggcgagagctataaggagaagcagcggaccatccaggccaagaaggaggtggagcagcggagagccggcggctacagccggaagtacgccagcaaagccaagaatctggcagacgatatggtgagaaacaccgctagagatctgctgtactacgccgtgacccaggatgccatgctgatcttcgccaacctgagccggggcttcggccggcagggcaagcggaccttcatggccgagagacagtacacacggatggaggactggctgaccgccaagctggcctacgagggcctgagcaagacctacctgtccaagacactggcccagtacacctccaagacatgcagcaactgtgggtttaccatcaccagcgccgactacgacagggtgctggagaagctgaagaagacagcaacaggctggatgaccacaattaacggcaaggagctgaaggtggagggccagattacctactacaacagatacaagagacagaacgtagtcaaggacctgtccgtcgagctggatagactgagcgaagaatctgtgaacaacgacatctcctcctggacaaagggcagaagcggagaagctctgagcctcctgaagaaaagattctcccatagacccgtgcaggagaagttcgtgtgcctgaactgcggcttcgagacacacgcagccgagcaagccgccctgaacatcgccagatcctggctgttcctgcggagccaggagtacaagaaataccagacaaacaagacaaccggcaacaccgataagagagccttcgtcgagacctggcagtccttttaccggaagaagcttaaggaggtgtggaaacctgccgtgcggtctggcggatctggcggaggctcctgccctgaggagcgtgatgttcagcgacgtgagcatcgacttcagccccgaggagtgggagtacctggacctggagcagaaggacctgtacagggacgtgatgctggagaactacagcaacctggtgagcctggccggctgcttcatcagcaagcccgacgtgatcagcagcctggagcagggcaaggagccctggaaggtggtgaggaagggcaggaggcagtaccccgacctggagaccaagggatctggctccggcagcggccccaagaaaaagagaaaagtctaagctgccttctgcggggcttgccttctggccatgcccttcttctctcccttgcacctgtacctcttggtctttgaataaagcctgagtaggaaggctagcaaaaaaaaaaaaaaaaaaaaaaaaaaaaaaaaaaaaaaaaaaaaaaaaaaaaaaaaaaaaaaaaaaaaaaaaaaaaaaaa

SEQ ID NO: 15613 - RNA, 9485 nt, synthetic construct
  source 1..9485: mol_type = other RNA
aggaaataagagagaaaagaagagtaagaagaaatataagagccaccatggcccctaagaagaagcgtaaagtgagccggatggaacgcctcgtctacgaggtgcggcagaagtgcagaaacatcgaggacatctgcatctcctgcggatctctgaacgtgaccctggagcacccactgttcatcggcggcatgtgccagaactgtaaaaactgttttctggagtgtgcctatcaatacgacgatgacggctaccagagctactgcaccatctgttgcggcggaagagaggtgctgatgtgtggaaataacaactgctgccggtgcttctgcgtggaatgcgtggacctgctggtgggccccggcgccgcccaggccgctattaaggaagatccttggaactgctacatgtgcggccacaagggcacatacggcctgctgagacggagagaggactggcctagcagactgcagatgttcttcgccaataaccacgaccaggagttcgacccccctaaggtgtaccctcccgtccccgccgagaagagaaagcccatccgggtcctgagcctgttcgatggcatcgccaccggtctgctggtgctgaaggacctgggcatccaggtggataggtacattgcctccgaggtgtgcgaggactccatcaccgtgggaatggtgcgtcatcagggcaagatcatgtacgtgggcgacgtgcggagcgtgacacagaagcatatccaggagtggggccctttcgacctggtgatcggcggcagcccttgcaatgacctgagcatcgtgaacccagcccggaagggcctgtacgagggaaccggcagactgttcttcgagttttacagactgctgcacgacgcccggcctaaggaaggcgacgaccggcccttcttttggctgttcgagaatgtggtggccatgggagtcagcgacaagcgggatattagccggttcctggagagcaaccccgtgatgatcgatgccaaggaagtgagcgccgcccaccgggccagatacttctggggcaatctgcctggcatgaacagacccctggccagcaccgtgaacgacaagctggagctgcaggagtgcctggagcacggccggatcgccaagttcagcaaggtgagaaccatcaccacccgaagcaacagcatcaaacaaggcaaggaccagcactttcctgtgttcatgaacgagaaggaggacatcctgtggtgtaccgagatggagagagtgttcgggttcccagtccactacacagatgtcagcaacatgtctagactggccagacagagactgctgggaagaagctggtccgtccctgtgatcagacacctgttcgcccctctgaaggagtacttcgcctgcgtgagcagcggcaacagcaacgccaacagccggggccccagcttctctagcggcctggtgccactgtccctgagagggagccacatgggccccatggagatctacaaaaccgtgagcgcctggaagcggcagcctgtgcgcgtgctgagcctgtttcggaatatcgataaagtcctgaaaagcctgggattcctggagagcggctctggctccggcggtggcaccctgaagtacgtggaggatgtgacaaacgtggtcagacgggatgtggagaagtggggccccttcgatctggtgtacggcagcacccaacccctgggcagctcttgtgaccggtgccctggctggtacatgtttcagttccaccggatcctgcagtacgccctgccgagacaggagtcccagcggccattcttttggattttcatggacaacttgctgctgaccgaggatgaccaggaaactaccactcggttcctgcagaccgaagccgtgaccctgcaggacgtgagaggccgggactaccagaacgccatgcgggtgtggtccaacatccctggactgaaaagcaagcacgcacctctgacccctaaagaagaggagtacctgcaggcccaggtgcggagcagaagcaagctggacgcccctaaggtggatctgctggtgaagaattgcctcctgcccctgagagagtacttcaagtatttcagccagaatagtctgcccctgggaggcagcggcggcggcgccctggtgacatttgaggacgtcgccgtgcggttcacccaggaggaatgggctctgctggatccttctcagaaaatcctgtaccgggacgtgatgagagagacataccggaatctgacctccgtgggcatcaactgggaatgttgggaccttgaagcctgcttcagaagcctgggaagaaacctgagagtgcaggtggtgaagagaaagtgcgagctgaccaacagcggcccctgcgccgagggcggcccaagcagcggcgcccctcctcccagcggcggcagcccagccggctccccaacctctaccgaggagggcacctctgagtccgccacccccgagagcggccctggcacctccaccgagcccagcgagggcagcgcacccggcagccctgccggcagccccacctccacagaggagggaaccagcaccgagcccagcgaaggcagcgccccaggcaccagcaccgagcctagtgagcaggagattaaacggatcaacaagatcagaagaagacttgtgaaagacagcaacaccaagaaggccggcaagacaggccccatgaaaaccctgctggttagagtgatgacacccgatctgagagagcggctggaaaacctgagaaagaagcctgaaaatatcccccagcccatcagcaatacatctagagccaacctgaataagctgctgaccgattacaccgaaatgaagaaggcgatcctgcatgtgtactgggaagagttccagaaggaccctgtgggcctgatgagccgggtggcccagcctgccagcaagaagatcgatcagaacaagctgaaacctgagatggacgagaagggcaacctgaccaccgccggctttgcctgctctcagtgtggccagcccctgttcgtgtacaagctggagcaggtgtctgagaagggcaaggcttacaccaactacttcggacggtgcaatgtggccgagcacgaaaagctgatcctgctggcccagctgaagcccgagaaggatagcgacgaagccgtgacatatagcctgggaaagtttgggcagagggccctggatttctacagcattcatgtgaccaaggagtccacccaccccgtgaagcccctggcccagatcgccggaaacagatacgcctccggacctgtgggaaaggccctgagcgacgcatgtatgggcacaatcgcctccttcctgtctaagtaccaggacatcatcatcgaacaccagaaggtggtgaagggcaaccagaagagactggagagcctgcgggagctggccggcaaggaaaacctggaataccctagcgtgaccctgccacctcagcctcacaccaaggagggcgttgatgcctacaacgaagtgatcgcccgggtgcgaatgtgggtgaacctgaacctgtggcagaagctgaagctaagcagagatgatgccaagcctctgctgagactgaagggattcccttcctttcctctggtcgagagacaggccaacgaagtggactggtgggacatggtgtgtaacgtgaagaagctgatcaacgagaaaaaggaggatggcaaggtgttttggcagaatctggctggctacaagagacaggaagccctgagaccatacctgagcagcgaggaagatcggaagaagggaaagaaattcgctcggtaccagctgggcgacctgctgctgcacctggaaaagaagcacggcgaggactggggaaaggtgtacgacgaggcctgggagcggattgacaagaaagtggaaggcctgagcaagcacatcaagctggaagaggaacggagaagcgaggacgcccagagcaaggccgccctgaccgactggctgcgggctaaggccagcttcgtgatcgagggcctgaaggaggccgacaaggacgagttctgcagatgcgagctgaagctgcagaagtggtacggggacctgcggggaaagcccttcgccatcgaagccgagaacagcatcctggacatcagcggcttcagcaagcagtacaactgtgccttcatctggcagaaggacggcgtgaagaagctgaacctgtacctgatcatcaactacttcaagggcggcaagctgcggttcaagaagatcaaacctgaagccttcgaagccaacagattctacaccgtgatcaacaaaaagagcggcgagatcgtgcccatggaggtgaacttcaacttcgacgaccccaacctgatcatcctgcctctggcctttggcaagagacagggcagagaattcatctggaacgacctgctgtccctggaaaccggcagcctgaagctggccaacggaagagtgatcgagaagacactgtacaacagaagaacccggcaggatgagcctgccctgttcgtggccctgaccttcgagcggcgggaggtcctggactcctccaatatcaaaccaatgaacctgatcggcgtggcaagaggcgaaaacatccccgccgtgatcgccctgaccgaccccgagggctgcccactgagccggtttaaggatagcctgggaaacccaacccacatcctgagaatcggcgagagctataaggagaagcagcggaccatccaggccaagaaggaggtggagcagcggagagccggcggctacagccggaagtacgccagcaaagccaagaatctggcagacgatatggtgagaaacaccgctagagatctgctgtactacgccgtgacccaggatgccatgctgatcttcgccaacctgagccggggcttcggccggcagggcaagcggaccttcatggccgagagacagtacacacggatggaggactggctgaccgccaagctggcctacgagggcctgagcaagacctacctgtccaagacactggcccagtacacctccaagacatgcagcaactgtgggtttaccatcaccagcgccgactacgacagggtgctggagaagctgaagaagacagcaacaggctggatgaccacaattaacggcaaggagctgaaggtggagggccagattacctactacaacagatacaagagacagaacgtagtcaaggacctgtccgtcgagctggatagactgagcgaagaatctgtgaacaacgacatctcctcctggacaaagggcagaagcggagaagctctgagcctcctgaagaaaagattctcccatagacccgtgcaggagaagttcgtgtgcctgaactgcggcttcgagacacacgcagccgagcaagccgccctgaacatcgccagatcctggctgttcctgcggagccaggagtacaagaaataccagacaaacaagacaaccggcaacaccgataagagagccttcgtcgagacctggcagtccttttaccggaagaagcttaaggaggtgtggaaacctgccgtgcggtctggcggatctggcggaggctccgagatggacagcgtgaccttcgaggacgtggccgtgaacttcaccagcgaggagtgggccctgctggaccccagccagaagaagctgtacagggccgtgatgagggagaccttcaggaacctggccagcatcggcctgaacctgggcaagaagtgggaggaccacaacatcgaggacaggtacaagacccacggcaagaagctgaggagccacatggtggagaagctgcacgagagcaaggagggcggcccaagcagcggcgcccctcctcccagcggcggcagcccagccggctccccaacctctaccgaggagggcacctctgagtccgccacccccgagagcggccctggcacctccaccgagcccagcgagggcagcgcacccggcagccctgccggcagccccacctccacagaggagggaaccagcaccgagcccagcgaaggcagcgccccaggcaccagcaccgagcctagtgagcaggagattaaacggatcaacaagatcagaagaagacttgtgaaagacagcaacaccaagaaggccggcaagacaggccccatgaaaaccctgctggttagagtgatgacacccgatctgagagagcggctggaaaacctgagaaagaagcctgaaaatatcccccagcccatcagcaatacatctagagccaacctgaataagctgctgaccgattacaccgaaatgaagaaggcgatcctgcatgtgtactgggaagagttccagaaggaccctgtgggcctgatgagccgggtggcccagcctgccagcaagaagatcgatcagaacaagctgaaacctgagatggacgagaagggcaacctgaccaccgccggctttgcctgctctcagtgtggccagcccctgttcgtgtacaagctggagcaggtgtctgagaagggcaaggcttacaccaactacttcggacggtgcaatgtggccgagcacgaaaagctgatcctgctggcccagctgaagcccgagaaggatagcgacgaagccgtgacatatagcctgggaaagtttgggcagagggccctggatttctacagcattcatgtgaccaaggagtccacccaccccgtgaagcccctggcccagatcgccggaaacagatacgcctccggacctgtgggaaaggccctgagcgacgcatgtatgggcacaatcgcctccttcctgtctaagtaccaggacatcatcatcgaacaccagaaggtggtgaagggcaaccagaagagactggagagcctgcgggagctggccggcaaggaaaacctggaataccctagcgtgaccctgccacctcagcctcacaccaaggagggcgttgatgcctacaacgaagtgatcgcccgggtgcgaatgtgggtgaacctgaacctgtggcagaagctgaagctaagcagagatgatgccaagcctctgctgagactgaagggattcccttcctttcctctggtcgagagacaggccaacgaagtggactggtgggacatggtgtgtaacgtgaagaagctgatcaacgagaaaaaggaggatggcaaggtgttttggcagaatctggctggctacaagagacaggaagccctgagaccatacctgagcagcgaggaagatcggaagaagggaaagaaattcgctcggtaccagctgggcgacctgctgctgcacctggaaaagaagcacggcgaggactggggaaaggtgtacgacgaggcctgggagcggattgacaagaaagtggaaggcctgagcaagcacatcaagctggaagaggaacggagaagcgaggacgcccagagcaaggccgccctgaccgactggctgcgggctaaggccagcttcgtgatcgagggcctgaaggaggccgacaaggacgagttctgcagatgcgagctgaagctgcagaagtggtacggggacctgcggggaaagcccttcgccatcgaagccgagaacagcatcctggacatcagcggcttcagcaagcagtacaactgtgccttcatctggcagaaggacggcgtgaagaagctgaacctgtacctgatcatcaactacttcaagggcggcaagctgcggttcaagaagatcaaacctgaagccttcgaagccaacagattctacaccgtgatcaacaaaaagagcggcgagatcgtgcccatggaggtgaacttcaacttcgacgaccccaacctgatcatcctgcctctggcctttggcaagagacagggcagagaattcatctggaacgacctgctgtccctggaaaccggcagcctgaagctggccaacggaagagtgatcgagaagacactgtacaacagaagaacccggcaggatgagcctgccctgttcgtggccctgaccttcgagcggcgggaggtcctggactcctccaatatcaaaccaatgaacctgatcggcgtggcaagaggcgaaaacatccccgccgtgatcgccctgaccgaccccgagggctgcccactgagccggtttaaggatagcctgggaaacccaacccacatcctgagaatcggcgagagctataaggagaagcagcggaccatccaggccaagaaggaggtggagcagcggagagccggcggctacagccggaagtacgccagcaaagccaagaatctggcagacgatatggtgagaaacaccgctagagatctgctgtactacgccgtgacccaggatgccatgctgatcttcgccaacctgagccggggcttcggccggcagggcaagcggaccttcatggccgagagacagtacacacggatggaggactggctgaccgccaagctggcctacgagggcctgagcaagacctacctgtccaagacactggcccagtacacctccaagacatgcagcaactgtgggtttaccatcaccagcgccgactacgacagggtgctggagaagctgaagaagacagcaacaggctggatgaccacaattaacggcaaggagctgaaggtggagggccagattacctactacaacagatacaagagacagaacgtagtcaaggacctgtccgtcgagctggatagactgagcgaagaatctgtgaacaacgacatctcctcctggacaaagggcagaagcggagaagctctgagcctcctgaagaaaagattctcccatagacccgtgcaggagaagttcgtgtgcctgaactgcggcttcgagacacacgcagccgagcaagccgccctgaacatcgccagatcctggctgttcctgcggagccaggagtacaagaaataccagacaaacaagacaaccggcaacaccgataagagagccttcgtcgagacctggcagtccttttaccggaagaagcttaaggaggtgtggaaacctgccgtgcggtctggcggatctggcggaggctcctgagatggacagcgtgaccttcgaggacgtggccgtgaacttcaccagcgaggagtgggccctgctggaccccagccagaagaagctgtacagggccgtgatgagggagaccttcaggaacctggccagcatcggcctgaacctgggcaagaagtgggaggaccacaacatcgaggacaggtacaagacccacggcaagaagctgaggagccacatggtggagaagctgcacgagagcaaggagggatctggctccggcagcggccccaagaaaaagagaaaagtctaagctgccttctgcggggcttgccttctggccatgcccttcttctctcccttgcacctgtacctcttggtctttgaataaagcctgagtaggaaggctagcaaaaaaaaaaaaaaaaaaaaaaaaaaaaaaaaaaaaaaaaaaaaaaaaaaaaaaaaaaaaaaaaaaaaaaaaaaaaaaaa

SEQ ID NO: 15614 - RNA, 9485 nt, synthetic construct
  source 1..9485: mol_type = other RNA
aggaaataagagagaaaagaagagtaagaagaaatataagagccaccatggcccctaagaagaagcgtaaagtgagccggatggaacgcctcgtctacgaggtgcggcagaagtgcagaaacatcgaggacatctgcatctcctgcggatctctgaacgtgaccctggagcacccactgttcatcggcggcatgtgccagaactgtaaaaactgttttctggagtgtgcctatcaatacgacgatgacggctaccagagctactgcaccatctgttgcggcggaagagaggtgctgatgtgtggaaataacaactgctgccggtgcttctgcgtggaatgcgtggacctgctggtgggccccggcgccgcccaggccgctattaaggaagatccttggaactgctacatgtgcggccacaagggcacatacggcctgctgagacggagagaggactggcctagcagactgcagatgttcttcgccaataaccacgaccaggagttcgacccccctaaggtgtaccctcccgtccccgccgagaagagaaagcccatccgggtcctgagcctgttcgatggcatcgccaccggtctgctggtgctgaaggacctgggcatccaggtggataggtacattgcctccgaggtgtgcgaggactccatcaccgtgggaatggtgcgtcatcagggcaagatcatgtacgtgggcgacgtgcggagcgtgacacagaagcatatccaggagtggggccctttcgacctggtgatcggcggcagcccttgcaatgacctgagcatcgtgaacccagcccggaagggcctgtacgagggaaccggcagactgttcttcgagttttacagactgctgcacgacgcccggcctaaggaaggcgacgaccggcccttcttttggctgttcgagaatgtggtggccatgggagtcagcgacaagcgggatattagccggttcctggagagcaaccccgtgatgatcgatgccaaggaagtgagcgccgcccaccgggccagatacttctggggcaatctgcctggcatgaacagacccctggccagcaccgtgaacgacaagctggagctgcaggagtgcctggagcacggccggatcgccaagttcagcaaggtgagaaccatcaccacccgaagcaacagcatcaaacaaggcaaggaccagcactttcctgtgttcatgaacgagaaggaggacatcctgtggtgtaccgagatggagagagtgttcgggttcccagtccactacacagatgtcagcaacatgtctagactggccagacagagactgctgggaagaagctggtccgtccctgtgatcagacacctgttcgcccctctgaaggagtacttcgcctgcgtgagcagcggcaacagcaacgccaacagccggggccccagcttctctagcggcctggtgccactgtccctgagagggagccacatgggccccatggagatctacaaaaccgtgagcgcctggaagcggcagcctgtgcgcgtgctgagcctgtttcggaatatcgataaagtcctgaaaagcctgggattcctggagagcggctctggctccggcggtggcaccctgaagtacgtggaggatgtgacaaacgtggtcagacgggatgtggagaagtggggccccttcgatctggtgtacggcagcacccaacccctgggcagctcttgtgaccggtgccctggctggtacatgtttcagttccaccggatcctgcagtacgccctgccgagacaggagtcccagcggccattcttttggattttcatggacaacttgctgctgaccgaggatgaccaggaaactaccactcggttcctgcagaccgaagccgtgaccctgcaggacgtgagaggccgggactaccagaacgccatgcgggtgtggtccaacatccctggactgaaaagcaagcacgcacctctgacccctaaagaagaggagtacctgcaggcccaggtgcggagcagaagcaagctggacgcccctaaggtggatctgctggtgaagaattgcctcctgcccctgagagagtacttcaagtatttcagccagaatagtctgcccctgggaggcagcggcggcggcgccctggtgacatttgaggacgtcgccgtgcggttcacccaggaggaatgggctctgctggatccttctcagaaaatcctgtaccgggacgtgatgagagagacataccggaatctgacctccgtgggcatcaactgggaatgttgggaccttgaagcctgcttcagaagcctgggaagaaacctgagagtgcaggtggtgaagagaaagtgcgagctgaccaacagcggcccctgcgccgagggcggcccaagcagcggcgcccctcctcccagcggcggcagcccagccggctccccaacctctaccgaggagggcacctctgagtccgccacccccgagagcggccctggcacctccaccgagcccagcgagggcagcgcacccggcagccctgccggcagccccacctccacagaggagggaaccagcaccgagcccagcgaaggcagcgccccaggcaccagcaccgagcctagtgagcaggagattaaacggatcaacaagatcagaagaagacttgtgaaagacagcaacaccaagaaggccggcaagacaggccccatgaaaaccctgctggttagagtgatgacacccgatctgagagagcggctggaaaacctgagaaagaagcctgaaaatatcccccagcccatcagcaatacatctagagccaacctgaataagctgctgaccgattacaccgaaatgaagaaggcgatcctgcatgtgtactgggaagagttccagaaggaccctgtgggcctgatgagccgggtggcccagcctgccagcaagaagatcgatcagaacaagctgaaacctgagatggacgagaagggcaacctgaccaccgccggctttgcctgctctcagtgtggccagcccctgttcgtgtacaagctggagcaggtgtctgagaagggcaaggcttacaccaactacttcggacggtgcaatgtggccgagcacgaaaagctgatcctgctggcccagctgaagcccgagaaggatagcgacgaagccgtgacatatagcctgggaaagtttgggcagagggccctggatttctacagcattcatgtgaccaaggagtccacccaccccgtgaagcccctggcccagatcgccggaaacagatacgcctccggacctgtgggaaaggccctgagcgacgcatgtatgggcacaatcgcctccttcctgtctaagtaccaggacatcatcatcgaacaccagaaggtggtgaagggcaaccagaagagactggagagcctgcgggagctggccggcaaggaaaacctggaataccctagcgtgaccctgccacctcagcctcacaccaaggagggcgttgatgcctacaacgaagtgatcgcccgggtgcgaatgtgggtgaacctgaacctgtggcagaagctgaagctaagcagagatgatgccaagcctctgctgagactgaagggattcccttcctttcctctggtcgagagacaggccaacgaagtggactggtgggacatggtgtgtaacgtgaagaagctgatcaacgagaaaaaggaggatggcaaggtgttttggcagaatctggctggctacaagagacaggaagccctgagaccatacctgagcagcgaggaagatcggaagaagggaaagaaattcgctcggtaccagctgggcgacctgctgctgcacctggaaaagaagcacggcgaggactggggaaaggtgtacgacgaggcctgggagcggattgacaagaaagtggaaggcctgagcaagcacatcaagctggaagaggaacggagaagcgaggacgcccagagcaaggccgccctgaccgactggctgcgggctaaggccagcttcgtgatcgagggcctgaaggaggccgacaaggacgagttctgcagatgcgagctgaagctgcagaagtggtacggggacctgcggggaaagcccttcgccatcgaagccgagaacagcatcctggacatcagcggcttcagcaagcagtacaactgtgccttcatctggcagaaggacggcgtgaagaagctgaacctgtacctgatcatcaactacttcaagggcggcaagctgcggttcaagaagatcaaacctgaagccttcgaagccaacagattctacaccgtgatcaacaaaaagagcggcgagatcgtgcccatggaggtgaacttcaacttcgacgaccccaacctgatcatcctgcctctggcctttggcaagagacagggcagagaattcatctggaacgacctgctgtccctggaaaccggcagcctgaagctggccaacggaagagtgatcgagaagacactgtacaacagaagaacccggcaggatgagcctgccctgttcgtggccctgaccttcgagcggcgggaggtcctggactcctccaatatcaaaccaatgaacctgatcggcgtggcaagaggcgaaaacatccccgccgtgatcgccctgaccgaccccgagggctgcccactgagccggtttaaggatagcctgggaaacccaacccacatcctgagaatcggcgagagctataaggagaagcagcggaccatccaggccaagaaggaggtggagcagcggagagccggcggctacagccggaagtacgccagcaaagccaagaatctggcagacgatatggtgagaaacaccgctagagatctgctgtactacgccgtgacccaggatgccatgctgatcttcgccaacctgagccggggcttcggccggcagggcaagcggaccttcatggccgagagacagtacacacggatggaggactggctgaccgccaagctggcctacgagggcctgagcaagacctacctgtccaagacactggcccagtacacctccaagacatgcagcaactgtgggtttaccatcaccagcgccgactacgacagggtgctggagaagctgaagaagacagcaacaggctggatgaccacaattaacggcaaggagctgaaggtggagggccagattacctactacaacagatacaagagacagaacgtagtcaaggacctgtccgtcgagctggatagactgagcgaagaatctgtgaacaacgacatctcctcctggacaaagggcagaagcggagaagctctgagcctcctgaagaaaagattctcccatagacccgtgcaggagaagttcgtgtgcctgaactgcggcttcgagacacacgcagccgagcaagccgccctgaacatcgccagatcctggctgttcctgcggagccaggagtacaagaaataccagacaaacaagacaaccggcaacaccgataagagagccttcgtcgagacctggcagtccttttaccggaagaagcttaaggaggtgtggaaacctgccgtgcggtctggcggatctggcggaggctccagccaggagagcgtgaccttccaggacgtggccgtggacttcaccagggaggagtggaagaggctggacagcgcccagagggacctgtacagggacgtgatgctggagaactaccagaacctggtgagcctgggcctgctggtgttccagagcgacgtgatcagccagctggagaacggcgaggtgcccctggtgcccggcggcgaggtgcccaggggcaccaggcccggcagcgtgaaccagggcggcccaagcagcggcgcccctcctcccagcggcggcagcccagccggctccccaacctctaccgaggagggcacctctgagtccgccacccccgagagcggccctggcacctccaccgagcccagcgagggcagcgcacccggcagccctgccggcagccccacctccacagaggagggaaccagcaccgagcccagcgaaggcagcgccccaggcaccagcaccgagcctagtgagcaggagattaaacggatcaacaagatcagaagaagacttgtgaaagacagcaacaccaagaaggccggcaagacaggccccatgaaaaccctgctggttagagtgatgacacccgatctgagagagcggctggaaaacctgagaaagaagcctgaaaatatcccccagcccatcagcaatacatctagagccaacctgaataagctgctgaccgattacaccgaaatgaagaaggcgatcctgcatgtgtactgggaagagttccagaaggaccctgtgggcctgatgagccgggtggcccagcctgccagcaagaagatcgatcagaacaagctgaaacctgagatggacgagaagggcaacctgaccaccgccggctttgcctgctctcagtgtggccagcccctgttcgtgtacaagctggagcaggtgtctgagaagggcaaggcttacaccaactacttcggacggtgcaatgtggccgagcacgaaaagctgatcctgctggcccagctgaagcccgagaaggatagcgacgaagccgtgacatatagcctgggaaagtttgggcagagggccctggatttctacagcattcatgtgaccaaggagtccacccaccccgtgaagcccctggcccagatcgccggaaacagatacgcctccggacctgtgggaaaggccctgagcgacgcatgtatgggcacaatcgcctccttcctgtctaagtaccaggacatcatcatcgaacaccagaaggtggtgaagggcaaccagaagagactggagagcctgcgggagctggccggcaaggaaaacctggaataccctagcgtgaccctgccacctcagcctcacaccaaggagggcgttgatgcctacaacgaagtgatcgcccgggtgcgaatgtgggtgaacctgaacctgtggcagaagctgaagctaagcagagatgatgccaagcctctgctgagactgaagggattcccttcctttcctctggtcgagagacaggccaacgaagtggactggtgggacatggtgtgtaacgtgaagaagctgatcaacgagaaaaaggaggatggcaaggtgttttggcagaatctggctggctacaagagacaggaagccctgagaccatacctgagcagcgaggaagatcggaagaagggaaagaaattcgctcggtaccagctgggcgacctgctgctgcacctggaaaagaagcacggcgaggactggggaaaggtgtacgacgaggcctgggagcggattgacaagaaagtggaaggcctgagcaagcacatcaagctggaagaggaacggagaagcgaggacgcccagagcaaggccgccctgaccgactggctgcgggctaaggccagcttcgtgatcgagggcctgaaggaggccgacaaggacgagttctgcagatgcgagctgaagctgcagaagtggtacggggacctgcggggaaagcccttcgccatcgaagccgagaacagcatcctggacatcagcggcttcagcaagcagtacaactgtgccttcatctggcagaaggacggcgtgaagaagctgaacctgtacctgatcatcaactacttcaagggcggcaagctgcggttcaagaagatcaaacctgaagccttcgaagccaacagattctacaccgtgatcaacaaaaagagcggcgagatcgtgcccatggaggtgaacttcaacttcgacgaccccaacctgatcatcctgcctctggcctttggcaagagacagggcagagaattcatctggaacgacctgctgtccctggaaaccggcagcctgaagctggccaacggaagagtgatcgagaagacactgtacaacagaagaacccggcaggatgagcctgccctgttcgtggccctgaccttcgagcggcgggaggtcctggactcctccaatatcaaaccaatgaacctgatcggcgtggcaagaggcgaaaacatccccgccgtgatcgccctgaccgaccccgagggctgcccactgagccggtttaaggatagcctgggaaacccaacccacatcctgagaatcggcgagagctataaggagaagcagcggaccatccaggccaagaaggaggtggagcagcggagagccggcggctacagccggaagtacgccagcaaagccaagaatctggcagacgatatggtgagaaacaccgctagagatctgctgtactacgccgtgacccaggatgccatgctgatcttcgccaacctgagccggggcttcggccggcagggcaagcggaccttcatggccgagagacagtacacacggatggaggactggctgaccgccaagctggcctacgagggcctgagcaagacctacctgtccaagacactggcccagtacacctccaagacatgcagcaactgtgggtttaccatcaccagcgccgactacgacagggtgctggagaagctgaagaagacagcaacaggctggatgaccacaattaacggcaaggagctgaaggtggagggccagattacctactacaacagatacaagagacagaacgtagtcaaggacctgtccgtcgagctggatagactgagcgaagaatctgtgaacaacgacatctcctcctggacaaagggcagaagcggagaagctctgagcctcctgaagaaaagattctcccatagacccgtgcaggagaagttcgtgtgcctgaactgcggcttcgagacacacgcagccgagcaagccgccctgaacatcgccagatcctggctgttcctgcggagccaggagtacaagaaataccagacaaacaagacaaccggcaacaccgataagagagccttcgtcgagacctggcagtccttttaccggaagaagcttaaggaggtgtggaaacctgccgtgcggtctggcggatctggcggaggctcctagccaggagagcgtgaccttccaggacgtggccgtggacttcaccagggaggagtggaagaggctggacagcgcccagagggacctgtacagggacgtgatgctggagaactaccagaacctggtgagcctgggcctgctggtgttccagagcgacgtgatcagccagctggagaacggcgaggtgcccctggtgcccggcggcgaggtgcccaggggcaccaggcccggcagcgtgaaccagggatctggctccggcagcggccccaagaaaaagagaaaagtctaagctgccttctgcggggcttgccttctggccatgcccttcttctctcccttgcacctgtacctcttggtctttgaataaagcctgagtaggaaggctagcaaaaaaaaaaaaaaaaaaaaaaaaaaaaaaaaaaaaaaaaaaaaaaaaaaaaaaaaaaaaaaaaaaaaaaaaaaaaaaaa

SEQ ID NO: 15615 - RNA, 9479 nt, synthetic construct
  source 1..9479: mol_type = other RNA
aggaaataagagagaaaagaagagtaagaagaaatataagagccaccatggcccctaagaagaagcgtaaagtgagccggatggaacgcctcgtctacgaggtgcggcagaagtgcagaaacatcgaggacatctgcatctcctgcggatctctgaacgtgaccctggagcacccactgttcatcggcggcatgtgccagaactgtaaaaactgttttctggagtgtgcctatcaatacgacgatgacggctaccagagctactgcaccatctgttgcggcggaagagaggtgctgatgtgtggaaataacaactgctgccggtgcttctgcgtggaatgcgtggacctgctggtgggccccggcgccgcccaggccgctattaaggaagatccttggaactgctacatgtgcggccacaagggcacatacggcctgctgagacggagagaggactggcctagcagactgcagatgttcttcgccaataaccacgaccaggagttcgacccccctaaggtgtaccctcccgtccccgccgagaagagaaagcccatccgggtcctgagcctgttcgatggcatcgccaccggtctgctggtgctgaaggacctgggcatccaggtggataggtacattgcctccgaggtgtgcgaggactccatcaccgtgggaatggtgcgtcatcagggcaagatcatgtacgtgggcgacgtgcggagcgtgacacagaagcatatccaggagtggggccctttcgacctggtgatcggcggcagcccttgcaatgacctgagcatcgtgaacccagcccggaagggcctgtacgagggaaccggcagactgttcttcgagttttacagactgctgcacgacgcccggcctaaggaaggcgacgaccggcccttcttttggctgttcgagaatgtggtggccatgggagtcagcgacaagcgggatattagccggttcctggagagcaaccccgtgatgatcgatgccaaggaagtgagcgccgcccaccgggccagatacttctggggcaatctgcctggcatgaacagacccctggccagcaccgtgaacgacaagctggagctgcaggagtgcctggagcacggccggatcgccaagttcagcaaggtgagaaccatcaccacccgaagcaacagcatcaaacaaggcaaggaccagcactttcctgtgttcatgaacgagaaggaggacatcctgtggtgtaccgagatggagagagtgttcgggttcccagtccactacacagatgtcagcaacatgtctagactggccagacagagactgctgggaagaagctggtccgtccctgtgatcagacacctgttcgcccctctgaaggagtacttcgcctgcgtgagcagcggcaacagcaacgccaacagccggggccccagcttctctagcggcctggtgccactgtccctgagagggagccacatgggccccatggagatctacaaaaccgtgagcgcctggaagcggcagcctgtgcgcgtgctgagcctgtttcggaatatcgataaagtcctgaaaagcctgggattcctggagagcggctctggctccggcggtggcaccctgaagtacgtggaggatgtgacaaacgtggtcagacgggatgtggagaagtggggccccttcgatctggtgtacggcagcacccaacccctgggcagctcttgtgaccggtgccctggctggtacatgtttcagttccaccggatcctgcagtacgccctgccgagacaggagtcccagcggccattcttttggattttcatggacaacttgctgctgaccgaggatgaccaggaaactaccactcggttcctgcagaccgaagccgtgaccctgcaggacgtgagaggccgggactaccagaacgccatgcgggtgtggtccaacatccctggactgaaaagcaagcacgcacctctgacccctaaagaagaggagtacctgcaggcccaggtgcggagcagaagcaagctggacgcccctaaggtggatctgctggtgaagaattgcctcctgcccctgagagagtacttcaagtatttcagccagaatagtctgcccctgggaggcagcggcggcggcgccctggtgacatttgaggacgtcgccgtgcggttcacccaggaggaatgggctctgctggatccttctcagaaaatcctgtaccgggacgtgatgagagagacataccggaatctgacctccgtgggcatcaactgggaatgttgggaccttgaagcctgcttcagaagcctgggaagaaacctgagagtgcaggtggtgaagagaaagtgcgagctgaccaacagcggcccctgcgccgagggcggcccaagcagcggcgcccctcctcccagcggcggcagcccagccggctccccaacctctaccgaggagggcacctctgagtccgccacccccgagagcggccctggcacctccaccgagcccagcgagggcagcgcacccggcagccctgccggcagccccacctccacagaggagggaaccagcaccgagcccagcgaaggcagcgccccaggcaccagcaccgagcctagtgagcaggagattaaacggatcaacaagatcagaagaagacttgtgaaagacagcaacaccaagaaggccggcaagacaggccccatgaaaaccctgctggttagagtgatgacacccgatctgagagagcggctggaaaacctgagaaagaagcctgaaaatatcccccagcccatcagcaatacatctagagccaacctgaataagctgctgaccgattacaccgaaatgaagaaggcgatcctgcatgtgtactgggaagagttccagaaggaccctgtgggcctgatgagccgggtggcccagcctgccagcaagaagatcgatcagaacaagctgaaacctgagatggacgagaagggcaacctgaccaccgccggctttgcctgctctcagtgtggccagcccctgttcgtgtacaagctggagcaggtgtctgagaagggcaaggcttacaccaactacttcggacggtgcaatgtggccgagcacgaaaagctgatcctgctggcccagctgaagcccgagaaggatagcgacgaagccgtgacatatagcctgggaaagtttgggcagagggccctggatttctacagcattcatgtgaccaaggagtccacccaccccgtgaagcccctggcccagatcgccggaaacagatacgcctccggacctgtgggaaaggccctgagcgacgcatgtatgggcacaatcgcctccttcctgtctaagtaccaggacatcatcatcgaacaccagaaggtggtgaagggcaaccagaagagactggagagcctgcgggagctggccggcaaggaaaacctggaataccctagcgtgaccctgccacctcagcctcacaccaaggagggcgttgatgcctacaacgaagtgatcgcccgggtgcgaatgtgggtgaacctgaacctgtggcagaagctgaagctaagcagagatgatgccaagcctctgctgagactgaagggattcccttcctttcctctggtcgagagacaggccaacgaagtggactggtgggacatggtgtgtaacgtgaagaagctgatcaacgagaaaaaggaggatggcaaggtgttttggcagaatctggctggctacaagagacaggaagccctgagaccatacctgagcagcgaggaagatcggaagaagggaaagaaattcgctcggtaccagctgggcgacctgctgctgcacctggaaaagaagcacggcgaggactggggaaaggtgtacgacgaggcctgggagcggattgacaagaaagtggaaggcctgagcaagcacatcaagctggaagaggaacggagaagcgaggacgcccagagcaaggccgccctgaccgactggctgcgggctaaggccagcttcgtgatcgagggcctgaaggaggccgacaaggacgagttctgcagatgcgagctgaagctgcagaagtggtacggggacctgcggggaaagcccttcgccatcgaagccgagaacagcatcctggacatcagcggcttcagcaagcagtacaactgtgccttcatctggcagaaggacggcgtgaagaagctgaacctgtacctgatcatcaactacttcaagggcggcaagctgcggttcaagaagatcaaacctgaagccttcgaagccaacagattctacaccgtgatcaacaaaaagagcggcgagatcgtgcccatggaggtgaacttcaacttcgacgaccccaacctgatcatcctgcctctggcctttggcaagagacagggcagagaattcatctggaacgacctgctgtccctggaaaccggcagcctgaagctggccaacggaagagtgatcgagaagacactgtacaacagaagaacccggcaggatgagcctgccctgttcgtggccctgaccttcgagcggcgggaggtcctggactcctccaatatcaaaccaatgaacctgatcggcgtggcaagaggcgaaaacatccccgccgtgatcgccctgaccgaccccgagggctgcccactgagccggtttaaggatagcctgggaaacccaacccacatcctgagaatcggcgagagctataaggagaagcagcggaccatccaggccaagaaggaggtggagcagcggagagccggcggctacagccggaagtacgccagcaaagccaagaatctggcagacgatatggtgagaaacaccgctagagatctgctgtactacgccgtgacccaggatgccatgctgatcttcgccaacctgagccggggcttcggccggcagggcaagcggaccttcatggccgagagacagtacacacggatggaggactggctgaccgccaagctggcctacgagggcctgagcaagacctacctgtccaagacactggcccagtacacctccaagacatgcagcaactgtgggtttaccatcaccagcgccgactacgacagggtgctggagaagctgaagaagacagcaacaggctggatgaccacaattaacggcaaggagctgaaggtggagggccagattacctactacaacagatacaagagacagaacgtagtcaaggacctgtccgtcgagctggatagactgagcgaagaatctgtgaacaacgacatctcctcctggacaaagggcagaagcggagaagctctgagcctcctgaagaaaagattctcccatagacccgtgcaggagaagttcgtgtgcctgaactgcggcttcgagacacacgcagccgagcaagccgccctgaacatcgccagatcctggctgttcctgcggagccaggagtacaagaaataccagacaaacaagacaaccggcaacaccgataagagagccttcgtcgagacctggcagtccttttaccggaagaagcttaaggaggtgtggaaacctgccgtgcggtctggcggatctggcggaggctccctgcagaggctgctgaccttcggcgacgtggccatcgagttcagccaggaggagtggaggtgcctgagccacacccagagggagctgtacagggacgtgatgctggagaactacaggcacctgctgttcctgggcctgatcgtgagcaagcccgacctggtgagcctgctggagcagaggaaggagccctgggacgtgaagaggaagaagaccgtggtgttcgaccccggcaggtgggagggcggcccaagcagcggcgcccctcctcccagcggcggcagcccagccggctccccaacctctaccgaggagggcacctctgagtccgccacccccgagagcggccctggcacctccaccgagcccagcgagggcagcgcacccggcagccctgccggcagccccacctccacagaggagggaaccagcaccgagcccagcgaaggcagcgccccaggcaccagcaccgagcctagtgagcaggagattaaacggatcaacaagatcagaagaagacttgtgaaagacagcaacaccaagaaggccggcaagacaggccccatgaaaaccctgctggttagagtgatgacacccgatctgagagagcggctggaaaacctgagaaagaagcctgaaaatatcccccagcccatcagcaatacatctagagccaacctgaataagctgctgaccgattacaccgaaatgaagaaggcgatcctgcatgtgtactgggaagagttccagaaggaccctgtgggcctgatgagccgggtggcccagcctgccagcaagaagatcgatcagaacaagctgaaacctgagatggacgagaagggcaacctgaccaccgccggctttgcctgctctcagtgtggccagcccctgttcgtgtacaagctggagcaggtgtctgagaagggcaaggcttacaccaactacttcggacggtgcaatgtggccgagcacgaaaagctgatcctgctggcccagctgaagcccgagaaggatagcgacgaagccgtgacatatagcctgggaaagtttgggcagagggccctggatttctacagcattcatgtgaccaaggagtccacccaccccgtgaagcccctggcccagatcgccggaaacagatacgcctccggacctgtgggaaaggccctgagcgacgcatgtatgggcacaatcgcctccttcctgtctaagtaccaggacatcatcatcgaacaccagaaggtggtgaagggcaaccagaagagactggagagcctgcgggagctggccggcaaggaaaacctggaataccctagcgtgaccctgccacctcagcctcacaccaaggagggcgttgatgcctacaacgaagtgatcgcccgggtgcgaatgtgggtgaacctgaacctgtggcagaagctgaagctaagcagagatgatgccaagcctctgctgagactgaagggattcccttcctttcctctggtcgagagacaggccaacgaagtggactggtgggacatggtgtgtaacgtgaagaagctgatcaacgagaaaaaggaggatggcaaggtgttttggcagaatctggctggctacaagagacaggaagccctgagaccatacctgagcagcgaggaagatcggaagaagggaaagaaattcgctcggtaccagctgggcgacctgctgctgcacctggaaaagaagcacggcgaggactggggaaaggtgtacgacgaggcctgggagcggattgacaagaaagtggaaggcctgagcaagcacatcaagctggaagaggaacggagaagcgaggacgcccagagcaaggccgccctgaccgactggctgcgggctaaggccagcttcgtgatcgagggcctgaaggaggccgacaaggacgagttctgcagatgcgagctgaagctgcagaagtggtacggggacctgcggggaaagcccttcgccatcgaagccgagaacagcatcctggacatcagcggcttcagcaagcagtacaactgtgccttcatctggcagaaggacggcgtgaagaagctgaacctgtacctgatcatcaactacttcaagggcggcaagctgcggttcaagaagatcaaacctgaagccttcgaagccaacagattctacaccgtgatcaacaaaaagagcggcgagatcgtgcccatggaggtgaacttcaacttcgacgaccccaacctgatcatcctgcctctggcctttggcaagagacagggcagagaattcatctggaacgacctgctgtccctggaaaccggcagcctgaagctggccaacggaagagtgatcgagaagacactgtacaacagaagaacccggcaggatgagcctgccctgttcgtggccctgaccttcgagcggcgggaggtcctggactcctccaatatcaaaccaatgaacctgatcggcgtggcaagaggcgaaaacatccccgccgtgatcgccctgaccgaccccgagggctgcccactgagccggtttaaggatagcctgggaaacccaacccacatcctgagaatcggcgagagctataaggagaagcagcggaccatccaggccaagaaggaggtggagcagcggagagccggcggctacagccggaagtacgccagcaaagccaagaatctggcagacgatatggtgagaaacaccgctagagatctgctgtactacgccgtgacccaggatgccatgctgatcttcgccaacctgagccggggcttcggccggcagggcaagcggaccttcatggccgagagacagtacacacggatggaggactggctgaccgccaagctggcctacgagggcctgagcaagacctacctgtccaagacactggcccagtacacctccaagacatgcagcaactgtgggtttaccatcaccagcgccgactacgacagggtgctggagaagctgaagaagacagcaacaggctggatgaccacaattaacggcaaggagctgaaggtggagggccagattacctactacaacagatacaagagacagaacgtagtcaaggacctgtccgtcgagctggatagactgagcgaagaatctgtgaacaacgacatctcctcctggacaaagggcagaagcggagaagctctgagcctcctgaagaaaagattctcccatagacccgtgcaggagaagttcgtgtgcctgaactgcggcttcgagacacacgcagccgagcaagccgccctgaacatcgccagatcctggctgttcctgcggagccaggagtacaagaaataccagacaaacaagacaaccggcaacaccgataagagagccttcgtcgagacctggcagtccttttaccggaagaagcttaaggaggtgtggaaacctgccgtgcggtctggcggatctggcggaggctcctctgcagaggctgctgaccttcggcgacgtggccatcgagttcagccaggaggagtggaggtgcctgagccacacccagagggagctgtacagggacgtgatgctggagaactacaggcacctgctgttcctgggcctgatcgtgagcaagcccgacctggtgagcctgctggagcagaggaaggagccctgggacgtgaagaggaagaagaccgtggtgttcgaccccggcaggtgggagggatctggctccggcagcggccccaagaaaaagagaaaagtctaagctgccttctgcggggcttgccttctggccatgcccttcttctctcccttgcacctgtacctcttggtctttgaataaagcctgagtaggaaggctagcaaaaaaaaaaaaaaaaaaaaaaaaaaaaaaaaaaaaaaaaaaaaaaaaaaaaaaaaaaaaaaaaaaaaaaaaaaaaaaaa

SEQ ID NO: 15616 - RNA, 9485 nt, synthetic construct
  source 1..9485: mol_type = other RNA
aggaaataagagagaaaagaagagtaagaagaaatataagagccaccatggcccctaagaagaagcgtaaagtgagccggatggaacgcctcgtctacgaggtgcggcagaagtgcagaaacatcgaggacatctgcatctcctgcggatctctgaacgtgaccctggagcacccactgttcatcggcggcatgtgccagaactgtaaaaactgttttctggagtgtgcctatcaatacgacgatgacggctaccagagctactgcaccatctgttgcggcggaagagaggtgctgatgtgtggaaataacaactgctgccggtgcttctgcgtggaatgcgtggacctgctggtgggccccggcgccgcccaggccgctattaaggaagatccttggaactgctacatgtgcggccacaagggcacatacggcctgctgagacggagagaggactggcctagcagactgcagatgttcttcgccaataaccacgaccaggagttcgacccccctaaggtgtaccctcccgtccccgccgagaagagaaagcccatccgggtcctgagcctgttcgatggcatcgccaccggtctgctggtgctgaaggacctgggcatccaggtggataggtacattgcctccgaggtgtgcgaggactccatcaccgtgggaatggtgcgtcatcagggcaagatcatgtacgtgggcgacgtgcggagcgtgacacagaagcatatccaggagtggggccctttcgacctggtgatcggcggcagcccttgcaatgacctgagcatcgtgaacccagcccggaagggcctgtacgagggaaccggcagactgttcttcgagttttacagactgctgcacgacgcccggcctaaggaaggcgacgaccggcccttcttttggctgttcgagaatgtggtggccatgggagtcagcgacaagcgggatattagccggttcctggagagcaaccccgtgatgatcgatgccaaggaagtgagcgccgcccaccgggccagatacttctggggcaatctgcctggcatgaacagacccctggccagcaccgtgaacgacaagctggagctgcaggagtgcctggagcacggccggatcgccaagttcagcaaggtgagaaccatcaccacccgaagcaacagcatcaaacaaggcaaggaccagcactttcctgtgttcatgaacgagaaggaggacatcctgtggtgtaccgagatggagagagtgttcgggttcccagtccactacacagatgtcagcaacatgtctagactggccagacagagactgctgggaagaagctggtccgtccctgtgatcagacacctgttcgcccctctgaaggagtacttcgcctgcgtgagcagcggcaacagcaacgccaacagccggggccccagcttctctagcggcctggtgccactgtccctgagagggagccacatgggccccatggagatctacaaaaccgtgagcgcctggaagcggcagcctgtgcgcgtgctgagcctgtttcggaatatcgataaagtcctgaaaagcctgggattcctggagagcggctctggctccggcggtggcaccctgaagtacgtggaggatgtgacaaacgtggtcagacgggatgtggagaagtggggccccttcgatctggtgtacggcagcacccaacccctgggcagctcttgtgaccggtgccctggctggtacatgtttcagttccaccggatcctgcagtacgccctgccgagacaggagtcccagcggccattcttttggattttcatggacaacttgctgctgaccgaggatgaccaggaaactaccactcggttcctgcagaccgaagccgtgaccctgcaggacgtgagaggccgggactaccagaacgccatgcgggtgtggtccaacatccctggactgaaaagcaagcacgcacctctgacccctaaagaagaggagtacctgcaggcccaggtgcggagcagaagcaagctggacgcccctaaggtggatctgctggtgaagaattgcctcctgcccctgagagagtacttcaagtatttcagccagaatagtctgcccctgggaggcagcggcggcggcgccctggtgacatttgaggacgtcgccgtgcggttcacccaggaggaatgggctctgctggatccttctcagaaaatcctgtaccgggacgtgatgagagagacataccggaatctgacctccgtgggcatcaactgggaatgttgggaccttgaagcctgcttcagaagcctgggaagaaacctgagagtgcaggtggtgaagagaaagtgcgagctgaccaacagcggcccctgcgccgagggcggcccaagcagcggcgcccctcctcccagcggcggcagcccagccggctccccaacctctaccgaggagggcacctctgagtccgccacccccgagagcggccctggcacctccaccgagcccagcgagggcagcgcacccggcagccctgccggcagccccacctccacagaggagggaaccagcaccgagcccagcgaaggcagcgccccaggcaccagcaccgagcctagtgagcaggagattaaacggatcaacaagatcagaagaagacttgtgaaagacagcaacaccaagaaggccggcaagacaggccccatgaaaaccctgctggttagagtgatgacacccgatctgagagagcggctggaaaacctgagaaagaagcctgaaaatatcccccagcccatcagcaatacatctagagccaacctgaataagctgctgaccgattacaccgaaatgaagaaggcgatcctgcatgtgtactgggaagagttccagaaggaccctgtgggcctgatgagccgggtggcccagcctgccagcaagaagatcgatcagaacaagctgaaacctgagatggacgagaagggcaacctgaccaccgccggctttgcctgctctcagtgtggccagcccctgttcgtgtacaagctggagcaggtgtctgagaagggcaaggcttacaccaactacttcggacggtgcaatgtggccgagcacgaaaagctgatcctgctggcccagctgaagcccgagaaggatagcgacgaagccgtgacatatagcctgggaaagtttgggcagagggccctggatttctacagcattcatgtgaccaaggagtccacccaccccgtgaagcccctggcccagatcgccggaaacagatacgcctccggacctgtgggaaaggccctgagcgacgcatgtatgggcacaatcgcctccttcctgtctaagtaccaggacatcatcatcgaacaccagaaggtggtgaagggcaaccagaagagactggagagcctgcgggagctggccggcaaggaaaacctggaataccctagcgtgaccctgccacctcagcctcacaccaaggagggcgttgatgcctacaacgaagtgatcgcccgggtgcgaatgtgggtgaacctgaacctgtggcagaagctgaagctaagcagagatgatgccaagcctctgctgagactgaagggattcccttcctttcctctggtcgagagacaggccaacgaagtggactggtgggacatggtgtgtaacgtgaagaagctgatcaacgagaaaaaggaggatggcaaggtgttttggcagaatctggctggctacaagagacaggaagccctgagaccatacctgagcagcgaggaagatcggaagaagggaaagaaattcgctcggtaccagctgggcgacctgctgctgcacctggaaaagaagcacggcgaggactggggaaaggtgtacgacgaggcctgggagcggattgacaagaaagtggaaggcctgagcaagcacatcaagctggaagaggaacggagaagcgaggacgcccagagcaaggccgccctgaccgactggctgcgggctaaggccagcttcgtgatcgagggcctgaaggaggccgacaaggacgagttctgcagatgcgagctgaagctgcagaagtggtacggggacctgcggggaaagcccttcgccatcgaagccgagaacagcatcctggacatcagcggcttcagcaagcagtacaactgtgccttcatctggcagaaggacggcgtgaagaagctgaacctgtacctgatcatcaactacttcaagggcggcaagctgcggttcaagaagatcaaacctgaagccttcgaagccaacagattctacaccgtgatcaacaaaaagagcggcgagatcgtgcccatggaggtgaacttcaacttcgacgaccccaacctgatcatcctgcctctggcctttggcaagagacagggcagagaattcatctggaacgacctgctgtccctggaaaccggcagcctgaagctggccaacggaagagtgatcgagaagacactgtacaacagaagaacccggcaggatgagcctgccctgttcgtggccctgaccttcgagcggcgggaggtcctggactcctccaatatcaaaccaatgaacctgatcggcgtggcaagaggcgaaaacatccccgccgtgatcgccctgaccgaccccgagggctgcccactgagccggtttaaggatagcctgggaaacccaacccacatcctgagaatcggcgagagctataaggagaagcagcggaccatccaggccaagaaggaggtggagcagcggagagccggcggctacagccggaagtacgccagcaaagccaagaatctggcagacgatatggtgagaaacaccgctagagatctgctgtactacgccgtgacccaggatgccatgctgatcttcgccaacctgagccggggcttcggccggcagggcaagcggaccttcatggccgagagacagtacacacggatggaggactggctgaccgccaagctggcctacgagggcctgagcaagacctacctgtccaagacactggcccagtacacctccaagacatgcagcaactgtgggtttaccatcaccagcgccgactacgacagggtgctggagaagctgaagaagacagcaacaggctggatgaccacaattaacggcaaggagctgaaggtggagggccagattacctactacaacagatacaagagacagaacgtagtcaaggacctgtccgtcgagctggatagactgagcgaagaatctgtgaacaacgacatctcctcctggacaaagggcagaagcggagaagctctgagcctcctgaagaaaagattctcccatagacccgtgcaggagaagttcgtgtgcctgaactgcggcttcgagacacacgcagccgagcaagccgccctgaacatcgccagatcctggctgttcctgcggagccaggagtacaagaaataccagacaaacaagacaaccggcaacaccgataagagagccttcgtcgagacctggcagtccttttaccggaagaagcttaaggaggtgtggaaacctgccgtgcggtctggcggatctggcggaggctccgaccacgagctggtgaccttcagggacgtgatcatcaacttcagccaggacgagtgggagtacctgaacagcgcccagagggacctgtactgggacgtgatgatggagaactacagcaacctggtgagcctgggctgcttcatcagcaagcccgacgtgatcagcctgctggagcagggcaaggagccctggaaggtggtgaggaaggagaggaggaggtaccccgacctggagaccaggcacggcggcccaagcagcggcgcccctcctcccagcggcggcagcccagccggctccccaacctctaccgaggagggcacctctgagtccgccacccccgagagcggccctggcacctccaccgagcccagcgagggcagcgcacccggcagccctgccggcagccccacctccacagaggagggaaccagcaccgagcccagcgaaggcagcgccccaggcaccagcaccgagcctagtgagcaggagattaaacggatcaacaagatcagaagaagacttgtgaaagacagcaacaccaagaaggccggcaagacaggccccatgaaaaccctgctggttagagtgatgacacccgatctgagagagcggctggaaaacctgagaaagaagcctgaaaatatcccccagcccatcagcaatacatctagagccaacctgaataagctgctgaccgattacaccgaaatgaagaaggcgatcctgcatgtgtactgggaagagttccagaaggaccctgtgggcctgatgagccgggtggcccagcctgccagcaagaagatcgatcagaacaagctgaaacctgagatggacgagaagggcaacctgaccaccgccggctttgcctgctctcagtgtggccagcccctgttcgtgtacaagctggagcaggtgtctgagaagggcaaggcttacaccaactacttcggacggtgcaatgtggccgagcacgaaaagctgatcctgctggcccagctgaagcccgagaaggatagcgacgaagccgtgacatatagcctgggaaagtttgggcagagggccctggatttctacagcattcatgtgaccaaggagtccacccaccccgtgaagcccctggcccagatcgccggaaacagatacgcctccggacctgtgggaaaggccctgagcgacgcatgtatgggcacaatcgcctccttcctgtctaagtaccaggacatcatcatcgaacaccagaaggtggtgaagggcaaccagaagagactggagagcctgcgggagctggccggcaaggaaaacctggaataccctagcgtgaccctgccacctcagcctcacaccaaggagggcgttgatgcctacaacgaagtgatcgcccgggtgcgaatgtgggtgaacctgaacctgtggcagaagctgaagctaagcagagatgatgccaagcctctgctgagactgaagggattcccttcctttcctctggtcgagagacaggccaacgaagtggactggtgggacatggtgtgtaacgtgaagaagctgatcaacgagaaaaaggaggatggcaaggtgttttggcagaatctggctggctacaagagacaggaagccctgagaccatacctgagcagcgaggaagatcggaagaagggaaagaaattcgctcggtaccagctgggcgacctgctgctgcacctggaaaagaagcacggcgaggactggggaaaggtgtacgacgaggcctgggagcggattgacaagaaagtggaaggcctgagcaagcacatcaagctggaagaggaacggagaagcgaggacgcccagagcaaggccgccctgaccgactggctgcgggctaaggccagcttcgtgatcgagggcctgaaggaggccgacaaggacgagttctgcagatgcgagctgaagctgcagaagtggtacggggacctgcggggaaagcccttcgccatcgaagccgagaacagcatcctggacatcagcggcttcagcaagcagtacaactgtgccttcatctggcagaaggacggcgtgaagaagctgaacctgtacctgatcatcaactacttcaagggcggcaagctgcggttcaagaagatcaaacctgaagccttcgaagccaacagattctacaccgtgatcaacaaaaagagcggcgagatcgtgcccatggaggtgaacttcaacttcgacgaccccaacctgatcatcctgcctctggcctttggcaagagacagggcagagaattcatctggaacgacctgctgtccctggaaaccggcagcctgaagctggccaacggaagagtgatcgagaagacactgtacaacagaagaacccggcaggatgagcctgccctgttcgtggccctgaccttcgagcggcgggaggtcctggactcctccaatatcaaaccaatgaacctgatcggcgtggcaagaggcgaaaacatccccgccgtgatcgccctgaccgaccccgagggctgcccactgagccggtttaaggatagcctgggaaacccaacccacatcctgagaatcggcgagagctataaggagaagcagcggaccatccaggccaagaaggaggtggagcagcggagagccggcggctacagccggaagtacgccagcaaagccaagaatctggcagacgatatggtgagaaacaccgctagagatctgctgtactacgccgtgacccaggatgccatgctgatcttcgccaacctgagccggggcttcggccggcagggcaagcggaccttcatggccgagagacagtacacacggatggaggactggctgaccgccaagctggcctacgagggcctgagcaagacctacctgtccaagacactggcccagtacacctccaagacatgcagcaactgtgggtttaccatcaccagcgccgactacgacagggtgctggagaagctgaagaagacagcaacaggctggatgaccacaattaacggcaaggagctgaaggtggagggccagattacctactacaacagatacaagagacagaacgtagtcaaggacctgtccgtcgagctggatagactgagcgaagaatctgtgaacaacgacatctcctcctggacaaagggcagaagcggagaagctctgagcctcctgaagaaaagattctcccatagacccgtgcaggagaagttcgtgtgcctgaactgcggcttcgagacacacgcagccgagcaagccgccctgaacatcgccagatcctggctgttcctgcggagccaggagtacaagaaataccagacaaacaagacaaccggcaacaccgataagagagccttcgtcgagacctggcagtccttttaccggaagaagcttaaggaggtgtggaaacctgccgtgcggtctggcggatctggcggaggctcctgaccacgagctggtgaccttcagggacgtgatcatcaacttcagccaggacgagtgggagtacctgaacagcgcccagagggacctgtactgggacgtgatgatggagaactacagcaacctggtgagcctgggctgcttcatcagcaagcccgacgtgatcagcctgctggagcagggcaaggagccctggaaggtggtgaggaaggagaggaggaggtaccccgacctggagaccaggcacggatctggctccggcagcggccccaagaaaaagagaaaagtctaagctgccttctgcggggcttgccttctggccatgcccttcttctctcccttgcacctgtacctcttggtctttgaataaagcctgagtaggaaggctagcaaaaaaaaaaaaaaaaaaaaaaaaaaaaaaaaaaaaaaaaaaaaaaaaaaaaaaaaaaaaaaaaaaaaaaaaaaaaaaaa

SEQ ID NO: 15617 - RNA, 9485 nt, synthetic construct
  source 1..9485: mol_type = other RNA
aggaaataagagagaaaagaagagtaagaagaaatataagagccaccatggcccctaagaagaagcgtaaagtgagccggatggaacgcctcgtctacgaggtgcggcagaagtgcagaaacatcgaggacatctgcatctcctgcggatctctgaacgtgaccctggagcacccactgttcatcggcggcatgtgccagaactgtaaaaactgttttctggagtgtgcctatcaatacgacgatgacggctaccagagctactgcaccatctgttgcggcggaagagaggtgctgatgtgtggaaataacaactgctgccggtgcttctgcgtggaatgcgtggacctgctggtgggccccggcgccgcccaggccgctattaaggaagatccttggaactgctacatgtgcggccacaagggcacatacggcctgctgagacggagagaggactggcctagcagactgcagatgttcttcgccaataaccacgaccaggagttcgacccccctaaggtgtaccctcccgtccccgccgagaagagaaagcccatccgggtcctgagcctgttcgatggcatcgccaccggtctgctggtgctgaaggacctgggcatccaggtggataggtacattgcctccgaggtgtgcgaggactccatcaccgtgggaatggtgcgtcatcagggcaagatcatgtacgtgggcgacgtgcggagcgtgacacagaagcatatccaggagtggggccctttcgacctggtgatcggcggcagcccttgcaatgacctgagcatcgtgaacccagcccggaagggcctgtacgagggaaccggcagactgttcttcgagttttacagactgctgcacgacgcccggcctaaggaaggcgacgaccggcccttcttttggctgttcgagaatgtggtggccatgggagtcagcgacaagcgggatattagccggttcctggagagcaaccccgtgatgatcgatgccaaggaagtgagcgccgcccaccgggccagatacttctggggcaatctgcctggcatgaacagacccctggccagcaccgtgaacgacaagctggagctgcaggagtgcctggagcacggccggatcgccaagttcagcaaggtgagaaccatcaccacccgaagcaacagcatcaaacaaggcaaggaccagcactttcctgtgttcatgaacgagaaggaggacatcctgtggtgtaccgagatggagagagtgttcgggttcccagtccactacacagatgtcagcaacatgtctagactggccagacagagactgctgggaagaagctggtccgtccctgtgatcagacacctgttcgcccctctgaaggagtacttcgcctgcgtgagcagcggcaacagcaacgccaacagccggggccccagcttctctagcggcctggtgccactgtccctgagagggagccacatgggccccatggagatctacaaaaccgtgagcgcctggaagcggcagcctgtgcgcgtgctgagcctgtttcggaatatcgataaagtcctgaaaagcctgggattcctggagagcggctctggctccggcggtggcaccctgaagtacgtggaggatgtgacaaacgtggtcagacgggatgtggagaagtggggccccttcgatctggtgtacggcagcacccaacccctgggcagctcttgtgaccggtgccctggctggtacatgtttcagttccaccggatcctgcagtacgccctgccgagacaggagtcccagcggccattcttttggattttcatggacaacttgctgctgaccgaggatgaccaggaaactaccactcggttcctgcagaccgaagccgtgaccctgcaggacgtgagaggccgggactaccagaacgccatgcgggtgtggtccaacatccctggactgaaaagcaagcacgcacctctgacccctaaagaagaggagtacctgcaggcccaggtgcggagcagaagcaagctggacgcccctaaggtggatctgctggtgaagaattgcctcctgcccctgagagagtacttcaagtatttcagccagaatagtctgcccctgggaggcagcggcggcggcgccctggtgacatttgaggacgtcgccgtgcggttcacccaggaggaatgggctctgctggatccttctcagaaaatcctgtaccgggacgtgatgagagagacataccggaatctgacctccgtgggcatcaactgggaatgttgggaccttgaagcctgcttcagaagcctgggaagaaacctgagagtgcaggtggtgaagagaaagtgcgagctgaccaacagcggcccctgcgccgagggcggcccaagcagcggcgcccctcctcccagcggcggcagcccagccggctccccaacctctaccgaggagggcacctctgagtccgccacccccgagagcggccctggcacctccaccgagcccagcgagggcagcgcacccggcagccctgccggcagccccacctccacagaggagggaaccagcaccgagcccagcgaaggcagcgccccaggcaccagcaccgagcctagtgagcaggagattaaacggatcaacaagatcagaagaagacttgtgaaagacagcaacaccaagaaggccggcaagacaggccccatgaaaaccctgctggttagagtgatgacacccgatctgagagagcggctggaaaacctgagaaagaagcctgaaaatatcccccagcccatcagcaatacatctagagccaacctgaataagctgctgaccgattacaccgaaatgaagaaggcgatcctgcatgtgtactgggaagagttccagaaggaccctgtgggcctgatgagccgggtggcccagcctgccagcaagaagatcgatcagaacaagctgaaacctgagatggacgagaagggcaacctgaccaccgccggctttgcctgctctcagtgtggccagcccctgttcgtgtacaagctggagcaggtgtctgagaagggcaaggcttacaccaactacttcggacggtgcaatgtggccgagcacgaaaagctgatcctgctggcccagctgaagcccgagaaggatagcgacgaagccgtgacatatagcctgggaaagtttgggcagagggccctggatttctacagcattcatgtgaccaaggagtccacccaccccgtgaagcccctggcccagatcgccggaaacagatacgcctccggacctgtgggaaaggccctgagcgacgcatgtatgggcacaatcgcctccttcctgtctaagtaccaggacatcatcatcgaacaccagaaggtggtgaagggcaaccagaagagactggagagcctgcgggagctggccggcaaggaaaacctggaataccctagcgtgaccctgccacctcagcctcacaccaaggagggcgttgatgcctacaacgaagtgatcgcccgggtgcgaatgtgggtgaacctgaacctgtggcagaagctgaagctaagcagagatgatgccaagcctctgctgagactgaagggattcccttcctttcctctggtcgagagacaggccaacgaagtggactggtgggacatggtgtgtaacgtgaagaagctgatcaacgagaaaaaggaggatggcaaggtgttttggcagaatctggctggctacaagagacaggaagccctgagaccatacctgagcagcgaggaagatcggaagaagggaaagaaattcgctcggtaccagctgggcgacctgctgctgcacctggaaaagaagcacggcgaggactggggaaaggtgtacgacgaggcctgggagcggattgacaagaaagtggaaggcctgagcaagcacatcaagctggaagaggaacggagaagcgaggacgcccagagcaaggccgccctgaccgactggctgcgggctaaggccagcttcgtgatcgagggcctgaaggaggccgacaaggacgagttctgcagatgcgagctgaagctgcagaagtggtacggggacctgcggggaaagcccttcgccatcgaagccgagaacagcatcctggacatcagcggcttcagcaagcagtacaactgtgccttcatctggcagaaggacggcgtgaagaagctgaacctgtacctgatcatcaactacttcaagggcggcaagctgcggttcaagaagatcaaacctgaagccttcgaagccaacagattctacaccgtgatcaacaaaaagagcggcgagatcgtgcccatggaggtgaacttcaacttcgacgaccccaacctgatcatcctgcctctggcctttggcaagagacagggcagagaattcatctggaacgacctgctgtccctggaaaccggcagcctgaagctggccaacggaagagtgatcgagaagacactgtacaacagaagaacccggcaggatgagcctgccctgttcgtggccctgaccttcgagcggcgggaggtcctggactcctccaatatcaaaccaatgaacctgatcggcgtggcaagaggcgaaaacatccccgccgtgatcgccctgaccgaccccgagggctgcccactgagccggtttaaggatagcctgggaaacccaacccacatcctgagaatcggcgagagctataaggagaagcagcggaccatccaggccaagaaggaggtggagcagcggagagccggcggctacagccggaagtacgccagcaaagccaagaatctggcagacgatatggtgagaaacaccgctagagatctgctgtactacgccgtgacccaggatgccatgctgatcttcgccaacctgagccggggcttcggccggcagggcaagcggaccttcatggccgagagacagtacacacggatggaggactggctgaccgccaagctggcctacgagggcctgagcaagacctacctgtccaagacactggcccagtacacctccaagacatgcagcaactgtgggtttaccatcaccagcgccgactacgacagggtgctggagaagctgaagaagacagcaacaggctggatgaccacaattaacggcaaggagctgaaggtggagggccagattacctactacaacagatacaagagacagaacgtagtcaaggacctgtccgtcgagctggatagactgagcgaagaatctgtgaacaacgacatctcctcctggacaaagggcagaagcggagaagctctgagcctcctgaagaaaagattctcccatagacccgtgcaggagaagttcgtgtgcctgaactgcggcttcgagacacacgcagccgagcaagccgccctgaacatcgccagatcctggctgttcctgcggagccaggagtacaagaaataccagacaaacaagacaaccggcaacaccgataagagagccttcgtcgagacctggcagtccttttaccggaagaagcttaaggaggtgtggaaacctgccgtgcggtctggcggatctggcggaggctcccagctgggcagcgtggccttcgaggacgtggccgtggacttcacccaggaggagtggggctacctggcccccgcccagagggacctgcacagggaggtgatgctggagaactacaggaacctggtgttcctgggcctggtggccagcaagcccgacgtgatctgccacctggagcagaggaaggagccctggagcctgaggggcatcgagaagaggaaggccctgaggggcacctgccccgacggcggcccaagcagcggcgcccctcctcccagcggcggcagcccagccggctccccaacctctaccgaggagggcacctctgagtccgccacccccgagagcggccctggcacctccaccgagcccagcgagggcagcgcacccggcagccctgccggcagccccacctccacagaggagggaaccagcaccgagcccagcgaaggcagcgccccaggcaccagcaccgagcctagtgagcaggagattaaacggatcaacaagatcagaagaagacttgtgaaagacagcaacaccaagaaggccggcaagacaggccccatgaaaaccctgctggttagagtgatgacacccgatctgagagagcggctggaaaacctgagaaagaagcctgaaaatatcccccagcccatcagcaatacatctagagccaacctgaataagctgctgaccgattacaccgaaatgaagaaggcgatcctgcatgtgtactgggaagagttccagaaggaccctgtgggcctgatgagccgggtggcccagcctgccagcaagaagatcgatcagaacaagctgaaacctgagatggacgagaagggcaacctgaccaccgccggctttgcctgctctcagtgtggccagcccctgttcgtgtacaagctggagcaggtgtctgagaagggcaaggcttacaccaactacttcggacggtgcaatgtggccgagcacgaaaagctgatcctgctggcccagctgaagcccgagaaggatagcgacgaagccgtgacatatagcctgggaaagtttgggcagagggccctggatttctacagcattcatgtgaccaaggagtccacccaccccgtgaagcccctggcccagatcgccggaaacagatacgcctccggacctgtgggaaaggccctgagcgacgcatgtatgggcacaatcgcctccttcctgtctaagtaccaggacatcatcatcgaacaccagaaggtggtgaagggcaaccagaagagactggagagcctgcgggagctggccggcaaggaaaacctggaataccctagcgtgaccctgccacctcagcctcacaccaaggagggcgttgatgcctacaacgaagtgatcgcccgggtgcgaatgtgggtgaacctgaacctgtggcagaagctgaagctaagcagagatgatgccaagcctctgctgagactgaagggattcccttcctttcctctggtcgagagacaggccaacgaagtggactggtgggacatggtgtgtaacgtgaagaagctgatcaacgagaaaaaggaggatggcaaggtgttttggcagaatctggctggctacaagagacaggaagccctgagaccatacctgagcagcgaggaagatcggaagaagggaaagaaattcgctcggtaccagctgggcgacctgctgctgcacctggaaaagaagcacggcgaggactggggaaaggtgtacgacgaggcctgggagcggattgacaagaaagtggaaggcctgagcaagcacatcaagctggaagaggaacggagaagcgaggacgcccagagcaaggccgccctgaccgactggctgcgggctaaggccagcttcgtgatcgagggcctgaaggaggccgacaaggacgagttctgcagatgcgagctgaagctgcagaagtggtacggggacctgcggggaaagcccttcgccatcgaagccgagaacagcatcctggacatcagcggcttcagcaagcagtacaactgtgccttcatctggcagaaggacggcgtgaagaagctgaacctgtacctgatcatcaactacttcaagggcggcaagctgcggttcaagaagatcaaacctgaagccttcgaagccaacagattctacaccgtgatcaacaaaaagagcggcgagatcgtgcccatggaggtgaacttcaacttcgacgaccccaacctgatcatcctgcctctggcctttggcaagagacagggcagagaattcatctggaacgacctgctgtccctggaaaccggcagcctgaagctggccaacggaagagtgatcgagaagacactgtacaacagaagaacccggcaggatgagcctgccctgttcgtggccctgaccttcgagcggcgggaggtcctggactcctccaatatcaaaccaatgaacctgatcggcgtggcaagaggcgaaaacatccccgccgtgatcgccctgaccgaccccgagggctgcccactgagccggtttaaggatagcctgggaaacccaacccacatcctgagaatcggcgagagctataaggagaagcagcggaccatccaggccaagaaggaggtggagcagcggagagccggcggctacagccggaagtacgccagcaaagccaagaatctggcagacgatatggtgagaaacaccgctagagatctgctgtactacgccgtgacccaggatgccatgctgatcttcgccaacctgagccggggcttcggccggcagggcaagcggaccttcatggccgagagacagtacacacggatggaggactggctgaccgccaagctggcctacgagggcctgagcaagacctacctgtccaagacactggcccagtacacctccaagacatgcagcaactgtgggtttaccatcaccagcgccgactacgacagggtgctggagaagctgaagaagacagcaacaggctggatgaccacaattaacggcaaggagctgaaggtggagggccagattacctactacaacagatacaagagacagaacgtagtcaaggacctgtccgtcgagctggatagactgagcgaagaatctgtgaacaacgacatctcctcctggacaaagggcagaagcggagaagctctgagcctcctgaagaaaagattctcccatagacccgtgcaggagaagttcgtgtgcctgaactgcggcttcgagacacacgcagccgagcaagccgccctgaacatcgccagatcctggctgttcctgcggagccaggagtacaagaaataccagacaaacaagacaaccggcaacaccgataagagagccttcgtcgagacctggcagtccttttaccggaagaagcttaaggaggtgtggaaacctgccgtgcggtctggcggatctggcggaggctcctcagctgggcagcgtggccttcgaggacgtggccgtggacttcacccaggaggagtggggctacctggcccccgcccagagggacctgcacagggaggtgatgctggagaactacaggaacctggtgttcctgggcctggtggccagcaagcccgacgtgatctgccacctggagcagaggaaggagccctggagcctgaggggcatcgagaagaggaaggccctgaggggcacctgccccgacggatctggctccggcagcggccccaagaaaaagagaaaagtctaagctgccttctgcggggcttgccttctggccatgcccttcttctctcccttgcacctgtacctcttggtctttgaataaagcctgagtaggaaggctagcaaaaaaaaaaaaaaaaaaaaaaaaaaaaaaaaaaaaaaaaaaaaaaaaaaaaaaaaaaaaaaaaaaaaaaaaaaaaaaaa

SEQ ID NO: 15618 - RNA, 9485 nt, synthetic construct
  source 1..9485: mol_type = other RNA
aggaaataagagagaaaagaagagtaagaagaaatataagagccaccatggcccctaagaagaagcgtaaagtgagccggatggaacgcctcgtctacgaggtgcggcagaagtgcagaaacatcgaggacatctgcatctcctgcggatctctgaacgtgaccctggagcacccactgttcatcggcggcatgtgccagaactgtaaaaactgttttctggagtgtgcctatcaatacgacgatgacggctaccagagctactgcaccatctgttgcggcggaagagaggtgctgatgtgtggaaataacaactgctgccggtgcttctgcgtggaatgcgtggacctgctggtgggccccggcgccgcccaggccgctattaaggaagatccttggaactgctacatgtgcggccacaagggcacatacggcctgctgagacggagagaggactggcctagcagactgcagatgttcttcgccaataaccacgaccaggagttcgacccccctaaggtgtaccctcccgtccccgccgagaagagaaagcccatccgggtcctgagcctgttcgatggcatcgccaccggtctgctggtgctgaaggacctgggcatccaggtggataggtacattgcctccgaggtgtgcgaggactccatcaccgtgggaatggtgcgtcatcagggcaagatcatgtacgtgggcgacgtgcggagcgtgacacagaagcatatccaggagtggggccctttcgacctggtgatcggcggcagcccttgcaatgacctgagcatcgtgaacccagcccggaagggcctgtacgagggaaccggcagactgttcttcgagttttacagactgctgcacgacgcccggcctaaggaaggcgacgaccggcccttcttttggctgttcgagaatgtggtggccatgggagtcagcgacaagcgggatattagccggttcctggagagcaaccccgtgatgatcgatgccaaggaagtgagcgccgcccaccgggccagatacttctggggcaatctgcctggcatgaacagacccctggccagcaccgtgaacgacaagctggagctgcaggagtgcctggagcacggccggatcgccaagttcagcaaggtgagaaccatcaccacccgaagcaacagcatcaaacaaggcaaggaccagcactttcctgtgttcatgaacgagaaggaggacatcctgtggtgtaccgagatggagagagtgttcgggttcccagtccactacacagatgtcagcaacatgtctagactggccagacagagactgctgggaagaagctggtccgtccctgtgatcagacacctgttcgcccctctgaaggagtacttcgcctgcgtgagcagcggcaacagcaacgccaacagccggggccccagcttctctagcggcctggtgccactgtccctgagagggagccacatgggccccatggagatctacaaaaccgtgagcgcctggaagcggcagcctgtgcgcgtgctgagcctgtttcggaatatcgataaagtcctgaaaagcctgggattcctggagagcggctctggctccggcggtggcaccctgaagtacgtggaggatgtgacaaacgtggtcagacgggatgtggagaagtggggccccttcgatctggtgtacggcagcacccaacccctgggcagctcttgtgaccggtgccctggctggtacatgtttcagttccaccggatcctgcagtacgccctgccgagacaggagtcccagcggccattcttttggattttcatggacaacttgctgctgaccgaggatgaccaggaaactaccactcggttcctgcagaccgaagccgtgaccctgcaggacgtgagaggccgggactaccagaacgccatgcgggtgtggtccaacatccctggactgaaaagcaagcacgcacctctgacccctaaagaagaggagtacctgcaggcccaggtgcggagcagaagcaagctggacgcccctaaggtggatctgctggtgaagaattgcctcctgcccctgagagagtacttcaagtatttcagccagaatagtctgcccctgggaggcagcggcggcggcgccctggtgacatttgaggacgtcgccgtgcggttcacccaggaggaatgggctctgctggatccttctcagaaaatcctgtaccgggacgtgatgagagagacataccggaatctgacctccgtgggcatcaactgggaatgttgggaccttgaagcctgcttcagaagcctgggaagaaacctgagagtgcaggtggtgaagagaaagtgcgagctgaccaacagcggcccctgcgccgagggcggcccaagcagcggcgcccctcctcccagcggcggcagcccagccggctccccaacctctaccgaggagggcacctctgagtccgccacccccgagagcggccctggcacctccaccgagcccagcgagggcagcgcacccggcagccctgccggcagccccacctccacagaggagggaaccagcaccgagcccagcgaaggcagcgccccaggcaccagcaccgagcctagtgagcaggagattaaacggatcaacaagatcagaagaagacttgtgaaagacagcaacaccaagaaggccggcaagacaggccccatgaaaaccctgctggttagagtgatgacacccgatctgagagagcggctggaaaacctgagaaagaagcctgaaaatatcccccagcccatcagcaatacatctagagccaacctgaataagctgctgaccgattacaccgaaatgaagaaggcgatcctgcatgtgtactgggaagagttccagaaggaccctgtgggcctgatgagccgggtggcccagcctgccagcaagaagatcgatcagaacaagctgaaacctgagatggacgagaagggcaacctgaccaccgccggctttgcctgctctcagtgtggccagcccctgttcgtgtacaagctggagcaggtgtctgagaagggcaaggcttacaccaactacttcggacggtgcaatgtggccgagcacgaaaagctgatcctgctggcccagctgaagcccgagaaggatagcgacgaagccgtgacatatagcctgggaaagtttgggcagagggccctggatttctacagcattcatgtgaccaaggagtccacccaccccgtgaagcccctggcccagatcgccggaaacagatacgcctccggacctgtgggaaaggccctgagcgacgcatgtatgggcacaatcgcctccttcctgtctaagtaccaggacatcatcatcgaacaccagaaggtggtgaagggcaaccagaagagactggagagcctgcgggagctggccggcaaggaaaacctggaataccctagcgtgaccctgccacctcagcctcacaccaaggagggcgttgatgcctacaacgaagtgatcgcccgggtgcgaatgtgggtgaacctgaacctgtggcagaagctgaagctaagcagagatgatgccaagcctctgctgagactgaagggattcccttcctttcctctggtcgagagacaggccaacgaagtggactggtgggacatggtgtgtaacgtgaagaagctgatcaacgagaaaaaggaggatggcaaggtgttttggcagaatctggctggctacaagagacaggaagccctgagaccatacctgagcagcgaggaagatcggaagaagggaaagaaattcgctcggtaccagctgggcgacctgctgctgcacctggaaaagaagcacggcgaggactggggaaaggtgtacgacgaggcctgggagcggattgacaagaaagtggaaggcctgagcaagcacatcaagctggaagaggaacggagaagcgaggacgcccagagcaaggccgccctgaccgactggctgcgggctaaggccagcttcgtgatcgagggcctgaaggaggccgacaaggacgagttctgcagatgcgagctgaagctgcagaagtggtacggggacctgcggggaaagcccttcgccatcgaagccgagaacagcatcctggacatcagcggcttcagcaagcagtacaactgtgccttcatctggcagaaggacggcgtgaagaagctgaacctgtacctgatcatcaactacttcaagggcggcaagctgcggttcaagaagatcaaacctgaagccttcgaagccaacagattctacaccgtgatcaacaaaaagagcggcgagatcgtgcccatggaggtgaacttcaacttcgacgaccccaacctgatcatcctgcctctggcctttggcaagagacagggcagagaattcatctggaacgacctgctgtccctggaaaccggcagcctgaagctggccaacggaagagtgatcgagaagacactgtacaacagaagaacccggcaggatgagcctgccctgttcgtggccctgaccttcgagcggcgggaggtcctggactcctccaatatcaaaccaatgaacctgatcggcgtggcaagaggcgaaaacatccccgccgtgatcgccctgaccgaccccgagggctgcccactgagccggtttaaggatagcctgggaaacccaacccacatcctgagaatcggcgagagctataaggagaagcagcggaccatccaggccaagaaggaggtggagcagcggagagccggcggctacagccggaagtacgccagcaaagccaagaatctggcagacgatatggtgagaaacaccgctagagatctgctgtactacgccgtgacccaggatgccatgctgatcttcgccaacctgagccggggcttcggccggcagggcaagcggaccttcatggccgagagacagtacacacggatggaggactggctgaccgccaagctggcctacgagggcctgagcaagacctacctgtccaagacactggcccagtacacctccaagacatgcagcaactgtgggtttaccatcaccagcgccgactacgacagggtgctggagaagctgaagaagacagcaacaggctggatgaccacaattaacggcaaggagctgaaggtggagggccagattacctactacaacagatacaagagacagaacgtagtcaaggacctgtccgtcgagctggatagactgagcgaagaatctgtgaacaacgacatctcctcctggacaaagggcagaagcggagaagctctgagcctcctgaagaaaagattctcccatagacccgtgcaggagaagttcgtgtgcctgaactgcggcttcgagacacacgcagccgagcaagccgccctgaacatcgccagatcctggctgttcctgcggagccaggagtacaagaaataccagacaaacaagacaaccggcaacaccgataagagagccttcgtcgagacctggcagtccttttaccggaagaagcttaaggaggtgtggaaacctgccgtgcggtctggcggatctggcggaggctcccccaccgcccccgtggccttcagcgacctgaccatctgcttcagccaggaggagtggggctggctgagccccacccagaagctgctgtacgaggaggtgatgctggagaactaccagaacctggtgagcgtgggcctgtgcaccaggaagccccacatcatcaccctgctggagaagggcaaggacccctggatcgccgagcccctgaggaagaggggcggccccgaccccgccagcaggtacggcggcccaagcagcggcgcccctcctcccagcggcggcagcccagccggctccccaacctctaccgaggagggcacctctgagtccgccacccccgagagcggccctggcacctccaccgagcccagcgagggcagcgcacccggcagccctgccggcagccccacctccacagaggagggaaccagcaccgagcccagcgaaggcagcgccccaggcaccagcaccgagcctagtgagcaggagattaaacggatcaacaagatcagaagaagacttgtgaaagacagcaacaccaagaaggccggcaagacaggccccatgaaaaccctgctggttagagtgatgacacccgatctgagagagcggctggaaaacctgagaaagaagcctgaaaatatcccccagcccatcagcaatacatctagagccaacctgaataagctgctgaccgattacaccgaaatgaagaaggcgatcctgcatgtgtactgggaagagttccagaaggaccctgtgggcctgatgagccgggtggcccagcctgccagcaagaagatcgatcagaacaagctgaaacctgagatggacgagaagggcaacctgaccaccgccggctttgcctgctctcagtgtggccagcccctgttcgtgtacaagctggagcaggtgtctgagaagggcaaggcttacaccaactacttcggacggtgcaatgtggccgagcacgaaaagctgatcctgctggcccagctgaagcccgagaaggatagcgacgaagccgtgacatatagcctgggaaagtttgggcagagggccctggatttctacagcattcatgtgaccaaggagtccacccaccccgtgaagcccctggcccagatcgccggaaacagatacgcctccggacctgtgggaaaggccctgagcgacgcatgtatgggcacaatcgcctccttcctgtctaagtaccaggacatcatcatcgaacaccagaaggtggtgaagggcaaccagaagagactggagagcctgcgggagctggccggcaaggaaaacctggaataccctagcgtgaccctgccacctcagcctcacaccaaggagggcgttgatgcctacaacgaagtgatcgcccgggtgcgaatgtgggtgaacctgaacctgtggcagaagctgaagctaagcagagatgatgccaagcctctgctgagactgaagggattcccttcctttcctctggtcgagagacaggccaacgaagtggactggtgggacatggtgtgtaacgtgaagaagctgatcaacgagaaaaaggaggatggcaaggtgttttggcagaatctggctggctacaagagacaggaagccctgagaccatacctgagcagcgaggaagatcggaagaagggaaagaaattcgctcggtaccagctgggcgacctgctgctgcacctggaaaagaagcacggcgaggactggggaaaggtgtacgacgaggcctgggagcggattgacaagaaagtggaaggcctgagcaagcacatcaagctggaagaggaacggagaagcgaggacgcccagagcaaggccgccctgaccgactggctgcgggctaaggccagcttcgtgatcgagggcctgaaggaggccgacaaggacgagttctgcagatgcgagctgaagctgcagaagtggtacggggacctgcggggaaagcccttcgccatcgaagccgagaacagcatcctggacatcagcggcttcagcaagcagtacaactgtgccttcatctggcagaaggacggcgtgaagaagctgaacctgtacctgatcatcaactacttcaagggcggcaagctgcggttcaagaagatcaaacctgaagccttcgaagccaacagattctacaccgtgatcaacaaaaagagcggcgagatcgtgcccatggaggtgaacttcaacttcgacgaccccaacctgatcatcctgcctctggcctttggcaagagacagggcagagaattcatctggaacgacctgctgtccctggaaaccggcagcctgaagctggccaacggaagagtgatcgagaagacactgtacaacagaagaacccggcaggatgagcctgccctgttcgtggccctgaccttcgagcggcgggaggtcctggactcctccaatatcaaaccaatgaacctgatcggcgtggcaagaggcgaaaacatccccgccgtgatcgccctgaccgaccccgagggctgcccactgagccggtttaaggatagcctgggaaacccaacccacatcctgagaatcggcgagagctataaggagaagcagcggaccatccaggccaagaaggaggtggagcagcggagagccggcggctacagccggaagtacgccagcaaagccaagaatctggcagacgatatggtgagaaacaccgctagagatctgctgtactacgccgtgacccaggatgccatgctgatcttcgccaacctgagccggggcttcggccggcagggcaagcggaccttcatggccgagagacagtacacacggatggaggactggctgaccgccaagctggcctacgagggcctgagcaagacctacctgtccaagacactggcccagtacacctccaagacatgcagcaactgtgggtttaccatcaccagcgccgactacgacagggtgctggagaagctgaagaagacagcaacaggctggatgaccacaattaacggcaaggagctgaaggtggagggccagattacctactacaacagatacaagagacagaacgtagtcaaggacctgtccgtcgagctggatagactgagcgaagaatctgtgaacaacgacatctcctcctggacaaagggcagaagcggagaagctctgagcctcctgaagaaaagattctcccatagacccgtgcaggagaagttcgtgtgcctgaactgcggcttcgagacacacgcagccgagcaagccgccctgaacatcgccagatcctggctgttcctgcggagccaggagtacaagaaataccagacaaacaagacaaccggcaacaccgataagagagccttcgtcgagacctggcagtccttttaccggaagaagcttaaggaggtgtggaaacctgccgtgcggtctggcggatctggcggaggctcctcccaccgcccccgtggccttcagcgacctgaccatctgcttcagccaggaggagtggggctggctgagccccacccagaagctgctgtacgaggaggtgatgctggagaactaccagaacctggtgagcgtgggcctgtgcaccaggaagccccacatcatcaccctgctggagaagggcaaggacccctggatcgccgagcccctgaggaagaggggcggccccgaccccgccagcaggtacggatctggctccggcagcggccccaagaaaaagagaaaagtctaagctgccttctgcggggcttgccttctggccatgcccttcttctctcccttgcacctgtacctcttggtctttgaataaagcctgagtaggaaggctagcaaaaaaaaaaaaaaaaaaaaaaaaaaaaaaaaaaaaaaaaaaaaaaaaaaaaaaaaaaaaaaaaaaaaaaaaaaaaaaaa

SEQ ID NO: 15619 - RNA, 9485 nt, synthetic construct
  source 1..9485: mol_type = other RNA
aggaaataagagagaaaagaagagtaagaagaaatataagagccaccatggcccctaagaagaagcgtaaagtgagccggatggaacgcctcgtctacgaggtgcggcagaagtgcagaaacatcgaggacatctgcatctcctgcggatctctgaacgtgaccctggagcacccactgttcatcggcggcatgtgccagaactgtaaaaactgttttctggagtgtgcctatcaatacgacgatgacggctaccagagctactgcaccatctgttgcggcggaagagaggtgctgatgtgtggaaataacaactgctgccggtgcttctgcgtggaatgcgtggacctgctggtgggccccggcgccgcccaggccgctattaaggaagatccttggaactgctacatgtgcggccacaagggcacatacggcctgctgagacggagagaggactggcctagcagactgcagatgttcttcgccaataaccacgaccaggagttcgacccccctaaggtgtaccctcccgtccccgccgagaagagaaagcccatccgggtcctgagcctgttcgatggcatcgccaccggtctgctggtgctgaaggacctgggcatccaggtggataggtacattgcctccgaggtgtgcgaggactccatcaccgtgggaatggtgcgtcatcagggcaagatcatgtacgtgggcgacgtgcggagcgtgacacagaagcatatccaggagtggggccctttcgacctggtgatcggcggcagcccttgcaatgacctgagcatcgtgaacccagcccggaagggcctgtacgagggaaccggcagactgttcttcgagttttacagactgctgcacgacgcccggcctaaggaaggcgacgaccggcccttcttttggctgttcgagaatgtggtggccatgggagtcagcgacaagcgggatattagccggttcctggagagcaaccccgtgatgatcgatgccaaggaagtgagcgccgcccaccgggccagatacttctggggcaatctgcctggcatgaacagacccctggccagcaccgtgaacgacaagctggagctgcaggagtgcctggagcacggccggatcgccaagttcagcaaggtgagaaccatcaccacccgaagcaacagcatcaaacaaggcaaggaccagcactttcctgtgttcatgaacgagaaggaggacatcctgtggtgtaccgagatggagagagtgttcgggttcccagtccactacacagatgtcagcaacatgtctagactggccagacagagactgctgggaagaagctggtccgtccctgtgatcagacacctgttcgcccctctgaaggagtacttcgcctgcgtgagcagcggcaacagcaacgccaacagccggggccccagcttctctagcggcctggtgccactgtccctgagagggagccacatgggccccatggagatctacaaaaccgtgagcgcctggaagcggcagcctgtgcgcgtgctgagcctgtttcggaatatcgataaagtcctgaaaagcctgggattcctggagagcggctctggctccggcggtggcaccctgaagtacgtggaggatgtgacaaacgtggtcagacgggatgtggagaagtggggccccttcgatctggtgtacggcagcacccaacccctgggcagctcttgtgaccggtgccctggctggtacatgtttcagttccaccggatcctgcagtacgccctgccgagacaggagtcccagcggccattcttttggattttcatggacaacttgctgctgaccgaggatgaccaggaaactaccactcggttcctgcagaccgaagccgtgaccctgcaggacgtgagaggccgggactaccagaacgccatgcgggtgtggtccaacatccctggactgaaaagcaagcacgcacctctgacccctaaagaagaggagtacctgcaggcccaggtgcggagcagaagcaagctggacgcccctaaggtggatctgctggtgaagaattgcctcctgcccctgagagagtacttcaagtatttcagccagaatagtctgcccctgggaggcagcggcggcggcgccctggtgacatttgaggacgtcgccgtgcggttcacccaggaggaatgggctctgctggatccttctcagaaaatcctgtaccgggacgtgatgagagagacataccggaatctgacctccgtgggcatcaactgggaatgttgggaccttgaagcctgcttcagaagcctgggaagaaacctgagagtgcaggtggtgaagagaaagtgcgagctgaccaacagcggcccctgcgccgagggcggcccaagcagcggcgcccctcctcccagcggcggcagcccagccggctccccaacctctaccgaggagggcacctctgagtccgccacccccgagagcggccctggcacctccaccgagcccagcgagggcagcgcacccggcagccctgccggcagccccacctccacagaggagggaaccagcaccgagcccagcgaaggcagcgccccaggcaccagcaccgagcctagtgagcaggagattaaacggatcaacaagatcagaagaagacttgtgaaagacagcaacaccaagaaggccggcaagacaggccccatgaaaaccctgctggttagagtgatgacacccgatctgagagagcggctggaaaacctgagaaagaagcctgaaaatatcccccagcccatcagcaatacatctagagccaacctgaataagctgctgaccgattacaccgaaatgaagaaggcgatcctgcatgtgtactgggaagagttccagaaggaccctgtgggcctgatgagccgggtggcccagcctgccagcaagaagatcgatcagaacaagctgaaacctgagatggacgagaagggcaacctgaccaccgccggctttgcctgctctcagtgtggccagcccctgttcgtgtacaagctggagcaggtgtctgagaagggcaaggcttacaccaactacttcggacggtgcaatgtggccgagcacgaaaagctgatcctgctggcccagctgaagcccgagaaggatagcgacgaagccgtgacatatagcctgggaaagtttgggcagagggccctggatttctacagcattcatgtgaccaaggagtccacccaccccgtgaagcccctggcccagatcgccggaaacagatacgcctccggacctgtgggaaaggccctgagcgacgcatgtatgggcacaatcgcctccttcctgtctaagtaccaggacatcatcatcgaacaccagaaggtggtgaagggcaaccagaagagactggagagcctgcgggagctggccggcaaggaaaacctggaataccctagcgtgaccctgccacctcagcctcacaccaaggagggcgttgatgcctacaacgaagtgatcgcccgggtgcgaatgtgggtgaacctgaacctgtggcagaagctgaagctaagcagagatgatgccaagcctctgctgagactgaagggattcccttcctttcctctggtcgagagacaggccaacgaagtggactggtgggacatggtgtgtaacgtgaagaagctgatcaacgagaaaaaggaggatggcaaggtgttttggcagaatctggctggctacaagagacaggaagccctgagaccatacctgagcagcgaggaagatcggaagaagggaaagaaattcgctcggtaccagctgggcgacctgctgctgcacctggaaaagaagcacggcgaggactggggaaaggtgtacgacgaggcctgggagcggattgacaagaaagtggaaggcctgagcaagcacatcaagctggaagaggaacggagaagcgaggacgcccagagcaaggccgccctgaccgactggctgcgggctaaggccagcttcgtgatcgagggcctgaaggaggccgacaaggacgagttctgcagatgcgagctgaagctgcagaagtggtacggggacctgcggggaaagcccttcgccatcgaagccgagaacagcatcctggacatcagcggcttcagcaagcagtacaactgtgccttcatctggcagaaggacggcgtgaagaagctgaacctgtacctgatcatcaactacttcaagggcggcaagctgcggttcaagaagatcaaacctgaagccttcgaagccaacagattctacaccgtgatcaacaaaaagagcggcgagatcgtgcccatggaggtgaacttcaacttcgacgaccccaacctgatcatcctgcctctggcctttggcaagagacagggcagagaattcatctggaacgacctgctgtccctggaaaccggcagcctgaagctggccaacggaagagtgatcgagaagacactgtacaacagaagaacccggcaggatgagcctgccctgttcgtggccctgaccttcgagcggcgggaggtcctggactcctccaatatcaaaccaatgaacctgatcggcgtggcaagaggcgaaaacatccccgccgtgatcgccctgaccgaccccgagggctgcccactgagccggtttaaggatagcctgggaaacccaacccacatcctgagaatcggcgagagctataaggagaagcagcggaccatccaggccaagaaggaggtggagcagcggagagccggcggctacagccggaagtacgccagcaaagccaagaatctggcagacgatatggtgagaaacaccgctagagatctgctgtactacgccgtgacccaggatgccatgctgatcttcgccaacctgagccggggcttcggccggcagggcaagcggaccttcatggccgagagacagtacacacggatggaggactggctgaccgccaagctggcctacgagggcctgagcaagacctacctgtccaagacactggcccagtacacctccaagacatgcagcaactgtgggtttaccatcaccagcgccgactacgacagggtgctggagaagctgaagaagacagcaacaggctggatgaccacaattaacggcaaggagctgaaggtggagggccagattacctactacaacagatacaagagacagaacgtagtcaaggacctgtccgtcgagctggatagactgagcgaagaatctgtgaacaacgacatctcctcctggacaaagggcagaagcggagaagctctgagcctcctgaagaaaagattctcccatagacccgtgcaggagaagttcgtgtgcctgaactgcggcttcgagacacacgcagccgagcaagccgccctgaacatcgccagatcctggctgttcctgcggagccaggagtacaagaaataccagacaaacaagacaaccggcaacaccgataagagagccttcgtcgagacctggcagtccttttaccggaagaagcttaaggaggtgtggaaacctgccgtgcggtctggcggatctggcggaggctccgaggagccccccgtggtgttcgaggacgtggccgtgtacttcaccagggaggagtggggcaccctggtgaccaggcagaaggagctgtacagggacgtgatgaggctgaactacgagctgctggccagcctggagcccgccgccgccaagcccgacctgatcagcaagctggagaggagggccgccccctggatcagggaccccagcggccccaagtggggcaagggcaggccccccggcaagggcggcccaagcagcggcgcccctcctcccagcggcggcagcccagccggctccccaacctctaccgaggagggcacctctgagtccgccacccccgagagcggccctggcacctccaccgagcccagcgagggcagcgcacccggcagccctgccggcagccccacctccacagaggagggaaccagcaccgagcccagcgaaggcagcgccccaggcaccagcaccgagcctagtgagcaggagattaaacggatcaacaagatcagaagaagacttgtgaaagacagcaacaccaagaaggccggcaagacaggccccatgaaaaccctgctggttagagtgatgacacccgatctgagagagcggctggaaaacctgagaaagaagcctgaaaatatcccccagcccatcagcaatacatctagagccaacctgaataagctgctgaccgattacaccgaaatgaagaaggcgatcctgcatgtgtactgggaagagttccagaaggaccctgtgggcctgatgagccgggtggcccagcctgccagcaagaagatcgatcagaacaagctgaaacctgagatggacgagaagggcaacctgaccaccgccggctttgcctgctctcagtgtggccagcccctgttcgtgtacaagctggagcaggtgtctgagaagggcaaggcttacaccaactacttcggacggtgcaatgtggccgagcacgaaaagctgatcctgctggcccagctgaagcccgagaaggatagcgacgaagccgtgacatatagcctgggaaagtttgggcagagggccctggatttctacagcattcatgtgaccaaggagtccacccaccccgtgaagcccctggcccagatcgccggaaacagatacgcctccggacctgtgggaaaggccctgagcgacgcatgtatgggcacaatcgcctccttcctgtctaagtaccaggacatcatcatcgaacaccagaaggtggtgaagggcaaccagaagagactggagagcctgcgggagctggccggcaaggaaaacctggaataccctagcgtgaccctgccacctcagcctcacaccaaggagggcgttgatgcctacaacgaagtgatcgcccgggtgcgaatgtgggtgaacctgaacctgtggcagaagctgaagctaagcagagatgatgccaagcctctgctgagactgaagggattcccttcctttcctctggtcgagagacaggccaacgaagtggactggtgggacatggtgtgtaacgtgaagaagctgatcaacgagaaaaaggaggatggcaaggtgttttggcagaatctggctggctacaagagacaggaagccctgagaccatacctgagcagcgaggaagatcggaagaagggaaagaaattcgctcggtaccagctgggcgacctgctgctgcacctggaaaagaagcacggcgaggactggggaaaggtgtacgacgaggcctgggagcggattgacaagaaagtggaaggcctgagcaagcacatcaagctggaagaggaacggagaagcgaggacgcccagagcaaggccgccctgaccgactggctgcgggctaaggccagcttcgtgatcgagggcctgaaggaggccgacaaggacgagttctgcagatgcgagctgaagctgcagaagtggtacggggacctgcggggaaagcccttcgccatcgaagccgagaacagcatcctggacatcagcggcttcagcaagcagtacaactgtgccttcatctggcagaaggacggcgtgaagaagctgaacctgtacctgatcatcaactacttcaagggcggcaagctgcggttcaagaagatcaaacctgaagccttcgaagccaacagattctacaccgtgatcaacaaaaagagcggcgagatcgtgcccatggaggtgaacttcaacttcgacgaccccaacctgatcatcctgcctctggcctttggcaagagacagggcagagaattcatctggaacgacctgctgtccctggaaaccggcagcctgaagctggccaacggaagagtgatcgagaagacactgtacaacagaagaacccggcaggatgagcctgccctgttcgtggccctgaccttcgagcggcgggaggtcctggactcctccaatatcaaaccaatgaacctgatcggcgtggcaagaggcgaaaacatccccgccgtgatcgccctgaccgaccccgagggctgcccactgagccggtttaaggatagcctgggaaacccaacccacatcctgagaatcggcgagagctataaggagaagcagcggaccatccaggccaagaaggaggtggagcagcggagagccggcggctacagccggaagtacgccagcaaagccaagaatctggcagacgatatggtgagaaacaccgctagagatctgctgtactacgccgtgacccaggatgccatgctgatcttcgccaacctgagccggggcttcggccggcagggcaagcggaccttcatggccgagagacagtacacacggatggaggactggctgaccgccaagctggcctacgagggcctgagcaagacctacctgtccaagacactggcccagtacacctccaagacatgcagcaactgtgggtttaccatcaccagcgccgactacgacagggtgctggagaagctgaagaagacagcaacaggctggatgaccacaattaacggcaaggagctgaaggtggagggccagattacctactacaacagatacaagagacagaacgtagtcaaggacctgtccgtcgagctggatagactgagcgaagaatctgtgaacaacgacatctcctcctggacaaagggcagaagcggagaagctctgagcctcctgaagaaaagattctcccatagacccgtgcaggagaagttcgtgtgcctgaactgcggcttcgagacacacgcagccgagcaagccgccctgaacatcgccagatcctggctgttcctgcggagccaggagtacaagaaataccagacaaacaagacaaccggcaacaccgataagagagccttcgtcgagacctggcagtccttttaccggaagaagcttaaggaggtgtggaaacctgccgtgcggtctggcggatctggcggaggctcctgaggagccccccgtggtgttcgaggacgtggccgtgtacttcaccagggaggagtggggcaccctggtgaccaggcagaaggagctgtacagggacgtgatgaggctgaactacgagctgctggccagcctggagcccgccgccgccaagcccgacctgatcagcaagctggagaggagggccgccccctggatcagggaccccagcggccccaagtggggcaagggcaggccccccggcaagggatctggctccggcagcggccccaagaaaaagagaaaagtctaagctgccttctgcggggcttgccttctggccatgcccttcttctctcccttgcacctgtacctcttggtctttgaataaagcctgagtaggaaggctagcaaaaaaaaaaaaaaaaaaaaaaaaaaaaaaaaaaaaaaaaaaaaaaaaaaaaaaaaaaaaaaaaaaaaaaaaaaaaaaaa

SEQ ID NO: 15620 - RNA, 9485 nt, synthetic construct
  source 1..9485: mol_type = other RNA
aggaaataagagagaaaagaagagtaagaagaaatataagagccaccatggcccctaagaagaagcgtaaagtgagccggatggaacgcctcgtctacgaggtgcggcagaagtgcagaaacatcgaggacatctgcatctcctgcggatctctgaacgtgaccctggagcacccactgttcatcggcggcatgtgccagaactgtaaaaactgttttctggagtgtgcctatcaatacgacgatgacggctaccagagctactgcaccatctgttgcggcggaagagaggtgctgatgtgtggaaataacaactgctgccggtgcttctgcgtggaatgcgtggacctgctggtgggccccggcgccgcccaggccgctattaaggaagatccttggaactgctacatgtgcggccacaagggcacatacggcctgctgagacggagagaggactggcctagcagactgcagatgttcttcgccaataaccacgaccaggagttcgacccccctaaggtgtaccctcccgtccccgccgagaagagaaagcccatccgggtcctgagcctgttcgatggcatcgccaccggtctgctggtgctgaaggacctgggcatccaggtggataggtacattgcctccgaggtgtgcgaggactccatcaccgtgggaatggtgcgtcatcagggcaagatcatgtacgtgggcgacgtgcggagcgtgacacagaagcatatccaggagtggggccctttcgacctggtgatcggcggcagcccttgcaatgacctgagcatcgtgaacccagcccggaagggcctgtacgagggaaccggcagactgttcttcgagttttacagactgctgcacgacgcccggcctaaggaaggcgacgaccggcccttcttttggctgttcgagaatgtggtggccatgggagtcagcgacaagcgggatattagccggttcctggagagcaaccccgtgatgatcgatgccaaggaagtgagcgccgcccaccgggccagatacttctggggcaatctgcctggcatgaacagacccctggccagcaccgtgaacgacaagctggagctgcaggagtgcctggagcacggccggatcgccaagttcagcaaggtgagaaccatcaccacccgaagcaacagcatcaaacaaggcaaggaccagcactttcctgtgttcatgaacgagaaggaggacatcctgtggtgtaccgagatggagagagtgttcgggttcccagtccactacacagatgtcagcaacatgtctagactggccagacagagactgctgggaagaagctggtccgtccctgtgatcagacacctgttcgcccctctgaaggagtacttcgcctgcgtgagcagcggcaacagcaacgccaacagccggggccccagcttctctagcggcctggtgccactgtccctgagagggagccacatgggccccatggagatctacaaaaccgtgagcgcctggaagcggcagcctgtgcgcgtgctgagcctgtttcggaatatcgataaagtcctgaaaagcctgggattcctggagagcggctctggctccggcggtggcaccctgaagtacgtggaggatgtgacaaacgtggtcagacgggatgtggagaagtggggccccttcgatctggtgtacggcagcacccaacccctgggcagctcttgtgaccggtgccctggctggtacatgtttcagttccaccggatcctgcagtacgccctgccgagacaggagtcccagcggccattcttttggattttcatggacaacttgctgctgaccgaggatgaccaggaaactaccactcggttcctgcagaccgaagccgtgaccctgcaggacgtgagaggccgggactaccagaacgccatgcgggtgtggtccaacatccctggactgaaaagcaagcacgcacctctgacccctaaagaagaggagtacctgcaggcccaggtgcggagcagaagcaagctggacgcccctaaggtggatctgctggtgaagaattgcctcctgcccctgagagagtacttcaagtatttcagccagaatagtctgcccctgggaggcagcggcggcggcgccctggtgacatttgaggacgtcgccgtgcggttcacccaggaggaatgggctctgctggatccttctcagaaaatcctgtaccgggacgtgatgagagagacataccggaatctgacctccgtgggcatcaactgggaatgttgggaccttgaagcctgcttcagaagcctgggaagaaacctgagagtgcaggtggtgaagagaaagtgcgagctgaccaacagcggcccctgcgccgagggcggcccaagcagcggcgcccctcctcccagcggcggcagcccagccggctccccaacctctaccgaggagggcacctctgagtccgccacccccgagagcggccctggcacctccaccgagcccagcgagggcagcgcacccggcagccctgccggcagccccacctccacagaggagggaaccagcaccgagcccagcgaaggcagcgccccaggcaccagcaccgagcctagtgagcaggagattaaacggatcaacaagatcagaagaagacttgtgaaagacagcaacaccaagaaggccggcaagacaggccccatgaaaaccctgctggttagagtgatgacacccgatctgagagagcggctggaaaacctgagaaagaagcctgaaaatatcccccagcccatcagcaatacatctagagccaacctgaataagctgctgaccgattacaccgaaatgaagaaggcgatcctgcatgtgtactgggaagagttccagaaggaccctgtgggcctgatgagccgggtggcccagcctgccagcaagaagatcgatcagaacaagctgaaacctgagatggacgagaagggcaacctgaccaccgccggctttgcctgctctcagtgtggccagcccctgttcgtgtacaagctggagcaggtgtctgagaagggcaaggcttacaccaactacttcggacggtgcaatgtggccgagcacgaaaagctgatcctgctggcccagctgaagcccgagaaggatagcgacgaagccgtgacatatagcctgggaaagtttgggcagagggccctggatttctacagcattcatgtgaccaaggagtccacccaccccgtgaagcccctggcccagatcgccggaaacagatacgcctccggacctgtgggaaaggccctgagcgacgcatgtatgggcacaatcgcctccttcctgtctaagtaccaggacatcatcatcgaacaccagaaggtggtgaagggcaaccagaagagactggagagcctgcgggagctggccggcaaggaaaacctggaataccctagcgtgaccctgccacctcagcctcacaccaaggagggcgttgatgcctacaacgaagtgatcgcccgggtgcgaatgtgggtgaacctgaacctgtggcagaagctgaagctaagcagagatgatgccaagcctctgctgagactgaagggattcccttcctttcctctggtcgagagacaggccaacgaagtggactggtgggacatggtgtgtaacgtgaagaagctgatcaacgagaaaaaggaggatggcaaggtgttttggcagaatctggctggctacaagagacaggaagccctgagaccatacctgagcagcgaggaagatcggaagaagggaaagaaattcgctcggtaccagctgggcgacctgctgctgcacctggaaaagaagcacggcgaggactggggaaaggtgtacgacgaggcctgggagcggattgacaagaaagtggaaggcctgagcaagcacatcaagctggaagaggaacggagaagcgaggacgcccagagcaaggccgccctgaccgactggctgcgggctaaggccagcttcgtgatcgagggcctgaaggaggccgacaaggacgagttctgcagatgcgagctgaagctgcagaagtggtacggggacctgcggggaaagcccttcgccatcgaagccgagaacagcatcctggacatcagcggcttcagcaagcagtacaactgtgccttcatctggcagaaggacggcgtgaagaagctgaacctgtacctgatcatcaactacttcaagggcggcaagctgcggttcaagaagatcaaacctgaagccttcgaagccaacagattctacaccgtgatcaacaaaaagagcggcgagatcgtgcccatggaggtgaacttcaacttcgacgaccccaacctgatcatcctgcctctggcctttggcaagagacagggcagagaattcatctggaacgacctgctgtccctggaaaccggcagcctgaagctggccaacggaagagtgatcgagaagacactgtacaacagaagaacccggcaggatgagcctgccctgttcgtggccctgaccttcgagcggcgggaggtcctggactcctccaatatcaaaccaatgaacctgatcggcgtggcaagaggcgaaaacatccccgccgtgatcgccctgaccgaccccgagggctgcccactgagccggtttaaggatagcctgggaaacccaacccacatcctgagaatcggcgagagctataaggagaagcagcggaccatccaggccaagaaggaggtggagcagcggagagccggcggctacagccggaagtacgccagcaaagccaagaatctggcagacgatatggtgagaaacaccgctagagatctgctgtactacgccgtgacccaggatgccatgctgatcttcgccaacctgagccggggcttcggccggcagggcaagcggaccttcatggccgagagacagtacacacggatggaggactggctgaccgccaagctggcctacgagggcctgagcaagacctacctgtccaagacactggcccagtacacctccaagacatgcagcaactgtgggtttaccatcaccagcgccgactacgacagggtgctggagaagctgaagaagacagcaacaggctggatgaccacaattaacggcaaggagctgaaggtggagggccagattacctactacaacagatacaagagacagaacgtagtcaaggacctgtccgtcgagctggatagactgagcgaagaatctgtgaacaacgacatctcctcctggacaaagggcagaagcggagaagctctgagcctcctgaagaaaagattctcccatagacccgtgcaggagaagttcgtgtgcctgaactgcggcttcgagacacacgcagccgagcaagccgccctgaacatcgccagatcctggctgttcctgcggagccaggagtacaagaaataccagacaaacaagacaaccggcaacaccgataagagagccttcgtcgagacctggcagtccttttaccggaagaagcttaaggaggtgtggaaacctgccgtgcggtctggcggatctggcggaggctcccagggcagcgtgatgttcagcgacgtgagcatcatcttcagccaggaggagtgggagtacctggacagggagcagaggaacctgtacaggaacgtgatgatggagaactacagcaacctggtgagcctggccggctgcttcatcagcaagcccgacgtgatcaccctgctggagcagggcaaggacccctggaaggtggtgaggaagggcaggaagaggtacagcgacctggagaccagccacggcggcccaagcagcggcgcccctcctcccagcggcggcagcccagccggctccccaacctctaccgaggagggcacctctgagtccgccacccccgagagcggccctggcacctccaccgagcccagcgagggcagcgcacccggcagccctgccggcagccccacctccacagaggagggaaccagcaccgagcccagcgaaggcagcgccccaggcaccagcaccgagcctagtgagcaggagattaaacggatcaacaagatcagaagaagacttgtgaaagacagcaacaccaagaaggccggcaagacaggccccatgaaaaccctgctggttagagtgatgacacccgatctgagagagcggctggaaaacctgagaaagaagcctgaaaatatcccccagcccatcagcaatacatctagagccaacctgaataagctgctgaccgattacaccgaaatgaagaaggcgatcctgcatgtgtactgggaagagttccagaaggaccctgtgggcctgatgagccgggtggcccagcctgccagcaagaagatcgatcagaacaagctgaaacctgagatggacgagaagggcaacctgaccaccgccggctttgcctgctctcagtgtggccagcccctgttcgtgtacaagctggagcaggtgtctgagaagggcaaggcttacaccaactacttcggacggtgcaatgtggccgagcacgaaaagctgatcctgctggcccagctgaagcccgagaaggatagcgacgaagccgtgacatatagcctgggaaagtttgggcagagggccctggatttctacagcattcatgtgaccaaggagtccacccaccccgtgaagcccctggcccagatcgccggaaacagatacgcctccggacctgtgggaaaggccctgagcgacgcatgtatgggcacaatcgcctccttcctgtctaagtaccaggacatcatcatcgaacaccagaaggtggtgaagggcaaccagaagagactggagagcctgcgggagctggccggcaaggaaaacctggaataccctagcgtgaccctgccacctcagcctcacaccaaggagggcgttgatgcctacaacgaagtgatcgcccgggtgcgaatgtgggtgaacctgaacctgtggcagaagctgaagctaagcagagatgatgccaagcctctgctgagactgaagggattcccttcctttcctctggtcgagagacaggccaacgaagtggactggtgggacatggtgtgtaacgtgaagaagctgatcaacgagaaaaaggaggatggcaaggtgttttggcagaatctggctggctacaagagacaggaagccctgagaccatacctgagcagcgaggaagatcggaagaagggaaagaaattcgctcggtaccagctgggcgacctgctgctgcacctggaaaagaagcacggcgaggactggggaaaggtgtacgacgaggcctgggagcggattgacaagaaagtggaaggcctgagcaagcacatcaagctggaagaggaacggagaagcgaggacgcccagagcaaggccgccctgaccgactggctgcgggctaaggccagcttcgtgatcgagggcctgaaggaggccgacaaggacgagttctgcagatgcgagctgaagctgcagaagtggtacggggacctgcggggaaagcccttcgccatcgaagccgagaacagcatcctggacatcagcggcttcagcaagcagtacaactgtgccttcatctggcagaaggacggcgtgaagaagctgaacctgtacctgatcatcaactacttcaagggcggcaagctgcggttcaagaagatcaaacctgaagccttcgaagccaacagattctacaccgtgatcaacaaaaagagcggcgagatcgtgcccatggaggtgaacttcaacttcgacgaccccaacctgatcatcctgcctctggcctttggcaagagacagggcagagaattcatctggaacgacctgctgtccctggaaaccggcagcctgaagctggccaacggaagagtgatcgagaagacactgtacaacagaagaacccggcaggatgagcctgccctgttcgtggccctgaccttcgagcggcgggaggtcctggactcctccaatatcaaaccaatgaacctgatcggcgtggcaagaggcgaaaacatccccgccgtgatcgccctgaccgaccccgagggctgcccactgagccggtttaaggatagcctgggaaacccaacccacatcctgagaatcggcgagagctataaggagaagcagcggaccatccaggccaagaaggaggtggagcagcggagagccggcggctacagccggaagtacgccagcaaagccaagaatctggcagacgatatggtgagaaacaccgctagagatctgctgtactacgccgtgacccaggatgccatgctgatcttcgccaacctgagccggggcttcggccggcagggcaagcggaccttcatggccgagagacagtacacacggatggaggactggctgaccgccaagctggcctacgagggcctgagcaagacctacctgtccaagacactggcccagtacacctccaagacatgcagcaactgtgggtttaccatcaccagcgccgactacgacagggtgctggagaagctgaagaagacagcaacaggctggatgaccacaattaacggcaaggagctgaaggtggagggccagattacctactacaacagatacaagagacagaacgtagtcaaggacctgtccgtcgagctggatagactgagcgaagaatctgtgaacaacgacatctcctcctggacaaagggcagaagcggagaagctctgagcctcctgaagaaaagattctcccatagacccgtgcaggagaagttcgtgtgcctgaactgcggcttcgagacacacgcagccgagcaagccgccctgaacatcgccagatcctggctgttcctgcggagccaggagtacaagaaataccagacaaacaagacaaccggcaacaccgataagagagccttcgtcgagacctggcagtccttttaccggaagaagcttaaggaggtgtggaaacctgccgtgcggtctggcggatctggcggaggctcctcagggcagcgtgatgttcagcgacgtgagcatcatcttcagccaggaggagtgggagtacctggacagggagcagaggaacctgtacaggaacgtgatgatggagaactacagcaacctggtgagcctggccggctgcttcatcagcaagcccgacgtgatcaccctgctggagcagggcaaggacccctggaaggtggtgaggaagggcaggaagaggtacagcgacctggagaccagccacggatctggctccggcagcggccccaagaaaaagagaaaagtctaagctgccttctgcggggcttgccttctggccatgcccttcttctctcccttgcacctgtacctcttggtctttgaataaagcctgagtaggaaggctagcaaaaaaaaaaaaaaaaaaaaaaaaaaaaaaaaaaaaaaaaaaaaaaaaaaaaaaaaaaaaaaaaaaaaaaaaaaaaaaaa

SEQ ID NO: 15621 - RNA, 9485 nt, synthetic construct
  source 1..9485: mol_type = other RNA
aggaaataagagagaaaagaagagtaagaagaaatataagagccaccatggcccctaagaagaagcgtaaagtgagccggatggaacgcctcgtctacgaggtgcggcagaagtgcagaaacatcgaggacatctgcatctcctgcggatctctgaacgtgaccctggagcacccactgttcatcggcggcatgtgccagaactgtaaaaactgttttctggagtgtgcctatcaatacgacgatgacggctaccagagctactgcaccatctgttgcggcggaagagaggtgctgatgtgtggaaataacaactgctgccggtgcttctgcgtggaatgcgtggacctgctggtgggccccggcgccgcccaggccgctattaaggaagatccttggaactgctacatgtgcggccacaagggcacatacggcctgctgagacggagagaggactggcctagcagactgcagatgttcttcgccaataaccacgaccaggagttcgacccccctaaggtgtaccctcccgtccccgccgagaagagaaagcccatccgggtcctgagcctgttcgatggcatcgccaccggtctgctggtgctgaaggacctgggcatccaggtggataggtacattgcctccgaggtgtgcgaggactccatcaccgtgggaatggtgcgtcatcagggcaagatcatgtacgtgggcgacgtgcggagcgtgacacagaagcatatccaggagtggggccctttcgacctggtgatcggcggcagcccttgcaatgacctgagcatcgtgaacccagcccggaagggcctgtacgagggaaccggcagactgttcttcgagttttacagactgctgcacgacgcccggcctaaggaaggcgacgaccggcccttcttttggctgttcgagaatgtggtggccatgggagtcagcgacaagcgggatattagccggttcctggagagcaaccccgtgatgatcgatgccaaggaagtgagcgccgcccaccgggccagatacttctggggcaatctgcctggcatgaacagacccctggccagcaccgtgaacgacaagctggagctgcaggagtgcctggagcacggccggatcgccaagttcagcaaggtgagaaccatcaccacccgaagcaacagcatcaaacaaggcaaggaccagcactttcctgtgttcatgaacgagaaggaggacatcctgtggtgtaccgagatggagagagtgttcgggttcccagtccactacacagatgtcagcaacatgtctagactggccagacagagactgctgggaagaagctggtccgtccctgtgatcagacacctgttcgcccctctgaaggagtacttcgcctgcgtgagcagcggcaacagcaacgccaacagccggggccccagcttctctagcggcctggtgccactgtccctgagagggagccacatgggccccatggagatctacaaaaccgtgagcgcctggaagcggcagcctgtgcgcgtgctgagcctgtttcggaatatcgataaagtcctgaaaagcctgggattcctggagagcggctctggctccggcggtggcaccctgaagtacgtggaggatgtgacaaacgtggtcagacgggatgtggagaagtggggccccttcgatctggtgtacggcagcacccaacccctgggcagctcttgtgaccggtgccctggctggtacatgtttcagttccaccggatcctgcagtacgccctgccgagacaggagtcccagcggccattcttttggattttcatggacaacttgctgctgaccgaggatgaccaggaaactaccactcggttcctgcagaccgaagccgtgaccctgcaggacgtgagaggccgggactaccagaacgccatgcgggtgtggtccaacatccctggactgaaaagcaagcacgcacctctgacccctaaagaagaggagtacctgcaggcccaggtgcggagcagaagcaagctggacgcccctaaggtggatctgctggtgaagaattgcctcctgcccctgagagagtacttcaagtatttcagccagaatagtctgcccctgggaggcagcggcggcggcgccctggtgacatttgaggacgtcgccgtgcggttcacccaggaggaatgggctctgctggatccttctcagaaaatcctgtaccgggacgtgatgagagagacataccggaatctgacctccgtgggcatcaactgggaatgttgggaccttgaagcctgcttcagaagcctgggaagaaacctgagagtgcaggtggtgaagagaaagtgcgagctgaccaacagcggcccctgcgccgagggcggcccaagcagcggcgcccctcctcccagcggcggcagcccagccggctccccaacctctaccgaggagggcacctctgagtccgccacccccgagagcggccctggcacctccaccgagcccagcgagggcagcgcacccggcagccctgccggcagccccacctccacagaggagggaaccagcaccgagcccagcgaaggcagcgccccaggcaccagcaccgagcctagtgagcaggagattaaacggatcaacaagatcagaagaagacttgtgaaagacagcaacaccaagaaggccggcaagacaggccccatgaaaaccctgctggttagagtgatgacacccgatctgagagagcggctggaaaacctgagaaagaagcctgaaaatatcccccagcccatcagcaatacatctagagccaacctgaataagctgctgaccgattacaccgaaatgaagaaggcgatcctgcatgtgtactgggaagagttccagaaggaccctgtgggcctgatgagccgggtggcccagcctgccagcaagaagatcgatcagaacaagctgaaacctgagatggacgagaagggcaacctgaccaccgccggctttgcctgctctcagtgtggccagcccctgttcgtgtacaagctggagcaggtgtctgagaagggcaaggcttacaccaactacttcggacggtgcaatgtggccgagcacgaaaagctgatcctgctggcccagctgaagcccgagaaggatagcgacgaagccgtgacatatagcctgggaaagtttgggcagagggccctggatttctacagcattcatgtgaccaaggagtccacccaccccgtgaagcccctggcccagatcgccggaaacagatacgcctccggacctgtgggaaaggccctgagcgacgcatgtatgggcacaatcgcctccttcctgtctaagtaccaggacatcatcatcgaacaccagaaggtggtgaagggcaaccagaagagactggagagcctgcgggagctggccggcaaggaaaacctggaataccctagcgtgaccctgccacctcagcctcacaccaaggagggcgttgatgcctacaacgaagtgatcgcccgggtgcgaatgtgggtgaacctgaacctgtggcagaagctgaagctaagcagagatgatgccaagcctctgctgagactgaagggattcccttcctttcctctggtcgagagacaggccaacgaagtggactggtgggacatggtgtgtaacgtgaagaagctgatcaacgagaaaaaggaggatggcaaggtgttttggcagaatctggctggctacaagagacaggaagccctgagaccatacctgagcagcgaggaagatcggaagaagggaaagaaattcgctcggtaccagctgggcgacctgctgctgcacctggaaaagaagcacggcgaggactggggaaaggtgtacgacgaggcctgggagcggattgacaagaaagtggaaggcctgagcaagcacatcaagctggaagaggaacggagaagcgaggacgcccagagcaaggccgccctgaccgactggctgcgggctaaggccagcttcgtgatcgagggcctgaaggaggccgacaaggacgagttctgcagatgcgagctgaagctgcagaagtggtacggggacctgcggggaaagcccttcgccatcgaagccgagaacagcatcctggacatcagcggcttcagcaagcagtacaactgtgccttcatctggcagaaggacggcgtgaagaagctgaacctgtacctgatcatcaactacttcaagggcggcaagctgcggttcaagaagatcaaacctgaagccttcgaagccaacagattctacaccgtgatcaacaaaaagagcggcgagatcgtgcccatggaggtgaacttcaacttcgacgaccccaacctgatcatcctgcctctggcctttggcaagagacagggcagagaattcatctggaacgacctgctgtccctggaaaccggcagcctgaagctggccaacggaagagtgatcgagaagacactgtacaacagaagaacccggcaggatgagcctgccctgttcgtggccctgaccttcgagcggcgggaggtcctggactcctccaatatcaaaccaatgaacctgatcggcgtggcaagaggcgaaaacatccccgccgtgatcgccctgaccgaccccgagggctgcccactgagccggtttaaggatagcctgggaaacccaacccacatcctgagaatcggcgagagctataaggagaagcagcggaccatccaggccaagaaggaggtggagcagcggagagccggcggctacagccggaagtacgccagcaaagccaagaatctggcagacgatatggtgagaaacaccgctagagatctgctgtactacgccgtgacccaggatgccatgctgatcttcgccaacctgagccggggcttcggccggcagggcaagcggaccttcatggccgagagacagtacacacggatggaggactggctgaccgccaagctggcctacgagggcctgagcaagacctacctgtccaagacactggcccagtacacctccaagacatgcagcaactgtgggtttaccatcaccagcgccgactacgacagggtgctggagaagctgaagaagacagcaacaggctggatgaccacaattaacggcaaggagctgaaggtggagggccagattacctactacaacagatacaagagacagaacgtagtcaaggacctgtccgtcgagctggatagactgagcgaagaatctgtgaacaacgacatctcctcctggacaaagggcagaagcggagaagctctgagcctcctgaagaaaagattctcccatagacccgtgcaggagaagttcgtgtgcctgaactgcggcttcgagacacacgcagccgagcaagccgccctgaacatcgccagatcctggctgttcctgcggagccaggagtacaagaaataccagacaaacaagacaaccggcaacaccgataagagagccttcgtcgagacctggcagtccttttaccggaagaagcttaaggaggtgtggaaacctgccgtgcggtctggcggatctggcggaggctccacccagggcagcctgaccttcaaggacgtggccatcgagttcagccaggaggagtggaagtgcctggaccccgtgcagaaggccctgtacagggacgtgatgctggagaactacaggaacctgggcttcctgggcctgtgcctgcccgacctggacatcatcagcatgctggagcagggcaaggagccctggaccgtggtgagccaggtgaagatcaccaggaaccccaactgcggcgagtgcggcggcccaagcagcggcgcccctcctcccagcggcggcagcccagccggctccccaacctctaccgaggagggcacctctgagtccgccacccccgagagcggccctggcacctccaccgagcccagcgagggcagcgcacccggcagccctgccggcagccccacctccacagaggagggaaccagcaccgagcccagcgaaggcagcgccccaggcaccagcaccgagcctagtgagcaggagattaaacggatcaacaagatcagaagaagacttgtgaaagacagcaacaccaagaaggccggcaagacaggccccatgaaaaccctgctggttagagtgatgacacccgatctgagagagcggctggaaaacctgagaaagaagcctgaaaatatcccccagcccatcagcaatacatctagagccaacctgaataagctgctgaccgattacaccgaaatgaagaaggcgatcctgcatgtgtactgggaagagttccagaaggaccctgtgggcctgatgagccgggtggcccagcctgccagcaagaagatcgatcagaacaagctgaaacctgagatggacgagaagggcaacctgaccaccgccggctttgcctgctctcagtgtggccagcccctgttcgtgtacaagctggagcaggtgtctgagaagggcaaggcttacaccaactacttcggacggtgcaatgtggccgagcacgaaaagctgatcctgctggcccagctgaagcccgagaaggatagcgacgaagccgtgacatatagcctgggaaagtttgggcagagggccctggatttctacagcattcatgtgaccaaggagtccacccaccccgtgaagcccctggcccagatcgccggaaacagatacgcctccggacctgtgggaaaggccctgagcgacgcatgtatgggcacaatcgcctccttcctgtctaagtaccaggacatcatcatcgaacaccagaaggtggtgaagggcaaccagaagagactggagagcctgcgggagctggccggcaaggaaaacctggaataccctagcgtgaccctgccacctcagcctcacaccaaggagggcgttgatgcctacaacgaagtgatcgcccgggtgcgaatgtgggtgaacctgaacctgtggcagaagctgaagctaagcagagatgatgccaagcctctgctgagactgaagggattcccttcctttcctctggtcgagagacaggccaacgaagtggactggtgggacatggtgtgtaacgtgaagaagctgatcaacgagaaaaaggaggatggcaaggtgttttggcagaatctggctggctacaagagacaggaagccctgagaccatacctgagcagcgaggaagatcggaagaagggaaagaaattcgctcggtaccagctgggcgacctgctgctgcacctggaaaagaagcacggcgaggactggggaaaggtgtacgacgaggcctgggagcggattgacaagaaagtggaaggcctgagcaagcacatcaagctggaagaggaacggagaagcgaggacgcccagagcaaggccgccctgaccgactggctgcgggctaaggccagcttcgtgatcgagggcctgaaggaggccgacaaggacgagttctgcagatgcgagctgaagctgcagaagtggtacggggacctgcggggaaagcccttcgccatcgaagccgagaacagcatcctggacatcagcggcttcagcaagcagtacaactgtgccttcatctggcagaaggacggcgtgaagaagctgaacctgtacctgatcatcaactacttcaagggcggcaagctgcggttcaagaagatcaaacctgaagccttcgaagccaacagattctacaccgtgatcaacaaaaagagcggcgagatcgtgcccatggaggtgaacttcaacttcgacgaccccaacctgatcatcctgcctctggcctttggcaagagacagggcagagaattcatctggaacgacctgctgtccctggaaaccggcagcctgaagctggccaacggaagagtgatcgagaagacactgtacaacagaagaacccggcaggatgagcctgccctgttcgtggccctgaccttcgagcggcgggaggtcctggactcctccaatatcaaaccaatgaacctgatcggcgtggcaagaggcgaaaacatccccgccgtgatcgccctgaccgaccccgagggctgcccactgagccggtttaaggatagcctgggaaacccaacccacatcctgagaatcggcgagagctataaggagaagcagcggaccatccaggccaagaaggaggtggagcagcggagagccggcggctacagccggaagtacgccagcaaagccaagaatctggcagacgatatggtgagaaacaccgctagagatctgctgtactacgccgtgacccaggatgccatgctgatcttcgccaacctgagccggggcttcggccggcagggcaagcggaccttcatggccgagagacagtacacacggatggaggactggctgaccgccaagctggcctacgagggcctgagcaagacctacctgtccaagacactggcccagtacacctccaagacatgcagcaactgtgggtttaccatcaccagcgccgactacgacagggtgctggagaagctgaagaagacagcaacaggctggatgaccacaattaacggcaaggagctgaaggtggagggccagattacctactacaacagatacaagagacagaacgtagtcaaggacctgtccgtcgagctggatagactgagcgaagaatctgtgaacaacgacatctcctcctggacaaagggcagaagcggagaagctctgagcctcctgaagaaaagattctcccatagacccgtgcaggagaagttcgtgtgcctgaactgcggcttcgagacacacgcagccgagcaagccgccctgaacatcgccagatcctggctgttcctgcggagccaggagtacaagaaataccagacaaacaagacaaccggcaacaccgataagagagccttcgtcgagacctggcagtccttttaccggaagaagcttaaggaggtgtggaaacctgccgtgcggtctggcggatctggcggaggctcctacccagggcagcctgaccttcaaggacgtggccatcgagttcagccaggaggagtggaagtgcctggaccccgtgcagaaggccctgtacagggacgtgatgctggagaactacaggaacctgggcttcctgggcctgtgcctgcccgacctggacatcatcagcatgctggagcagggcaaggagccctggaccgtggtgagccaggtgaagatcaccaggaaccccaactgcggcgagtgcggatctggctccggcagcggccccaagaaaaagagaaaagtctaagctgccttctgcggggcttgccttctggccatgcccttcttctctcccttgcacctgtacctcttggtctttgaataaagcctgagtaggaaggctagcaaaaaaaaaaaaaaaaaaaaaaaaaaaaaaaaaaaaaaaaaaaaaaaaaaaaaaaaaaaaaaaaaaaaaaaaaaaaaaaa

SEQ ID NO: 15622 - RNA, 9485 nt, synthetic construct
  source 1..9485: mol_type = other RNA
aggaaataagagagaaaagaagagtaagaagaaatataagagccaccatggcccctaagaagaagcgtaaagtgagccggatggaacgcctcgtctacgaggtgcggcagaagtgcagaaacatcgaggacatctgcatctcctgcggatctctgaacgtgaccctggagcacccactgttcatcggcggcatgtgccagaactgtaaaaactgttttctggagtgtgcctatcaatacgacgatgacggctaccagagctactgcaccatctgttgcggcggaagagaggtgctgatgtgtggaaataacaactgctgccggtgcttctgcgtggaatgcgtggacctgctggtgggccccggcgccgcccaggccgctattaaggaagatccttggaactgctacatgtgcggccacaagggcacatacggcctgctgagacggagagaggactggcctagcagactgcagatgttcttcgccaataaccacgaccaggagttcgacccccctaaggtgtaccctcccgtccccgccgagaagagaaagcccatccgggtcctgagcctgttcgatggcatcgccaccggtctgctggtgctgaaggacctgggcatccaggtggataggtacattgcctccgaggtgtgcgaggactccatcaccgtgggaatggtgcgtcatcagggcaagatcatgtacgtgggcgacgtgcggagcgtgacacagaagcatatccaggagtggggccctttcgacctggtgatcggcggcagcccttgcaatgacctgagcatcgtgaacccagcccggaagggcctgtacgagggaaccggcagactgttcttcgagttttacagactgctgcacgacgcccggcctaaggaaggcgacgaccggcccttcttttggctgttcgagaatgtggtggccatgggagtcagcgacaagcgggatattagccggttcctggagagcaaccccgtgatgatcgatgccaaggaagtgagcgccgcccaccgggccagatacttctggggcaatctgcctggcatgaacagacccctggccagcaccgtgaacgacaagctggagctgcaggagtgcctggagcacggccggatcgccaagttcagcaaggtgagaaccatcaccacccgaagcaacagcatcaaacaaggcaaggaccagcactttcctgtgttcatgaacgagaaggaggacatcctgtggtgtaccgagatggagagagtgttcgggttcccagtccactacacagatgtcagcaacatgtctagactggccagacagagactgctgggaagaagctggtccgtccctgtgatcagacacctgttcgcccctctgaaggagtacttcgcctgcgtgagcagcggcaacagcaacgccaacagccggggccccagcttctctagcggcctggtgccactgtccctgagagggagccacatgggccccatggagatctacaaaaccgtgagcgcctggaagcggcagcctgtgcgcgtgctgagcctgtttcggaatatcgataaagtcctgaaaagcctgggattcctggagagcggctctggctccggcggtggcaccctgaagtacgtggaggatgtgacaaacgtggtcagacgggatgtggagaagtggggccccttcgatctggtgtacggcagcacccaacccctgggcagctcttgtgaccggtgccctggctggtacatgtttcagttccaccggatcctgcagtacgccctgccgagacaggagtcccagcggccattcttttggattttcatggacaacttgctgctgaccgaggatgaccaggaaactaccactcggttcctgcagaccgaagccgtgaccctgcaggacgtgagaggccgggactaccagaacgccatgcgggtgtggtccaacatccctggactgaaaagcaagcacgcacctctgacccctaaagaagaggagtacctgcaggcccaggtgcggagcagaagcaagctggacgcccctaaggtggatctgctggtgaagaattgcctcctgcccctgagagagtacttcaagtatttcagccagaatagtctgcccctgggaggcagcggcggcggcgccctggtgacatttgaggacgtcgccgtgcggttcacccaggaggaatgggctctgctggatccttctcagaaaatcctgtaccgggacgtgatgagagagacataccggaatctgacctccgtgggcatcaactgggaatgttgggaccttgaagcctgcttcagaagcctgggaagaaacctgagagtgcaggtggtgaagagaaagtgcgagctgaccaacagcggcccctgcgccgagggcggcccaagcagcggcgcccctcctcccagcggcggcagcccagccggctccccaacctctaccgaggagggcacctctgagtccgccacccccgagagcggccctggcacctccaccgagcccagcgagggcagcgcacccggcagccctgccggcagccccacctccacagaggagggaaccagcaccgagcccagcgaaggcagcgccccaggcaccagcaccgagcctagtgagcaggagattaaacggatcaacaagatcagaagaagacttgtgaaagacagcaacaccaagaaggccggcaagacaggccccatgaaaaccctgctggttagagtgatgacacccgatctgagagagcggctggaaaacctgagaaagaagcctgaaaatatcccccagcccatcagcaatacatctagagccaacctgaataagctgctgaccgattacaccgaaatgaagaaggcgatcctgcatgtgtactgggaagagttccagaaggaccctgtgggcctgatgagccgggtggcccagcctgccagcaagaagatcgatcagaacaagctgaaacctgagatggacgagaagggcaacctgaccaccgccggctttgcctgctctcagtgtggccagcccctgttcgtgtacaagctggagcaggtgtctgagaagggcaaggcttacaccaactacttcggacggtgcaatgtggccgagcacgaaaagctgatcctgctggcccagctgaagcccgagaaggatagcgacgaagccgtgacatatagcctgggaaagtttgggcagagggccctggatttctacagcattcatgtgaccaaggagtccacccaccccgtgaagcccctggcccagatcgccggaaacagatacgcctccggacctgtgggaaaggccctgagcgacgcatgtatgggcacaatcgcctccttcctgtctaagtaccaggacatcatcatcgaacaccagaaggtggtgaagggcaaccagaagagactggagagcctgcgggagctggccggcaaggaaaacctggaataccctagcgtgaccctgccacctcagcctcacaccaaggagggcgttgatgcctacaacgaagtgatcgcccgggtgcgaatgtgggtgaacctgaacctgtggcagaagctgaagctaagcagagatgatgccaagcctctgctgagactgaagggattcccttcctttcctctggtcgagagacaggccaacgaagtggactggtgggacatggtgtgtaacgtgaagaagctgatcaacgagaaaaaggaggatggcaaggtgttttggcagaatctggctggctacaagagacaggaagccctgagaccatacctgagcagcgaggaagatcggaagaagggaaagaaattcgctcggtaccagctgggcgacctgctgctgcacctggaaaagaagcacggcgaggactggggaaaggtgtacgacgaggcctgggagcggattgacaagaaagtggaaggcctgagcaagcacatcaagctggaagaggaacggagaagcgaggacgcccagagcaaggccgccctgaccgactggctgcgggctaaggccagcttcgtgatcgagggcctgaaggaggccgacaaggacgagttctgcagatgcgagctgaagctgcagaagtggtacggggacctgcggggaaagcccttcgccatcgaagccgagaacagcatcctggacatcagcggcttcagcaagcagtacaactgtgccttcatctggcagaaggacggcgtgaagaagctgaacctgtacctgatcatcaactacttcaagggcggcaagctgcggttcaagaagatcaaacctgaagccttcgaagccaacagattctacaccgtgatcaacaaaaagagcggcgagatcgtgcccatggaggtgaacttcaacttcgacgaccccaacctgatcatcctgcctctggcctttggcaagagacagggcagagaattcatctggaacgacctgctgtccctggaaaccggcagcctgaagctggccaacggaagagtgatcgagaagacactgtacaacagaagaacccggcaggatgagcctgccctgttcgtggccctgaccttcgagcggcgggaggtcctggactcctccaatatcaaaccaatgaacctgatcggcgtggcaagaggcgaaaacatccccgccgtgatcgccctgaccgaccccgagggctgcccactgagccggtttaaggatagcctgggaaacccaacccacatcctgagaatcggcgagagctataaggagaagcagcggaccatccaggccaagaaggaggtggagcagcggagagccggcggctacagccggaagtacgccagcaaagccaagaatctggcagacgatatggtgagaaacaccgctagagatctgctgtactacgccgtgacccaggatgccatgctgatcttcgccaacctgagccggggcttcggccggcagggcaagcggaccttcatggccgagagacagtacacacggatggaggactggctgaccgccaagctggcctacgagggcctgagcaagacctacctgtccaagacactggcccagtacacctccaagacatgcagcaactgtgggtttaccatcaccagcgccgactacgacagggtgctggagaagctgaagaagacagcaacaggctggatgaccacaattaacggcaaggagctgaaggtggagggccagattacctactacaacagatacaagagacagaacgtagtcaaggacctgtccgtcgagctggatagactgagcgaagaatctgtgaacaacgacatctcctcctggacaaagggcagaagcggagaagctctgagcctcctgaagaaaagattctcccatagacccgtgcaggagaagttcgtgtgcctgaactgcggcttcgagacacacgcagccgagcaagccgccctgaacatcgccagatcctggctgttcctgcggagccaggagtacaagaaataccagacaaacaagacaaccggcaacaccgataagagagccttcgtcgagacctggcagtccttttaccggaagaagcttaaggaggtgtggaaacctgccgtgcggtctggcggatctggcggaggctccttcaaggagctggtggtgttcagggacgtggccgtggagttctgcaaggaggagtgggagtgcctgggccccgagcagaggagcctgtacagggacgtgatgctggagaactacagcaacttcgtgagcctgggcctggccatcagcaagcccaccatcatcagcctgctggagcagggcaaggagccctggatcgtggagcaggccggctggtaccccgacctgctgagcgagaacgaggccggcggcccaagcagcggcgcccctcctcccagcggcggcagcccagccggctccccaacctctaccgaggagggcacctctgagtccgccacccccgagagcggccctggcacctccaccgagcccagcgagggcagcgcacccggcagccctgccggcagccccacctccacagaggagggaaccagcaccgagcccagcgaaggcagcgccccaggcaccagcaccgagcctagtgagcaggagattaaacggatcaacaagatcagaagaagacttgtgaaagacagcaacaccaagaaggccggcaagacaggccccatgaaaaccctgctggttagagtgatgacacccgatctgagagagcggctggaaaacctgagaaagaagcctgaaaatatcccccagcccatcagcaatacatctagagccaacctgaataagctgctgaccgattacaccgaaatgaagaaggcgatcctgcatgtgtactgggaagagttccagaaggaccctgtgggcctgatgagccgggtggcccagcctgccagcaagaagatcgatcagaacaagctgaaacctgagatggacgagaagggcaacctgaccaccgccggctttgcctgctctcagtgtggccagcccctgttcgtgtacaagctggagcaggtgtctgagaagggcaaggcttacaccaactacttcggacggtgcaatgtggccgagcacgaaaagctgatcctgctggcccagctgaagcccgagaaggatagcgacgaagccgtgacatatagcctgggaaagtttgggcagagggccctggatttctacagcattcatgtgaccaaggagtccacccaccccgtgaagcccctggcccagatcgccggaaacagatacgcctccggacctgtgggaaaggccctgagcgacgcatgtatgggcacaatcgcctccttcctgtctaagtaccaggacatcatcatcgaacaccagaaggtggtgaagggcaaccagaagagactggagagcctgcgggagctggccggcaaggaaaacctggaataccctagcgtgaccctgccacctcagcctcacaccaaggagggcgttgatgcctacaacgaagtgatcgcccgggtgcgaatgtgggtgaacctgaacctgtggcagaagctgaagctaagcagagatgatgccaagcctctgctgagactgaagggattcccttcctttcctctggtcgagagacaggccaacgaagtggactggtgggacatggtgtgtaacgtgaagaagctgatcaacgagaaaaaggaggatggcaaggtgttttggcagaatctggctggctacaagagacaggaagccctgagaccatacctgagcagcgaggaagatcggaagaagggaaagaaattcgctcggtaccagctgggcgacctgctgctgcacctggaaaagaagcacggcgaggactggggaaaggtgtacgacgaggcctgggagcggattgacaagaaagtggaaggcctgagcaagcacatcaagctggaagaggaacggagaagcgaggacgcccagagcaaggccgccctgaccgactggctgcgggctaaggccagcttcgtgatcgagggcctgaaggaggccgacaaggacgagttctgcagatgcgagctgaagctgcagaagtggtacggggacctgcggggaaagcccttcgccatcgaagccgagaacagcatcctggacatcagcggcttcagcaagcagtacaactgtgccttcatctggcagaaggacggcgtgaagaagctgaacctgtacctgatcatcaactacttcaagggcggcaagctgcggttcaagaagatcaaacctgaagccttcgaagccaacagattctacaccgtgatcaacaaaaagagcggcgagatcgtgcccatggaggtgaacttcaacttcgacgaccccaacctgatcatcctgcctctggcctttggcaagagacagggcagagaattcatctggaacgacctgctgtccctggaaaccggcagcctgaagctggccaacggaagagtgatcgagaagacactgtacaacagaagaacccggcaggatgagcctgccctgttcgtggccctgaccttcgagcggcgggaggtcctggactcctccaatatcaaaccaatgaacctgatcggcgtggcaagaggcgaaaacatccccgccgtgatcgccctgaccgaccccgagggctgcccactgagccggtttaaggatagcctgggaaacccaacccacatcctgagaatcggcgagagctataaggagaagcagcggaccatccaggccaagaaggaggtggagcagcggagagccggcggctacagccggaagtacgccagcaaagccaagaatctggcagacgatatggtgagaaacaccgctagagatctgctgtactacgccgtgacccaggatgccatgctgatcttcgccaacctgagccggggcttcggccggcagggcaagcggaccttcatggccgagagacagtacacacggatggaggactggctgaccgccaagctggcctacgagggcctgagcaagacctacctgtccaagacactggcccagtacacctccaagacatgcagcaactgtgggtttaccatcaccagcgccgactacgacagggtgctggagaagctgaagaagacagcaacaggctggatgaccacaattaacggcaaggagctgaaggtggagggccagattacctactacaacagatacaagagacagaacgtagtcaaggacctgtccgtcgagctggatagactgagcgaagaatctgtgaacaacgacatctcctcctggacaaagggcagaagcggagaagctctgagcctcctgaagaaaagattctcccatagacccgtgcaggagaagttcgtgtgcctgaactgcggcttcgagacacacgcagccgagcaagccgccctgaacatcgccagatcctggctgttcctgcggagccaggagtacaagaaataccagacaaacaagacaaccggcaacaccgataagagagccttcgtcgagacctggcagtccttttaccggaagaagcttaaggaggtgtggaaacctgccgtgcggtctggcggatctggcggaggctcctttcaaggagctggtggtgttcagggacgtggccgtggagttctgcaaggaggagtgggagtgcctgggccccgagcagaggagcctgtacagggacgtgatgctggagaactacagcaacttcgtgagcctgggcctggccatcagcaagcccaccatcatcagcctgctggagcagggcaaggagccctggatcgtggagcaggccggctggtaccccgacctgctgagcgagaacgaggccggatctggctccggcagcggccccaagaaaaagagaaaagtctaagctgccttctgcggggcttgccttctggccatgcccttcttctctcccttgcacctgtacctcttggtctttgaataaagcctgagtaggaaggctagcaaaaaaaaaaaaaaaaaaaaaaaaaaaaaaaaaaaaaaaaaaaaaaaaaaaaaaaaaaaaaaaaaaaaaaaaaaaaaaaa

SEQ ID NO: 15623 - RNA, 9485 nt, synthetic construct
  source 1..9485: mol_type = other RNA
aggaaataagagagaaaagaagagtaagaagaaatataagagccaccatggcccctaagaagaagcgtaaagtgagccggatggaacgcctcgtctacgaggtgcggcagaagtgcagaaacatcgaggacatctgcatctcctgcggatctctgaacgtgaccctggagcacccactgttcatcggcggcatgtgccagaactgtaaaaactgttttctggagtgtgcctatcaatacgacgatgacggctaccagagctactgcaccatctgttgcggcggaagagaggtgctgatgtgtggaaataacaactgctgccggtgcttctgcgtggaatgcgtggacctgctggtgggccccggcgccgcccaggccgctattaaggaagatccttggaactgctacatgtgcggccacaagggcacatacggcctgctgagacggagagaggactggcctagcagactgcagatgttcttcgccaataaccacgaccaggagttcgacccccctaaggtgtaccctcccgtccccgccgagaagagaaagcccatccgggtcctgagcctgttcgatggcatcgccaccggtctgctggtgctgaaggacctgggcatccaggtggataggtacattgcctccgaggtgtgcgaggactccatcaccgtgggaatggtgcgtcatcagggcaagatcatgtacgtgggcgacgtgcggagcgtgacacagaagcatatccaggagtggggccctttcgacctggtgatcggcggcagcccttgcaatgacctgagcatcgtgaacccagcccggaagggcctgtacgagggaaccggcagactgttcttcgagttttacagactgctgcacgacgcccggcctaaggaaggcgacgaccggcccttcttttggctgttcgagaatgtggtggccatgggagtcagcgacaagcgggatattagccggttcctggagagcaaccccgtgatgatcgatgccaaggaagtgagcgccgcccaccgggccagatacttctggggcaatctgcctggcatgaacagacccctggccagcaccgtgaacgacaagctggagctgcaggagtgcctggagcacggccggatcgccaagttcagcaaggtgagaaccatcaccacccgaagcaacagcatcaaacaaggcaaggaccagcactttcctgtgttcatgaacgagaaggaggacatcctgtggtgtaccgagatggagagagtgttcgggttcccagtccactacacagatgtcagcaacatgtctagactggccagacagagactgctgggaagaagctggtccgtccctgtgatcagacacctgttcgcccctctgaaggagtacttcgcctgcgtgagcagcggcaacagcaacgccaacagccggggccccagcttctctagcggcctggtgccactgtccctgagagggagccacatgggccccatggagatctacaaaaccgtgagcgcctggaagcggcagcctgtgcgcgtgctgagcctgtttcggaatatcgataaagtcctgaaaagcctgggattcctggagagcggctctggctccggcggtggcaccctgaagtacgtggaggatgtgacaaacgtggtcagacgggatgtggagaagtggggccccttcgatctggtgtacggcagcacccaacccctgggcagctcttgtgaccggtgccctggctggtacatgtttcagttccaccggatcctgcagtacgccctgccgagacaggagtcccagcggccattcttttggattttcatggacaacttgctgctgaccgaggatgaccaggaaactaccactcggttcctgcagaccgaagccgtgaccctgcaggacgtgagaggccgggactaccagaacgccatgcgggtgtggtccaacatccctggactgaaaagcaagcacgcacctctgacccctaaagaagaggagtacctgcaggcccaggtgcggagcagaagcaagctggacgcccctaaggtggatctgctggtgaagaattgcctcctgcccctgagagagtacttcaagtatttcagccagaatagtctgcccctgggaggcagcggcggcggcgccctggtgacatttgaggacgtcgccgtgcggttcacccaggaggaatgggctctgctggatccttctcagaaaatcctgtaccgggacgtgatgagagagacataccggaatctgacctccgtgggcatcaactgggaatgttgggaccttgaagcctgcttcagaagcctgggaagaaacctgagagtgcaggtggtgaagagaaagtgcgagctgaccaacagcggcccctgcgccgagggcggcccaagcagcggcgcccctcctcccagcggcggcagcccagccggctccccaacctctaccgaggagggcacctctgagtccgccacccccgagagcggccctggcacctccaccgagcccagcgagggcagcgcacccggcagccctgccggcagccccacctccacagaggagggaaccagcaccgagcccagcgaaggcagcgccccaggcaccagcaccgagcctagtgagcaggagattaaacggatcaacaagatcagaagaagacttgtgaaagacagcaacaccaagaaggccggcaagacaggccccatgaaaaccctgctggttagagtgatgacacccgatctgagagagcggctggaaaacctgagaaagaagcctgaaaatatcccccagcccatcagcaatacatctagagccaacctgaataagctgctgaccgattacaccgaaatgaagaaggcgatcctgcatgtgtactgggaagagttccagaaggaccctgtgggcctgatgagccgggtggcccagcctgccagcaagaagatcgatcagaacaagctgaaacctgagatggacgagaagggcaacctgaccaccgccggctttgcctgctctcagtgtggccagcccctgttcgtgtacaagctggagcaggtgtctgagaagggcaaggcttacaccaactacttcggacggtgcaatgtggccgagcacgaaaagctgatcctgctggcccagctgaagcccgagaaggatagcgacgaagccgtgacatatagcctgggaaagtttgggcagagggccctggatttctacagcattcatgtgaccaaggagtccacccaccccgtgaagcccctggcccagatcgccggaaacagatacgcctccggacctgtgggaaaggccctgagcgacgcatgtatgggcacaatcgcctccttcctgtctaagtaccaggacatcatcatcgaacaccagaaggtggtgaagggcaaccagaagagactggagagcctgcgggagctggccggcaaggaaaacctggaataccctagcgtgaccctgccacctcagcctcacaccaaggagggcgttgatgcctacaacgaagtgatcgcccgggtgcgaatgtgggtgaacctgaacctgtggcagaagctgaagctaagcagagatgatgccaagcctctgctgagactgaagggattcccttcctttcctctggtcgagagacaggccaacgaagtggactggtgggacatggtgtgtaacgtgaagaagctgatcaacgagaaaaaggaggatggcaaggtgttttggcagaatctggctggctacaagagacaggaagccctgagaccatacctgagcagcgaggaagatcggaagaagggaaagaaattcgctcggtaccagctgggcgacctgctgctgcacctggaaaagaagcacggcgaggactggggaaaggtgtacgacgaggcctgggagcggattgacaagaaagtggaaggcctgagcaagcacatcaagctggaagaggaacggagaagcgaggacgcccagagcaaggccgccctgaccgactggctgcgggctaaggccagcttcgtgatcgagggcctgaaggaggccgacaaggacgagttctgcagatgcgagctgaagctgcagaagtggtacggggacctgcggggaaagcccttcgccatcgaagccgagaacagcatcctggacatcagcggcttcagcaagcagtacaactgtgccttcatctggcagaaggacggcgtgaagaagctgaacctgtacctgatcatcaactacttcaagggcggcaagctgcggttcaagaagatcaaacctgaagccttcgaagccaacagattctacaccgtgatcaacaaaaagagcggcgagatcgtgcccatggaggtgaacttcaacttcgacgaccccaacctgatcatcctgcctctggcctttggcaagagacagggcagagaattcatctggaacgacctgctgtccctggaaaccggcagcctgaagctggccaacggaagagtgatcgagaagacactgtacaacagaagaacccggcaggatgagcctgccctgttcgtggccctgaccttcgagcggcgggaggtcctggactcctccaatatcaaaccaatgaacctgatcggcgtggcaagaggcgaaaacatccccgccgtgatcgccctgaccgaccccgagggctgcccactgagccggtttaaggatagcctgggaaacccaacccacatcctgagaatcggcgagagctataaggagaagcagcggaccatccaggccaagaaggaggtggagcagcggagagccggcggctacagccggaagtacgccagcaaagccaagaatctggcagacgatatggtgagaaacaccgctagagatctgctgtactacgccgtgacccaggatgccatgctgatcttcgccaacctgagccggggcttcggccggcagggcaagcggaccttcatggccgagagacagtacacacggatggaggactggctgaccgccaagctggcctacgagggcctgagcaagacctacctgtccaagacactggcccagtacacctccaagacatgcagcaactgtgggtttaccatcaccagcgccgactacgacagggtgctggagaagctgaagaagacagcaacaggctggatgaccacaattaacggcaaggagctgaaggtggagggccagattacctactacaacagatacaagagacagaacgtagtcaaggacctgtccgtcgagctggatagactgagcgaagaatctgtgaacaacgacatctcctcctggacaaagggcagaagcggagaagctctgagcctcctgaagaaaagattctcccatagacccgtgcaggagaagttcgtgtgcctgaactgcggcttcgagacacacgcagccgagcaagccgccctgaacatcgccagatcctggctgttcctgcggagccaggagtacaagaaataccagacaaacaagacaaccggcaacaccgataagagagccttcgtcgagacctggcagtccttttaccggaagaagcttaaggaggtgtggaaacctgccgtgcggtctggcggatctggcggaggctcccccctggagaccgtgaccttcggcgacgtggtgctggacttcacccaggaggagtgggccctgctggacaccagccagaagaagctgttcagggacgtgatgctggagaacatccaccacctggtgagcgtgggctaccagatcagcaagagcgacgtgatcctgcagctggagcagggcaaggagctgtggagggagggcgagggcaggccccagggcaggggccccggcagcgagagccccggcggcccaagcagcggcgcccctcctcccagcggcggcagcccagccggctccccaacctctaccgaggagggcacctctgagtccgccacccccgagagcggccctggcacctccaccgagcccagcgagggcagcgcacccggcagccctgccggcagccccacctccacagaggagggaaccagcaccgagcccagcgaaggcagcgccccaggcaccagcaccgagcctagtgagcaggagattaaacggatcaacaagatcagaagaagacttgtgaaagacagcaacaccaagaaggccggcaagacaggccccatgaaaaccctgctggttagagtgatgacacccgatctgagagagcggctggaaaacctgagaaagaagcctgaaaatatcccccagcccatcagcaatacatctagagccaacctgaataagctgctgaccgattacaccgaaatgaagaaggcgatcctgcatgtgtactgggaagagttccagaaggaccctgtgggcctgatgagccgggtggcccagcctgccagcaagaagatcgatcagaacaagctgaaacctgagatggacgagaagggcaacctgaccaccgccggctttgcctgctctcagtgtggccagcccctgttcgtgtacaagctggagcaggtgtctgagaagggcaaggcttacaccaactacttcggacggtgcaatgtggccgagcacgaaaagctgatcctgctggcccagctgaagcccgagaaggatagcgacgaagccgtgacatatagcctgggaaagtttgggcagagggccctggatttctacagcattcatgtgaccaaggagtccacccaccccgtgaagcccctggcccagatcgccggaaacagatacgcctccggacctgtgggaaaggccctgagcgacgcatgtatgggcacaatcgcctccttcctgtctaagtaccaggacatcatcatcgaacaccagaaggtggtgaagggcaaccagaagagactggagagcctgcgggagctggccggcaaggaaaacctggaataccctagcgtgaccctgccacctcagcctcacaccaaggagggcgttgatgcctacaacgaagtgatcgcccgggtgcgaatgtgggtgaacctgaacctgtggcagaagctgaagctaagcagagatgatgccaagcctctgctgagactgaagggattcccttcctttcctctggtcgagagacaggccaacgaagtggactggtgggacatggtgtgtaacgtgaagaagctgatcaacgagaaaaaggaggatggcaaggtgttttggcagaatctggctggctacaagagacaggaagccctgagaccatacctgagcagcgaggaagatcggaagaagggaaagaaattcgctcggtaccagctgggcgacctgctgctgcacctggaaaagaagcacggcgaggactggggaaaggtgtacgacgaggcctgggagcggattgacaagaaagtggaaggcctgagcaagcacatcaagctggaagaggaacggagaagcgaggacgcccagagcaaggccgccctgaccgactggctgcgggctaaggccagcttcgtgatcgagggcctgaaggaggccgacaaggacgagttctgcagatgcgagctgaagctgcagaagtggtacggggacctgcggggaaagcccttcgccatcgaagccgagaacagcatcctggacatcagcggcttcagcaagcagtacaactgtgccttcatctggcagaaggacggcgtgaagaagctgaacctgtacctgatcatcaactacttcaagggcggcaagctgcggttcaagaagatcaaacctgaagccttcgaagccaacagattctacaccgtgatcaacaaaaagagcggcgagatcgtgcccatggaggtgaacttcaacttcgacgaccccaacctgatcatcctgcctctggcctttggcaagagacagggcagagaattcatctggaacgacctgctgtccctggaaaccggcagcctgaagctggccaacggaagagtgatcgagaagacactgtacaacagaagaacccggcaggatgagcctgccctgttcgtggccctgaccttcgagcggcgggaggtcctggactcctccaatatcaaaccaatgaacctgatcggcgtggcaagaggcgaaaacatccccgccgtgatcgccctgaccgaccccgagggctgcccactgagccggtttaaggatagcctgggaaacccaacccacatcctgagaatcggcgagagctataaggagaagcagcggaccatccaggccaagaaggaggtggagcagcggagagccggcggctacagccggaagtacgccagcaaagccaagaatctggcagacgatatggtgagaaacaccgctagagatctgctgtactacgccgtgacccaggatgccatgctgatcttcgccaacctgagccggggcttcggccggcagggcaagcggaccttcatggccgagagacagtacacacggatggaggactggctgaccgccaagctggcctacgagggcctgagcaagacctacctgtccaagacactggcccagtacacctccaagacatgcagcaactgtgggtttaccatcaccagcgccgactacgacagggtgctggagaagctgaagaagacagcaacaggctggatgaccacaattaacggcaaggagctgaaggtggagggccagattacctactacaacagatacaagagacagaacgtagtcaaggacctgtccgtcgagctggatagactgagcgaagaatctgtgaacaacgacatctcctcctggacaaagggcagaagcggagaagctctgagcctcctgaagaaaagattctcccatagacccgtgcaggagaagttcgtgtgcctgaactgcggcttcgagacacacgcagccgagcaagccgccctgaacatcgccagatcctggctgttcctgcggagccaggagtacaagaaataccagacaaacaagacaaccggcaacaccgataagagagccttcgtcgagacctggcagtccttttaccggaagaagcttaaggaggtgtggaaacctgccgtgcggtctggcggatctggcggaggctcctcccctggagaccgtgaccttcggcgacgtggtgctggacttcacccaggaggagtgggccctgctggacaccagccagaagaagctgttcagggacgtgatgctggagaacatccaccacctggtgagcgtgggctaccagatcagcaagagcgacgtgatcctgcagctggagcagggcaaggagctgtggagggagggcgagggcaggccccagggcaggggccccggcagcgagagccccggatctggctccggcagcggccccaagaaaaagagaaaagtctaagctgccttctgcggggcttgccttctggccatgcccttcttctctcccttgcacctgtacctcttggtctttgaataaagcctgagtaggaaggctagcaaaaaaaaaaaaaaaaaaaaaaaaaaaaaaaaaaaaaaaaaaaaaaaaaaaaaaaaaaaaaaaaaaaaaaaaaaaaaaaa

SEQ ID NO: 15624 - RNA, 9485 nt, synthetic construct
  source 1..9485: mol_type = other RNA
aggaaataagagagaaaagaagagtaagaagaaatataagagccaccatggcccctaagaagaagcgtaaagtgagccggatggaacgcctcgtctacgaggtgcggcagaagtgcagaaacatcgaggacatctgcatctcctgcggatctctgaacgtgaccctggagcacccactgttcatcggcggcatgtgccagaactgtaaaaactgttttctggagtgtgcctatcaatacgacgatgacggctaccagagctactgcaccatctgttgcggcggaagagaggtgctgatgtgtggaaataacaactgctgccggtgcttctgcgtggaatgcgtggacctgctggtgggccccggcgccgcccaggccgctattaaggaagatccttggaactgctacatgtgcggccacaagggcacatacggcctgctgagacggagagaggactggcctagcagactgcagatgttcttcgccaataaccacgaccaggagttcgacccccctaaggtgtaccctcccgtccccgccgagaagagaaagcccatccgggtcctgagcctgttcgatggcatcgccaccggtctgctggtgctgaaggacctgggcatccaggtggataggtacattgcctccgaggtgtgcgaggactccatcaccgtgggaatggtgcgtcatcagggcaagatcatgtacgtgggcgacgtgcggagcgtgacacagaagcatatccaggagtggggccctttcgacctggtgatcggcggcagcccttgcaatgacctgagcatcgtgaacccagcccggaagggcctgtacgagggaaccggcagactgttcttcgagttttacagactgctgcacgacgcccggcctaaggaaggcgacgaccggcccttcttttggctgttcgagaatgtggtggccatgggagtcagcgacaagcgggatattagccggttcctggagagcaaccccgtgatgatcgatgccaaggaagtgagcgccgcccaccgggccagatacttctggggcaatctgcctggcatgaacagacccctggccagcaccgtgaacgacaagctggagctgcaggagtgcctggagcacggccggatcgccaagttcagcaaggtgagaaccatcaccacccgaagcaacagcatcaaacaaggcaaggaccagcactttcctgtgttcatgaacgagaaggaggacatcctgtggtgtaccgagatggagagagtgttcgggttcccagtccactacacagatgtcagcaacatgtctagactggccagacagagactgctgggaagaagctggtccgtccctgtgatcagacacctgttcgcccctctgaaggagtacttcgcctgcgtgagcagcggcaacagcaacgccaacagccggggccccagcttctctagcggcctggtgccactgtccctgagagggagccacatgggccccatggagatctacaaaaccgtgagcgcctggaagcggcagcctgtgcgcgtgctgagcctgtttcggaatatcgataaagtcctgaaaagcctgggattcctggagagcggctctggctccggcggtggcaccctgaagtacgtggaggatgtgacaaacgtggtcagacgggatgtggagaagtggggccccttcgatctggtgtacggcagcacccaacccctgggcagctcttgtgaccggtgccctggctggtacatgtttcagttccaccggatcctgcagtacgccctgccgagacaggagtcccagcggccattcttttggattttcatggacaacttgctgctgaccgaggatgaccaggaaactaccactcggttcctgcagaccgaagccgtgaccctgcaggacgtgagaggccgggactaccagaacgccatgcgggtgtggtccaacatccctggactgaaaagcaagcacgcacctctgacccctaaagaagaggagtacctgcaggcccaggtgcggagcagaagcaagctggacgcccctaaggtggatctgctggtgaagaattgcctcctgcccctgagagagtacttcaagtatttcagccagaatagtctgcccctgggaggcagcggcggcggcgccctggtgacatttgaggacgtcgccgtgcggttcacccaggaggaatgggctctgctggatccttctcagaaaatcctgtaccgggacgtgatgagagagacataccggaatctgacctccgtgggcatcaactgggaatgttgggaccttgaagcctgcttcagaagcctgggaagaaacctgagagtgcaggtggtgaagagaaagtgcgagctgaccaacagcggcccctgcgccgagggcggcccaagcagcggcgcccctcctcccagcggcggcagcccagccggctccccaacctctaccgaggagggcacctctgagtccgccacccccgagagcggccctggcacctccaccgagcccagcgagggcagcgcacccggcagccctgccggcagccccacctccacagaggagggaaccagcaccgagcccagcgaaggcagcgccccaggcaccagcaccgagcctagtgagcaggagattaaacggatcaacaagatcagaagaagacttgtgaaagacagcaacaccaagaaggccggcaagacaggccccatgaaaaccctgctggttagagtgatgacacccgatctgagagagcggctggaaaacctgagaaagaagcctgaaaatatcccccagcccatcagcaatacatctagagccaacctgaataagctgctgaccgattacaccgaaatgaagaaggcgatcctgcatgtgtactgggaagagttccagaaggaccctgtgggcctgatgagccgggtggcccagcctgccagcaagaagatcgatcagaacaagctgaaacctgagatggacgagaagggcaacctgaccaccgccggctttgcctgctctcagtgtggccagcccctgttcgtgtacaagctggagcaggtgtctgagaagggcaaggcttacaccaactacttcggacggtgcaatgtggccgagcacgaaaagctgatcctgctggcccagctgaagcccgagaaggatagcgacgaagccgtgacatatagcctgggaaagtttgggcagagggccctggatttctacagcattcatgtgaccaaggagtccacccaccccgtgaagcccctggcccagatcgccggaaacagatacgcctccggacctgtgggaaaggccctgagcgacgcatgtatgggcacaatcgcctccttcctgtctaagtaccaggacatcatcatcgaacaccagaaggtggtgaagggcaaccagaagagactggagagcctgcgggagctggccggcaaggaaaacctggaataccctagcgtgaccctgccacctcagcctcacaccaaggagggcgttgatgcctacaacgaagtgatcgcccgggtgcgaatgtgggtgaacctgaacctgtggcagaagctgaagctaagcagagatgatgccaagcctctgctgagactgaagggattcccttcctttcctctggtcgagagacaggccaacgaagtggactggtgggacatggtgtgtaacgtgaagaagctgatcaacgagaaaaaggaggatggcaaggtgttttggcagaatctggctggctacaagagacaggaagccctgagaccatacctgagcagcgaggaagatcggaagaagggaaagaaattcgctcggtaccagctgggcgacctgctgctgcacctggaaaagaagcacggcgaggactggggaaaggtgtacgacgaggcctgggagcggattgacaagaaagtggaaggcctgagcaagcacatcaagctggaagaggaacggagaagcgaggacgcccagagcaaggccgccctgaccgactggctgcgggctaaggccagcttcgtgatcgagggcctgaaggaggccgacaaggacgagttctgcagatgcgagctgaagctgcagaagtggtacggggacctgcggggaaagcccttcgccatcgaagccgagaacagcatcctggacatcagcggcttcagcaagcagtacaactgtgccttcatctggcagaaggacggcgtgaagaagctgaacctgtacctgatcatcaactacttcaagggcggcaagctgcggttcaagaagatcaaacctgaagccttcgaagccaacagattctacaccgtgatcaacaaaaagagcggcgagatcgtgcccatggaggtgaacttcaacttcgacgaccccaacctgatcatcctgcctctggcctttggcaagagacagggcagagaattcatctggaacgacctgctgtccctggaaaccggcagcctgaagctggccaacggaagagtgatcgagaagacactgtacaacagaagaacccggcaggatgagcctgccctgttcgtggccctgaccttcgagcggcgggaggtcctggactcctccaatatcaaaccaatgaacctgatcggcgtggcaagaggcgaaaacatccccgccgtgatcgccctgaccgaccccgagggctgcccactgagccggtttaaggatagcctgggaaacccaacccacatcctgagaatcggcgagagctataaggagaagcagcggaccatccaggccaagaaggaggtggagcagcggagagccggcggctacagccggaagtacgccagcaaagccaagaatctggcagacgatatggtgagaaacaccgctagagatctgctgtactacgccgtgacccaggatgccatgctgatcttcgccaacctgagccggggcttcggccggcagggcaagcggaccttcatggccgagagacagtacacacggatggaggactggctgaccgccaagctggcctacgagggcctgagcaagacctacctgtccaagacactggcccagtacacctccaagacatgcagcaactgtgggtttaccatcaccagcgccgactacgacagggtgctggagaagctgaagaagacagcaacaggctggatgaccacaattaacggcaaggagctgaaggtggagggccagattacctactacaacagatacaagagacagaacgtagtcaaggacctgtccgtcgagctggatagactgagcgaagaatctgtgaacaacgacatctcctcctggacaaagggcagaagcggagaagctctgagcctcctgaagaaaagattctcccatagacccgtgcaggagaagttcgtgtgcctgaactgcggcttcgagacacacgcagccgagcaagccgccctgaacatcgccagatcctggctgttcctgcggagccaggagtacaagaaataccagacaaacaagacaaccggcaacaccgataagagagccttcgtcgagacctggcagtccttttaccggaagaagcttaaggaggtgtggaaacctgccgtgcggtctggcggatctggcggaggctccagccagggcctgctgaccttcaaggacgtggccatcgagttcagccccgaggagtgggagtacctggaccccccccagaggatgctgtacaggaccgtgatgctggagaaccacaggaacctggtgttcctgggcctggccgtgagcaagcccgacctgatcatgtgcctggagcagaggagggagccctggaacgtgaagagccacagcaagctggccaagagccccgccgtgaccagccacggcggcccaagcagcggcgcccctcctcccagcggcggcagcccagccggctccccaacctctaccgaggagggcacctctgagtccgccacccccgagagcggccctggcacctccaccgagcccagcgagggcagcgcacccggcagccctgccggcagccccacctccacagaggagggaaccagcaccgagcccagcgaaggcagcgccccaggcaccagcaccgagcctagtgagcaggagattaaacggatcaacaagatcagaagaagacttgtgaaagacagcaacaccaagaaggccggcaagacaggccccatgaaaaccctgctggttagagtgatgacacccgatctgagagagcggctggaaaacctgagaaagaagcctgaaaatatcccccagcccatcagcaatacatctagagccaacctgaataagctgctgaccgattacaccgaaatgaagaaggcgatcctgcatgtgtactgggaagagttccagaaggaccctgtgggcctgatgagccgggtggcccagcctgccagcaagaagatcgatcagaacaagctgaaacctgagatggacgagaagggcaacctgaccaccgccggctttgcctgctctcagtgtggccagcccctgttcgtgtacaagctggagcaggtgtctgagaagggcaaggcttacaccaactacttcggacggtgcaatgtggccgagcacgaaaagctgatcctgctggcccagctgaagcccgagaaggatagcgacgaagccgtgacatatagcctgggaaagtttgggcagagggccctggatttctacagcattcatgtgaccaaggagtccacccaccccgtgaagcccctggcccagatcgccggaaacagatacgcctccggacctgtgggaaaggccctgagcgacgcatgtatgggcacaatcgcctccttcctgtctaagtaccaggacatcatcatcgaacaccagaaggtggtgaagggcaaccagaagagactggagagcctgcgggagctggccggcaaggaaaacctggaataccctagcgtgaccctgccacctcagcctcacaccaaggagggcgttgatgcctacaacgaagtgatcgcccgggtgcgaatgtgggtgaacctgaacctgtggcagaagctgaagctaagcagagatgatgccaagcctctgctgagactgaagggattcccttcctttcctctggtcgagagacaggccaacgaagtggactggtgggacatggtgtgtaacgtgaagaagctgatcaacgagaaaaaggaggatggcaaggtgttttggcagaatctggctggctacaagagacaggaagccctgagaccatacctgagcagcgaggaagatcggaagaagggaaagaaattcgctcggtaccagctgggcgacctgctgctgcacctggaaaagaagcacggcgaggactggggaaaggtgtacgacgaggcctgggagcggattgacaagaaagtggaaggcctgagcaagcacatcaagctggaagaggaacggagaagcgaggacgcccagagcaaggccgccctgaccgactggctgcgggctaaggccagcttcgtgatcgagggcctgaaggaggccgacaaggacgagttctgcagatgcgagctgaagctgcagaagtggtacggggacctgcggggaaagcccttcgccatcgaagccgagaacagcatcctggacatcagcggcttcagcaagcagtacaactgtgccttcatctggcagaaggacggcgtgaagaagctgaacctgtacctgatcatcaactacttcaagggcggcaagctgcggttcaagaagatcaaacctgaagccttcgaagccaacagattctacaccgtgatcaacaaaaagagcggcgagatcgtgcccatggaggtgaacttcaacttcgacgaccccaacctgatcatcctgcctctggcctttggcaagagacagggcagagaattcatctggaacgacctgctgtccctggaaaccggcagcctgaagctggccaacggaagagtgatcgagaagacactgtacaacagaagaacccggcaggatgagcctgccctgttcgtggccctgaccttcgagcggcgggaggtcctggactcctccaatatcaaaccaatgaacctgatcggcgtggcaagaggcgaaaacatccccgccgtgatcgccctgaccgaccccgagggctgcccactgagccggtttaaggatagcctgggaaacccaacccacatcctgagaatcggcgagagctataaggagaagcagcggaccatccaggccaagaaggaggtggagcagcggagagccggcggctacagccggaagtacgccagcaaagccaagaatctggcagacgatatggtgagaaacaccgctagagatctgctgtactacgccgtgacccaggatgccatgctgatcttcgccaacctgagccggggcttcggccggcagggcaagcggaccttcatggccgagagacagtacacacggatggaggactggctgaccgccaagctggcctacgagggcctgagcaagacctacctgtccaagacactggcccagtacacctccaagacatgcagcaactgtgggtttaccatcaccagcgccgactacgacagggtgctggagaagctgaagaagacagcaacaggctggatgaccacaattaacggcaaggagctgaaggtggagggccagattacctactacaacagatacaagagacagaacgtagtcaaggacctgtccgtcgagctggatagactgagcgaagaatctgtgaacaacgacatctcctcctggacaaagggcagaagcggagaagctctgagcctcctgaagaaaagattctcccatagacccgtgcaggagaagttcgtgtgcctgaactgcggcttcgagacacacgcagccgagcaagccgccctgaacatcgccagatcctggctgttcctgcggagccaggagtacaagaaataccagacaaacaagacaaccggcaacaccgataagagagccttcgtcgagacctggcagtccttttaccggaagaagcttaaggaggtgtggaaacctgccgtgcggtctggcggatctggcggaggctcctagccagggcctgctgaccttcaaggacgtggccatcgagttcagccccgaggagtgggagtacctggaccccccccagaggatgctgtacaggaccgtgatgctggagaaccacaggaacctggtgttcctgggcctggccgtgagcaagcccgacctgatcatgtgcctggagcagaggagggagccctggaacgtgaagagccacagcaagctggccaagagccccgccgtgaccagccacggatctggctccggcagcggccccaagaaaaagagaaaagtctaagctgccttctgcggggcttgccttctggccatgcccttcttctctcccttgcacctgtacctcttggtctttgaataaagcctgagtaggaaggctagcaaaaaaaaaaaaaaaaaaaaaaaaaaaaaaaaaaaaaaaaaaaaaaaaaaaaaaaaaaaaaaaaaaaaaaaaaaaaaaaa

SEQ ID NO: 15625 - RNA, 9485 nt, synthetic construct
  source 1..9485: mol_type = other RNA
aggaaataagagagaaaagaagagtaagaagaaatataagagccaccatggcccctaagaagaagcgtaaagtgagccggatggaacgcctcgtctacgaggtgcggcagaagtgcagaaacatcgaggacatctgcatctcctgcggatctctgaacgtgaccctggagcacccactgttcatcggcggcatgtgccagaactgtaaaaactgttttctggagtgtgcctatcaatacgacgatgacggctaccagagctactgcaccatctgttgcggcggaagagaggtgctgatgtgtggaaataacaactgctgccggtgcttctgcgtggaatgcgtggacctgctggtgggccccggcgccgcccaggccgctattaaggaagatccttggaactgctacatgtgcggccacaagggcacatacggcctgctgagacggagagaggactggcctagcagactgcagatgttcttcgccaataaccacgaccaggagttcgacccccctaaggtgtaccctcccgtccccgccgagaagagaaagcccatccgggtcctgagcctgttcgatggcatcgccaccggtctgctggtgctgaaggacctgggcatccaggtggataggtacattgcctccgaggtgtgcgaggactccatcaccgtgggaatggtgcgtcatcagggcaagatcatgtacgtgggcgacgtgcggagcgtgacacagaagcatatccaggagtggggccctttcgacctggtgatcggcggcagcccttgcaatgacctgagcatcgtgaacccagcccggaagggcctgtacgagggaaccggcagactgttcttcgagttttacagactgctgcacgacgcccggcctaaggaaggcgacgaccggcccttcttttggctgttcgagaatgtggtggccatgggagtcagcgacaagcgggatattagccggttcctggagagcaaccccgtgatgatcgatgccaaggaagtgagcgccgcccaccgggccagatacttctggggcaatctgcctggcatgaacagacccctggccagcaccgtgaacgacaagctggagctgcaggagtgcctggagcacggccggatcgccaagttcagcaaggtgagaaccatcaccacccgaagcaacagcatcaaacaaggcaaggaccagcactttcctgtgttcatgaacgagaaggaggacatcctgtggtgtaccgagatggagagagtgttcgggttcccagtccactacacagatgtcagcaacatgtctagactggccagacagagactgctgggaagaagctggtccgtccctgtgatcagacacctgttcgcccctctgaaggagtacttcgcctgcgtgagcagcggcaacagcaacgccaacagccggggccccagcttctctagcggcctggtgccactgtccctgagagggagccacatgggccccatggagatctacaaaaccgtgagcgcctggaagcggcagcctgtgcgcgtgctgagcctgtttcggaatatcgataaagtcctgaaaagcctgggattcctggagagcggctctggctccggcggtggcaccctgaagtacgtggaggatgtgacaaacgtggtcagacgggatgtggagaagtggggccccttcgatctggtgtacggcagcacccaacccctgggcagctcttgtgaccggtgccctggctggtacatgtttcagttccaccggatcctgcagtacgccctgccgagacaggagtcccagcggccattcttttggattttcatggacaacttgctgctgaccgaggatgaccaggaaactaccactcggttcctgcagaccgaagccgtgaccctgcaggacgtgagaggccgggactaccagaacgccatgcgggtgtggtccaacatccctggactgaaaagcaagcacgcacctctgacccctaaagaagaggagtacctgcaggcccaggtgcggagcagaagcaagctggacgcccctaaggtggatctgctggtgaagaattgcctcctgcccctgagagagtacttcaagtatttcagccagaatagtctgcccctgggaggcagcggcggcggcgccctggtgacatttgaggacgtcgccgtgcggttcacccaggaggaatgggctctgctggatccttctcagaaaatcctgtaccgggacgtgatgagagagacataccggaatctgacctccgtgggcatcaactgggaatgttgggaccttgaagcctgcttcagaagcctgggaagaaacctgagagtgcaggtggtgaagagaaagtgcgagctgaccaacagcggcccctgcgccgagggcggcccaagcagcggcgcccctcctcccagcggcggcagcccagccggctccccaacctctaccgaggagggcacctctgagtccgccacccccgagagcggccctggcacctccaccgagcccagcgagggcagcgcacccggcagccctgccggcagccccacctccacagaggagggaaccagcaccgagcccagcgaaggcagcgccccaggcaccagcaccgagcctagtgagcaggagattaaacggatcaacaagatcagaagaagacttgtgaaagacagcaacaccaagaaggccggcaagacaggccccatgaaaaccctgctggttagagtgatgacacccgatctgagagagcggctggaaaacctgagaaagaagcctgaaaatatcccccagcccatcagcaatacatctagagccaacctgaataagctgctgaccgattacaccgaaatgaagaaggcgatcctgcatgtgtactgggaagagttccagaaggaccctgtgggcctgatgagccgggtggcccagcctgccagcaagaagatcgatcagaacaagctgaaacctgagatggacgagaagggcaacctgaccaccgccggctttgcctgctctcagtgtggccagcccctgttcgtgtacaagctggagcaggtgtctgagaagggcaaggcttacaccaactacttcggacggtgcaatgtggccgagcacgaaaagctgatcctgctggcccagctgaagcccgagaaggatagcgacgaagccgtgacatatagcctgggaaagtttgggcagagggccctggatttctacagcattcatgtgaccaaggagtccacccaccccgtgaagcccctggcccagatcgccggaaacagatacgcctccggacctgtgggaaaggccctgagcgacgcatgtatgggcacaatcgcctccttcctgtctaagtaccaggacatcatcatcgaacaccagaaggtggtgaagggcaaccagaagagactggagagcctgcgggagctggccggcaaggaaaacctggaataccctagcgtgaccctgccacctcagcctcacaccaaggagggcgttgatgcctacaacgaagtgatcgcccgggtgcgaatgtgggtgaacctgaacctgtggcagaagctgaagctaagcagagatgatgccaagcctctgctgagactgaagggattcccttcctttcctctggtcgagagacaggccaacgaagtggactggtgggacatggtgtgtaacgtgaagaagctgatcaacgagaaaaaggaggatggcaaggtgttttggcagaatctggctggctacaagagacaggaagccctgagaccatacctgagcagcgaggaagatcggaagaagggaaagaaattcgctcggtaccagctgggcgacctgctgctgcacctggaaaagaagcacggcgaggactggggaaaggtgtacgacgaggcctgggagcggattgacaagaaagtggaaggcctgagcaagcacatcaagctggaagaggaacggagaagcgaggacgcccagagcaaggccgccctgaccgactggctgcgggctaaggccagcttcgtgatcgagggcctgaaggaggccgacaaggacgagttctgcagatgcgagctgaagctgcagaagtggtacggggacctgcggggaaagcccttcgccatcgaagccgagaacagcatcctggacatcagcggcttcagcaagcagtacaactgtgccttcatctggcagaaggacggcgtgaagaagctgaacctgtacctgatcatcaactacttcaagggcggcaagctgcggttcaagaagatcaaacctgaagccttcgaagccaacagattctacaccgtgatcaacaaaaagagcggcgagatcgtgcccatggaggtgaacttcaacttcgacgaccccaacctgatcatcctgcctctggcctttggcaagagacagggcagagaattcatctggaacgacctgctgtccctggaaaccggcagcctgaagctggccaacggaagagtgatcgagaagacactgtacaacagaagaacccggcaggatgagcctgccctgttcgtggccctgaccttcgagcggcgggaggtcctggactcctccaatatcaaaccaatgaacctgatcggcgtggcaagaggcgaaaacatccccgccgtgatcgccctgaccgaccccgagggctgcccactgagccggtttaaggatagcctgggaaacccaacccacatcctgagaatcggcgagagctataaggagaagcagcggaccatccaggccaagaaggaggtggagcagcggagagccggcggctacagccggaagtacgccagcaaagccaagaatctggcagacgatatggtgagaaacaccgctagagatctgctgtactacgccgtgacccaggatgccatgctgatcttcgccaacctgagccggggcttcggccggcagggcaagcggaccttcatggccgagagacagtacacacggatggaggactggctgaccgccaagctggcctacgagggcctgagcaagacctacctgtccaagacactggcccagtacacctccaagacatgcagcaactgtgggtttaccatcaccagcgccgactacgacagggtgctggagaagctgaagaagacagcaacaggctggatgaccacaattaacggcaaggagctgaaggtggagggccagattacctactacaacagatacaagagacagaacgtagtcaaggacctgtccgtcgagctggatagactgagcgaagaatctgtgaacaacgacatctcctcctggacaaagggcagaagcggagaagctctgagcctcctgaagaaaagattctcccatagacccgtgcaggagaagttcgtgtgcctgaactgcggcttcgagacacacgcagccgagcaagccgccctgaacatcgccagatcctggctgttcctgcggagccaggagtacaagaaataccagacaaacaagacaaccggcaacaccgataagagagccttcgtcgagacctggcagtccttttaccggaagaagcttaaggaggtgtggaaacctgccgtgcggtctggcggatctggcggaggctccagccaggagcccgtgaccttcgaggacgtggccgtgtacttcacccagaaccagtgggccagcctggaccccatgcagagggccctgtacctggaggtgatgctggagaactacgccaacatcaccagcctggccgccctgcccttccccaagcccgacctgatcctgcagctggagcagggcggcgccccctggggcctggacccctggacccccctggagggcgaggccctgggcggcgtgggcggcccaagcagcggcgcccctcctcccagcggcggcagcccagccggctccccaacctctaccgaggagggcacctctgagtccgccacccccgagagcggccctggcacctccaccgagcccagcgagggcagcgcacccggcagccctgccggcagccccacctccacagaggagggaaccagcaccgagcccagcgaaggcagcgccccaggcaccagcaccgagcctagtgagcaggagattaaacggatcaacaagatcagaagaagacttgtgaaagacagcaacaccaagaaggccggcaagacaggccccatgaaaaccctgctggttagagtgatgacacccgatctgagagagcggctggaaaacctgagaaagaagcctgaaaatatcccccagcccatcagcaatacatctagagccaacctgaataagctgctgaccgattacaccgaaatgaagaaggcgatcctgcatgtgtactgggaagagttccagaaggaccctgtgggcctgatgagccgggtggcccagcctgccagcaagaagatcgatcagaacaagctgaaacctgagatggacgagaagggcaacctgaccaccgccggctttgcctgctctcagtgtggccagcccctgttcgtgtacaagctggagcaggtgtctgagaagggcaaggcttacaccaactacttcggacggtgcaatgtggccgagcacgaaaagctgatcctgctggcccagctgaagcccgagaaggatagcgacgaagccgtgacatatagcctgggaaagtttgggcagagggccctggatttctacagcattcatgtgaccaaggagtccacccaccccgtgaagcccctggcccagatcgccggaaacagatacgcctccggacctgtgggaaaggccctgagcgacgcatgtatgggcacaatcgcctccttcctgtctaagtaccaggacatcatcatcgaacaccagaaggtggtgaagggcaaccagaagagactggagagcctgcgggagctggccggcaaggaaaacctggaataccctagcgtgaccctgccacctcagcctcacaccaaggagggcgttgatgcctacaacgaagtgatcgcccgggtgcgaatgtgggtgaacctgaacctgtggcagaagctgaagctaagcagagatgatgccaagcctctgctgagactgaagggattcccttcctttcctctggtcgagagacaggccaacgaagtggactggtgggacatggtgtgtaacgtgaagaagctgatcaacgagaaaaaggaggatggcaaggtgttttggcagaatctggctggctacaagagacaggaagccctgagaccatacctgagcagcgaggaagatcggaagaagggaaagaaattcgctcggtaccagctgggcgacctgctgctgcacctggaaaagaagcacggcgaggactggggaaaggtgtacgacgaggcctgggagcggattgacaagaaagtggaaggcctgagcaagcacatcaagctggaagaggaacggagaagcgaggacgcccagagcaaggccgccctgaccgactggctgcgggctaaggccagcttcgtgatcgagggcctgaaggaggccgacaaggacgagttctgcagatgcgagctgaagctgcagaagtggtacggggacctgcggggaaagcccttcgccatcgaagccgagaacagcatcctggacatcagcggcttcagcaagcagtacaactgtgccttcatctggcagaaggacggcgtgaagaagctgaacctgtacctgatcatcaactacttcaagggcggcaagctgcggttcaagaagatcaaacctgaagccttcgaagccaacagattctacaccgtgatcaacaaaaagagcggcgagatcgtgcccatggaggtgaacttcaacttcgacgaccccaacctgatcatcctgcctctggcctttggcaagagacagggcagagaattcatctggaacgacctgctgtccctggaaaccggcagcctgaagctggccaacggaagagtgatcgagaagacactgtacaacagaagaacccggcaggatgagcctgccctgttcgtggccctgaccttcgagcggcgggaggtcctggactcctccaatatcaaaccaatgaacctgatcggcgtggcaagaggcgaaaacatccccgccgtgatcgccctgaccgaccccgagggctgcccactgagccggtttaaggatagcctgggaaacccaacccacatcctgagaatcggcgagagctataaggagaagcagcggaccatccaggccaagaaggaggtggagcagcggagagccggcggctacagccggaagtacgccagcaaagccaagaatctggcagacgatatggtgagaaacaccgctagagatctgctgtactacgccgtgacccaggatgccatgctgatcttcgccaacctgagccggggcttcggccggcagggcaagcggaccttcatggccgagagacagtacacacggatggaggactggctgaccgccaagctggcctacgagggcctgagcaagacctacctgtccaagacactggcccagtacacctccaagacatgcagcaactgtgggtttaccatcaccagcgccgactacgacagggtgctggagaagctgaagaagacagcaacaggctggatgaccacaattaacggcaaggagctgaaggtggagggccagattacctactacaacagatacaagagacagaacgtagtcaaggacctgtccgtcgagctggatagactgagcgaagaatctgtgaacaacgacatctcctcctggacaaagggcagaagcggagaagctctgagcctcctgaagaaaagattctcccatagacccgtgcaggagaagttcgtgtgcctgaactgcggcttcgagacacacgcagccgagcaagccgccctgaacatcgccagatcctggctgttcctgcggagccaggagtacaagaaataccagacaaacaagacaaccggcaacaccgataagagagccttcgtcgagacctggcagtccttttaccggaagaagcttaaggaggtgtggaaacctgccgtgcggtctggcggatctggcggaggctcctagccaggagcccgtgaccttcgaggacgtggccgtgtacttcacccagaaccagtgggccagcctggaccccatgcagagggccctgtacctggaggtgatgctggagaactacgccaacatcaccagcctggccgccctgcccttccccaagcccgacctgatcctgcagctggagcagggcggcgccccctggggcctggacccctggacccccctggagggcgaggccctgggcggcgtgggatctggctccggcagcggccccaagaaaaagagaaaagtctaagctgccttctgcggggcttgccttctggccatgcccttcttctctcccttgcacctgtacctcttggtctttgaataaagcctgagtaggaaggctagcaaaaaaaaaaaaaaaaaaaaaaaaaaaaaaaaaaaaaaaaaaaaaaaaaaaaaaaaaaaaaaaaaaaaaaaaaaaaaaaa

SEQ ID NO: 15626 - RNA, 9485 nt, synthetic construct
  source 1..9485: mol_type = other RNA
aggaaataagagagaaaagaagagtaagaagaaatataagagccaccatggcccctaagaagaagcgtaaagtgagccggatggaacgcctcgtctacgaggtgcggcagaagtgcagaaacatcgaggacatctgcatctcctgcggatctctgaacgtgaccctggagcacccactgttcatcggcggcatgtgccagaactgtaaaaactgttttctggagtgtgcctatcaatacgacgatgacggctaccagagctactgcaccatctgttgcggcggaagagaggtgctgatgtgtggaaataacaactgctgccggtgcttctgcgtggaatgcgtggacctgctggtgggccccggcgccgcccaggccgctattaaggaagatccttggaactgctacatgtgcggccacaagggcacatacggcctgctgagacggagagaggactggcctagcagactgcagatgttcttcgccaataaccacgaccaggagttcgacccccctaaggtgtaccctcccgtccccgccgagaagagaaagcccatccgggtcctgagcctgttcgatggcatcgccaccggtctgctggtgctgaaggacctgggcatccaggtggataggtacattgcctccgaggtgtgcgaggactccatcaccgtgggaatggtgcgtcatcagggcaagatcatgtacgtgggcgacgtgcggagcgtgacacagaagcatatccaggagtggggccctttcgacctggtgatcggcggcagcccttgcaatgacctgagcatcgtgaacccagcccggaagggcctgtacgagggaaccggcagactgttcttcgagttttacagactgctgcacgacgcccggcctaaggaaggcgacgaccggcccttcttttggctgttcgagaatgtggtggccatgggagtcagcgacaagcgggatattagccggttcctggagagcaaccccgtgatgatcgatgccaaggaagtgagcgccgcccaccgggccagatacttctggggcaatctgcctggcatgaacagacccctggccagcaccgtgaacgacaagctggagctgcaggagtgcctggagcacggccggatcgccaagttcagcaaggtgagaaccatcaccacccgaagcaacagcatcaaacaaggcaaggaccagcactttcctgtgttcatgaacgagaaggaggacatcctgtggtgtaccgagatggagagagtgttcgggttcccagtccactacacagatgtcagcaacatgtctagactggccagacagagactgctgggaagaagctggtccgtccctgtgatcagacacctgttcgcccctctgaaggagtacttcgcctgcgtgagcagcggcaacagcaacgccaacagccggggccccagcttctctagcggcctggtgccactgtccctgagagggagccacatgggccccatggagatctacaaaaccgtgagcgcctggaagcggcagcctgtgcgcgtgctgagcctgtttcggaatatcgataaagtcctgaaaagcctgggattcctggagagcggctctggctccggcggtggcaccctgaagtacgtggaggatgtgacaaacgtggtcagacgggatgtggagaagtggggccccttcgatctggtgtacggcagcacccaacccctgggcagctcttgtgaccggtgccctggctggtacatgtttcagttccaccggatcctgcagtacgccctgccgagacaggagtcccagcggccattcttttggattttcatggacaacttgctgctgaccgaggatgaccaggaaactaccactcggttcctgcagaccgaagccgtgaccctgcaggacgtgagaggccgggactaccagaacgccatgcgggtgtggtccaacatccctggactgaaaagcaagcacgcacctctgacccctaaagaagaggagtacctgcaggcccaggtgcggagcagaagcaagctggacgcccctaaggtggatctgctggtgaagaattgcctcctgcccctgagagagtacttcaagtatttcagccagaatagtctgcccctgggaggcagcggcggcggcgccctggtgacatttgaggacgtcgccgtgcggttcacccaggaggaatgggctctgctggatccttctcagaaaatcctgtaccgggacgtgatgagagagacataccggaatctgacctccgtgggcatcaactgggaatgttgggaccttgaagcctgcttcagaagcctgggaagaaacctgagagtgcaggtggtgaagagaaagtgcgagctgaccaacagcggcccctgcgccgagggcggcccaagcagcggcgcccctcctcccagcggcggcagcccagccggctccccaacctctaccgaggagggcacctctgagtccgccacccccgagagcggccctggcacctccaccgagcccagcgagggcagcgcacccggcagccctgccggcagccccacctccacagaggagggaaccagcaccgagcccagcgaaggcagcgccccaggcaccagcaccgagcctagtgagcaggagattaaacggatcaacaagatcagaagaagacttgtgaaagacagcaacaccaagaaggccggcaagacaggccccatgaaaaccctgctggttagagtgatgacacccgatctgagagagcggctggaaaacctgagaaagaagcctgaaaatatcccccagcccatcagcaatacatctagagccaacctgaataagctgctgaccgattacaccgaaatgaagaaggcgatcctgcatgtgtactgggaagagttccagaaggaccctgtgggcctgatgagccgggtggcccagcctgccagcaagaagatcgatcagaacaagctgaaacctgagatggacgagaagggcaacctgaccaccgccggctttgcctgctctcagtgtggccagcccctgttcgtgtacaagctggagcaggtgtctgagaagggcaaggcttacaccaactacttcggacggtgcaatgtggccgagcacgaaaagctgatcctgctggcccagctgaagcccgagaaggatagcgacgaagccgtgacatatagcctgggaaagtttgggcagagggccctggatttctacagcattcatgtgaccaaggagtccacccaccccgtgaagcccctggcccagatcgccggaaacagatacgcctccggacctgtgggaaaggccctgagcgacgcatgtatgggcacaatcgcctccttcctgtctaagtaccaggacatcatcatcgaacaccagaaggtggtgaagggcaaccagaagagactggagagcctgcgggagctggccggcaaggaaaacctggaataccctagcgtgaccctgccacctcagcctcacaccaaggagggcgttgatgcctacaacgaagtgatcgcccgggtgcgaatgtgggtgaacctgaacctgtggcagaagctgaagctaagcagagatgatgccaagcctctgctgagactgaagggattcccttcctttcctctggtcgagagacaggccaacgaagtggactggtgggacatggtgtgtaacgtgaagaagctgatcaacgagaaaaaggaggatggcaaggtgttttggcagaatctggctggctacaagagacaggaagccctgagaccatacctgagcagcgaggaagatcggaagaagggaaagaaattcgctcggtaccagctgggcgacctgctgctgcacctggaaaagaagcacggcgaggactggggaaaggtgtacgacgaggcctgggagcggattgacaagaaagtggaaggcctgagcaagcacatcaagctggaagaggaacggagaagcgaggacgcccagagcaaggccgccctgaccgactggctgcgggctaaggccagcttcgtgatcgagggcctgaaggaggccgacaaggacgagttctgcagatgcgagctgaagctgcagaagtggtacggggacctgcggggaaagcccttcgccatcgaagccgagaacagcatcctggacatcagcggcttcagcaagcagtacaactgtgccttcatctggcagaaggacggcgtgaagaagctgaacctgtacctgatcatcaactacttcaagggcggcaagctgcggttcaagaagatcaaacctgaagccttcgaagccaacagattctacaccgtgatcaacaaaaagagcggcgagatcgtgcccatggaggtgaacttcaacttcgacgaccccaacctgatcatcctgcctctggcctttggcaagagacagggcagagaattcatctggaacgacctgctgtccctggaaaccggcagcctgaagctggccaacggaagagtgatcgagaagacactgtacaacagaagaacccggcaggatgagcctgccctgttcgtggccctgaccttcgagcggcgggaggtcctggactcctccaatatcaaaccaatgaacctgatcggcgtggcaagaggcgaaaacatccccgccgtgatcgccctgaccgaccccgagggctgcccactgagccggtttaaggatagcctgggaaacccaacccacatcctgagaatcggcgagagctataaggagaagcagcggaccatccaggccaagaaggaggtggagcagcggagagccggcggctacagccggaagtacgccagcaaagccaagaatctggcagacgatatggtgagaaacaccgctagagatctgctgtactacgccgtgacccaggatgccatgctgatcttcgccaacctgagccggggcttcggccggcagggcaagcggaccttcatggccgagagacagtacacacggatggaggactggctgaccgccaagctggcctacgagggcctgagcaagacctacctgtccaagacactggcccagtacacctccaagacatgcagcaactgtgggtttaccatcaccagcgccgactacgacagggtgctggagaagctgaagaagacagcaacaggctggatgaccacaattaacggcaaggagctgaaggtggagggccagattacctactacaacagatacaagagacagaacgtagtcaaggacctgtccgtcgagctggatagactgagcgaagaatctgtgaacaacgacatctcctcctggacaaagggcagaagcggagaagctctgagcctcctgaagaaaagattctcccatagacccgtgcaggagaagttcgtgtgcctgaactgcggcttcgagacacacgcagccgagcaagccgccctgaacatcgccagatcctggctgttcctgcggagccaggagtacaagaaataccagacaaacaagacaaccggcaacaccgataagagagccttcgtcgagacctggcagtccttttaccggaagaagcttaaggaggtgtggaaacctgccgtgcggtctggcggatctggcggaggctccctgcagggcctgctgaccttcagggacgtggccatcgagttcagccaggaggagtggggctgcctgagccacacccagagggagctgtacagggacgtgatgctggagaactacggccacctgctgttcagcggcctgatcgccagcaagcccgacctggtgagctgcctggagcagaagaaggagccctgggacctgaagaggaagaagaccgtggccatccaccccgtgtacgagctgaagggcggcccaagcagcggcgcccctcctcccagcggcggcagcccagccggctccccaacctctaccgaggagggcacctctgagtccgccacccccgagagcggccctggcacctccaccgagcccagcgagggcagcgcacccggcagccctgccggcagccccacctccacagaggagggaaccagcaccgagcccagcgaaggcagcgccccaggcaccagcaccgagcctagtgagcaggagattaaacggatcaacaagatcagaagaagacttgtgaaagacagcaacaccaagaaggccggcaagacaggccccatgaaaaccctgctggttagagtgatgacacccgatctgagagagcggctggaaaacctgagaaagaagcctgaaaatatcccccagcccatcagcaatacatctagagccaacctgaataagctgctgaccgattacaccgaaatgaagaaggcgatcctgcatgtgtactgggaagagttccagaaggaccctgtgggcctgatgagccgggtggcccagcctgccagcaagaagatcgatcagaacaagctgaaacctgagatggacgagaagggcaacctgaccaccgccggctttgcctgctctcagtgtggccagcccctgttcgtgtacaagctggagcaggtgtctgagaagggcaaggcttacaccaactacttcggacggtgcaatgtggccgagcacgaaaagctgatcctgctggcccagctgaagcccgagaaggatagcgacgaagccgtgacatatagcctgggaaagtttgggcagagggccctggatttctacagcattcatgtgaccaaggagtccacccaccccgtgaagcccctggcccagatcgccggaaacagatacgcctccggacctgtgggaaaggccctgagcgacgcatgtatgggcacaatcgcctccttcctgtctaagtaccaggacatcatcatcgaacaccagaaggtggtgaagggcaaccagaagagactggagagcctgcgggagctggccggcaaggaaaacctggaataccctagcgtgaccctgccacctcagcctcacaccaaggagggcgttgatgcctacaacgaagtgatcgcccgggtgcgaatgtgggtgaacctgaacctgtggcagaagctgaagctaagcagagatgatgccaagcctctgctgagactgaagggattcccttcctttcctctggtcgagagacaggccaacgaagtggactggtgggacatggtgtgtaacgtgaagaagctgatcaacgagaaaaaggaggatggcaaggtgttttggcagaatctggctggctacaagagacaggaagccctgagaccatacctgagcagcgaggaagatcggaagaagggaaagaaattcgctcggtaccagctgggcgacctgctgctgcacctggaaaagaagcacggcgaggactggggaaaggtgtacgacgaggcctgggagcggattgacaagaaagtggaaggcctgagcaagcacatcaagctggaagaggaacggagaagcgaggacgcccagagcaaggccgccctgaccgactggctgcgggctaaggccagcttcgtgatcgagggcctgaaggaggccgacaaggacgagttctgcagatgcgagctgaagctgcagaagtggtacggggacctgcggggaaagcccttcgccatcgaagccgagaacagcatcctggacatcagcggcttcagcaagcagtacaactgtgccttcatctggcagaaggacggcgtgaagaagctgaacctgtacctgatcatcaactacttcaagggcggcaagctgcggttcaagaagatcaaacctgaagccttcgaagccaacagattctacaccgtgatcaacaaaaagagcggcgagatcgtgcccatggaggtgaacttcaacttcgacgaccccaacctgatcatcctgcctctggcctttggcaagagacagggcagagaattcatctggaacgacctgctgtccctggaaaccggcagcctgaagctggccaacggaagagtgatcgagaagacactgtacaacagaagaacccggcaggatgagcctgccctgttcgtggccctgaccttcgagcggcgggaggtcctggactcctccaatatcaaaccaatgaacctgatcggcgtggcaagaggcgaaaacatccccgccgtgatcgccctgaccgaccccgagggctgcccactgagccggtttaaggatagcctgggaaacccaacccacatcctgagaatcggcgagagctataaggagaagcagcggaccatccaggccaagaaggaggtggagcagcggagagccggcggctacagccggaagtacgccagcaaagccaagaatctggcagacgatatggtgagaaacaccgctagagatctgctgtactacgccgtgacccaggatgccatgctgatcttcgccaacctgagccggggcttcggccggcagggcaagcggaccttcatggccgagagacagtacacacggatggaggactggctgaccgccaagctggcctacgagggcctgagcaagacctacctgtccaagacactggcccagtacacctccaagacatgcagcaactgtgggtttaccatcaccagcgccgactacgacagggtgctggagaagctgaagaagacagcaacaggctggatgaccacaattaacggcaaggagctgaaggtggagggccagattacctactacaacagatacaagagacagaacgtagtcaaggacctgtccgtcgagctggatagactgagcgaagaatctgtgaacaacgacatctcctcctggacaaagggcagaagcggagaagctctgagcctcctgaagaaaagattctcccatagacccgtgcaggagaagttcgtgtgcctgaactgcggcttcgagacacacgcagccgagcaagccgccctgaacatcgccagatcctggctgttcctgcggagccaggagtacaagaaataccagacaaacaagacaaccggcaacaccgataagagagccttcgtcgagacctggcagtccttttaccggaagaagcttaaggaggtgtggaaacctgccgtgcggtctggcggatctggcggaggctcctctgcagggcctgctgaccttcagggacgtggccatcgagttcagccaggaggagtggggctgcctgagccacacccagagggagctgtacagggacgtgatgctggagaactacggccacctgctgttcagcggcctgatcgccagcaagcccgacctggtgagctgcctggagcagaagaaggagccctgggacctgaagaggaagaagaccgtggccatccaccccgtgtacgagctgaagggatctggctccggcagcggccccaagaaaaagagaaaagtctaagctgccttctgcggggcttgccttctggccatgcccttcttctctcccttgcacctgtacctcttggtctttgaataaagcctgagtaggaaggctagcaaaaaaaaaaaaaaaaaaaaaaaaaaaaaaaaaaaaaaaaaaaaaaaaaaaaaaaaaaaaaaaaaaaaaaaaaaaaaaaa

SEQ ID NO: 15627 - RNA, 9485 nt, synthetic construct
  source 1..9485: mol_type = other RNA
aggaaataagagagaaaagaagagtaagaagaaatataagagccaccatggcccctaagaagaagcgtaaagtgagccggatggaacgcctcgtctacgaggtgcggcagaagtgcagaaacatcgaggacatctgcatctcctgcggatctctgaacgtgaccctggagcacccactgttcatcggcggcatgtgccagaactgtaaaaactgttttctggagtgtgcctatcaatacgacgatgacggctaccagagctactgcaccatctgttgcggcggaagagaggtgctgatgtgtggaaataacaactgctgccggtgcttctgcgtggaatgcgtggacctgctggtgggccccggcgccgcccaggccgctattaaggaagatccttggaactgctacatgtgcggccacaagggcacatacggcctgctgagacggagagaggactggcctagcagactgcagatgttcttcgccaataaccacgaccaggagttcgacccccctaaggtgtaccctcccgtccccgccgagaagagaaagcccatccgggtcctgagcctgttcgatggcatcgccaccggtctgctggtgctgaaggacctgggcatccaggtggataggtacattgcctccgaggtgtgcgaggactccatcaccgtgggaatggtgcgtcatcagggcaagatcatgtacgtgggcgacgtgcggagcgtgacacagaagcatatccaggagtggggccctttcgacctggtgatcggcggcagcccttgcaatgacctgagcatcgtgaacccagcccggaagggcctgtacgagggaaccggcagactgttcttcgagttttacagactgctgcacgacgcccggcctaaggaaggcgacgaccggcccttcttttggctgttcgagaatgtggtggccatgggagtcagcgacaagcgggatattagccggttcctggagagcaaccccgtgatgatcgatgccaaggaagtgagcgccgcccaccgggccagatacttctggggcaatctgcctggcatgaacagacccctggccagcaccgtgaacgacaagctggagctgcaggagtgcctggagcacggccggatcgccaagttcagcaaggtgagaaccatcaccacccgaagcaacagcatcaaacaaggcaaggaccagcactttcctgtgttcatgaacgagaaggaggacatcctgtggtgtaccgagatggagagagtgttcgggttcccagtccactacacagatgtcagcaacatgtctagactggccagacagagactgctgggaagaagctggtccgtccctgtgatcagacacctgttcgcccctctgaaggagtacttcgcctgcgtgagcagcggcaacagcaacgccaacagccggggccccagcttctctagcggcctggtgccactgtccctgagagggagccacatgggccccatggagatctacaaaaccgtgagcgcctggaagcggcagcctgtgcgcgtgctgagcctgtttcggaatatcgataaagtcctgaaaagcctgggattcctggagagcggctctggctccggcggtggcaccctgaagtacgtggaggatgtgacaaacgtggtcagacgggatgtggagaagtggggccccttcgatctggtgtacggcagcacccaacccctgggcagctcttgtgaccggtgccctggctggtacatgtttcagttccaccggatcctgcagtacgccctgccgagacaggagtcccagcggccattcttttggattttcatggacaacttgctgctgaccgaggatgaccaggaaactaccactcggttcctgcagaccgaagccgtgaccctgcaggacgtgagaggccgggactaccagaacgccatgcgggtgtggtccaacatccctggactgaaaagcaagcacgcacctctgacccctaaagaagaggagtacctgcaggcccaggtgcggagcagaagcaagctggacgcccctaaggtggatctgctggtgaagaattgcctcctgcccctgagagagtacttcaagtatttcagccagaatagtctgcccctgggaggcagcggcggcggcgccctggtgacatttgaggacgtcgccgtgcggttcacccaggaggaatgggctctgctggatccttctcagaaaatcctgtaccgggacgtgatgagagagacataccggaatctgacctccgtgggcatcaactgggaatgttgggaccttgaagcctgcttcagaagcctgggaagaaacctgagagtgcaggtggtgaagagaaagtgcgagctgaccaacagcggcccctgcgccgagggcggcccaagcagcggcgcccctcctcccagcggcggcagcccagccggctccccaacctctaccgaggagggcacctctgagtccgccacccccgagagcggccctggcacctccaccgagcccagcgagggcagcgcacccggcagccctgccggcagccccacctccacagaggagggaaccagcaccgagcccagcgaaggcagcgccccaggcaccagcaccgagcctagtgagcaggagattaaacggatcaacaagatcagaagaagacttgtgaaagacagcaacaccaagaaggccggcaagacaggccccatgaaaaccctgctggttagagtgatgacacccgatctgagagagcggctggaaaacctgagaaagaagcctgaaaatatcccccagcccatcagcaatacatctagagccaacctgaataagctgctgaccgattacaccgaaatgaagaaggcgatcctgcatgtgtactgggaagagttccagaaggaccctgtgggcctgatgagccgggtggcccagcctgccagcaagaagatcgatcagaacaagctgaaacctgagatggacgagaagggcaacctgaccaccgccggctttgcctgctctcagtgtggccagcccctgttcgtgtacaagctggagcaggtgtctgagaagggcaaggcttacaccaactacttcggacggtgcaatgtggccgagcacgaaaagctgatcctgctggcccagctgaagcccgagaaggatagcgacgaagccgtgacatatagcctgggaaagtttgggcagagggccctggatttctacagcattcatgtgaccaaggagtccacccaccccgtgaagcccctggcccagatcgccggaaacagatacgcctccggacctgtgggaaaggccctgagcgacgcatgtatgggcacaatcgcctccttcctgtctaagtaccaggacatcatcatcgaacaccagaaggtggtgaagggcaaccagaagagactggagagcctgcgggagctggccggcaaggaaaacctggaataccctagcgtgaccctgccacctcagcctcacaccaaggagggcgttgatgcctacaacgaagtgatcgcccgggtgcgaatgtgggtgaacctgaacctgtggcagaagctgaagctaagcagagatgatgccaagcctctgctgagactgaagggattcccttcctttcctctggtcgagagacaggccaacgaagtggactggtgggacatggtgtgtaacgtgaagaagctgatcaacgagaaaaaggaggatggcaaggtgttttggcagaatctggctggctacaagagacaggaagccctgagaccatacctgagcagcgaggaagatcggaagaagggaaagaaattcgctcggtaccagctgggcgacctgctgctgcacctggaaaagaagcacggcgaggactggggaaaggtgtacgacgaggcctgggagcggattgacaagaaagtggaaggcctgagcaagcacatcaagctggaagaggaacggagaagcgaggacgcccagagcaaggccgccctgaccgactggctgcgggctaaggccagcttcgtgatcgagggcctgaaggaggccgacaaggacgagttctgcagatgcgagctgaagctgcagaagtggtacggggacctgcggggaaagcccttcgccatcgaagccgagaacagcatcctggacatcagcggcttcagcaagcagtacaactgtgccttcatctggcagaaggacggcgtgaagaagctgaacctgtacctgatcatcaactacttcaagggcggcaagctgcggttcaagaagatcaaacctgaagccttcgaagccaacagattctacaccgtgatcaacaaaaagagcggcgagatcgtgcccatggaggtgaacttcaacttcgacgaccccaacctgatcatcctgcctctggcctttggcaagagacagggcagagaattcatctggaacgacctgctgtccctggaaaccggcagcctgaagctggccaacggaagagtgatcgagaagacactgtacaacagaagaacccggcaggatgagcctgccctgttcgtggccctgaccttcgagcggcgggaggtcctggactcctccaatatcaaaccaatgaacctgatcggcgtggcaagaggcgaaaacatccccgccgtgatcgccctgaccgaccccgagggctgcccactgagccggtttaaggatagcctgggaaacccaacccacatcctgagaatcggcgagagctataaggagaagcagcggaccatccaggccaagaaggaggtggagcagcggagagccggcggctacagccggaagtacgccagcaaagccaagaatctggcagacgatatggtgagaaacaccgctagagatctgctgtactacgccgtgacccaggatgccatgctgatcttcgccaacctgagccggggcttcggccggcagggcaagcggaccttcatggccgagagacagtacacacggatggaggactggctgaccgccaagctggcctacgagggcctgagcaagacctacctgtccaagacactggcccagtacacctccaagacatgcagcaactgtgggtttaccatcaccagcgccgactacgacagggtgctggagaagctgaagaagacagcaacaggctggatgaccacaattaacggcaaggagctgaaggtggagggccagattacctactacaacagatacaagagacagaacgtagtcaaggacctgtccgtcgagctggatagactgagcgaagaatctgtgaacaacgacatctcctcctggacaaagggcagaagcggagaagctctgagcctcctgaagaaaagattctcccatagacccgtgcaggagaagttcgtgtgcctgaactgcggcttcgagacacacgcagccgagcaagccgccctgaacatcgccagatcctggctgttcctgcggagccaggagtacaagaaataccagacaaacaagacaaccggcaacaccgataagagagccttcgtcgagacctggcagtccttttaccggaagaagcttaaggaggtgtggaaacctgccgtgcggtctggcggatctggcggaggctccccccaggagcccgtgaccttcgaggacgtggccgtgctgttcacccccgaggagtggatgttcctggacagcgcccagaggagcctgtacagggacgtgatgctggagaactacaggaacgtggccagcgtgggcgaccagctgggcaagttcagcagcttcagccacctggagcagggcgaggagtggtggcccaccgagaggagggtgttccccggcagctgccccgagcccagcctgcccggcggcccaagcagcggcgcccctcctcccagcggcggcagcccagccggctccccaacctctaccgaggagggcacctctgagtccgccacccccgagagcggccctggcacctccaccgagcccagcgagggcagcgcacccggcagccctgccggcagccccacctccacagaggagggaaccagcaccgagcccagcgaaggcagcgccccaggcaccagcaccgagcctagtgagcaggagattaaacggatcaacaagatcagaagaagacttgtgaaagacagcaacaccaagaaggccggcaagacaggccccatgaaaaccctgctggttagagtgatgacacccgatctgagagagcggctggaaaacctgagaaagaagcctgaaaatatcccccagcccatcagcaatacatctagagccaacctgaataagctgctgaccgattacaccgaaatgaagaaggcgatcctgcatgtgtactgggaagagttccagaaggaccctgtgggcctgatgagccgggtggcccagcctgccagcaagaagatcgatcagaacaagctgaaacctgagatggacgagaagggcaacctgaccaccgccggctttgcctgctctcagtgtggccagcccctgttcgtgtacaagctggagcaggtgtctgagaagggcaaggcttacaccaactacttcggacggtgcaatgtggccgagcacgaaaagctgatcctgctggcccagctgaagcccgagaaggatagcgacgaagccgtgacatatagcctgggaaagtttgggcagagggccctggatttctacagcattcatgtgaccaaggagtccacccaccccgtgaagcccctggcccagatcgccggaaacagatacgcctccggacctgtgggaaaggccctgagcgacgcatgtatgggcacaatcgcctccttcctgtctaagtaccaggacatcatcatcgaacaccagaaggtggtgaagggcaaccagaagagactggagagcctgcgggagctggccggcaaggaaaacctggaataccctagcgtgaccctgccacctcagcctcacaccaaggagggcgttgatgcctacaacgaagtgatcgcccgggtgcgaatgtgggtgaacctgaacctgtggcagaagctgaagctaagcagagatgatgccaagcctctgctgagactgaagggattcccttcctttcctctggtcgagagacaggccaacgaagtggactggtgggacatggtgtgtaacgtgaagaagctgatcaacgagaaaaaggaggatggcaaggtgttttggcagaatctggctggctacaagagacaggaagccctgagaccatacctgagcagcgaggaagatcggaagaagggaaagaaattcgctcggtaccagctgggcgacctgctgctgcacctggaaaagaagcacggcgaggactggggaaaggtgtacgacgaggcctgggagcggattgacaagaaagtggaaggcctgagcaagcacatcaagctggaagaggaacggagaagcgaggacgcccagagcaaggccgccctgaccgactggctgcgggctaaggccagcttcgtgatcgagggcctgaaggaggccgacaaggacgagttctgcagatgcgagctgaagctgcagaagtggtacggggacctgcggggaaagcccttcgccatcgaagccgagaacagcatcctggacatcagcggcttcagcaagcagtacaactgtgccttcatctggcagaaggacggcgtgaagaagctgaacctgtacctgatcatcaactacttcaagggcggcaagctgcggttcaagaagatcaaacctgaagccttcgaagccaacagattctacaccgtgatcaacaaaaagagcggcgagatcgtgcccatggaggtgaacttcaacttcgacgaccccaacctgatcatcctgcctctggcctttggcaagagacagggcagagaattcatctggaacgacctgctgtccctggaaaccggcagcctgaagctggccaacggaagagtgatcgagaagacactgtacaacagaagaacccggcaggatgagcctgccctgttcgtggccctgaccttcgagcggcgggaggtcctggactcctccaatatcaaaccaatgaacctgatcggcgtggcaagaggcgaaaacatccccgccgtgatcgccctgaccgaccccgagggctgcccactgagccggtttaaggatagcctgggaaacccaacccacatcctgagaatcggcgagagctataaggagaagcagcggaccatccaggccaagaaggaggtggagcagcggagagccggcggctacagccggaagtacgccagcaaagccaagaatctggcagacgatatggtgagaaacaccgctagagatctgctgtactacgccgtgacccaggatgccatgctgatcttcgccaacctgagccggggcttcggccggcagggcaagcggaccttcatggccgagagacagtacacacggatggaggactggctgaccgccaagctggcctacgagggcctgagcaagacctacctgtccaagacactggcccagtacacctccaagacatgcagcaactgtgggtttaccatcaccagcgccgactacgacagggtgctggagaagctgaagaagacagcaacaggctggatgaccacaattaacggcaaggagctgaaggtggagggccagattacctactacaacagatacaagagacagaacgtagtcaaggacctgtccgtcgagctggatagactgagcgaagaatctgtgaacaacgacatctcctcctggacaaagggcagaagcggagaagctctgagcctcctgaagaaaagattctcccatagacccgtgcaggagaagttcgtgtgcctgaactgcggcttcgagacacacgcagccgagcaagccgccctgaacatcgccagatcctggctgttcctgcggagccaggagtacaagaaataccagacaaacaagacaaccggcaacaccgataagagagccttcgtcgagacctggcagtccttttaccggaagaagcttaaggaggtgtggaaacctgccgtgcggtctggcggatctggcggaggctcctccccaggagcccgtgaccttcgaggacgtggccgtgctgttcacccccgaggagtggatgttcctggacagcgcccagaggagcctgtacagggacgtgatgctggagaactacaggaacgtggccagcgtgggcgaccagctgggcaagttcagcagcttcagccacctggagcagggcgaggagtggtggcccaccgagaggagggtgttccccggcagctgccccgagcccagcctgcccggatctggctccggcagcggccccaagaaaaagagaaaagtctaagctgccttctgcggggcttgccttctggccatgcccttcttctctcccttgcacctgtacctcttggtctttgaataaagcctgagtaggaaggctagcaaaaaaaaaaaaaaaaaaaaaaaaaaaaaaaaaaaaaaaaaaaaaaaaaaaaaaaaaaaaaaaaaaaaaaaaaaaaaaaa

SEQ ID NO: 15628 - RNA, 9485 nt, synthetic construct
  source 1..9485: mol_type = other RNA
aggaaataagagagaaaagaagagtaagaagaaatataagagccaccatggcccctaagaagaagcgtaaagtgagccggatggaacgcctcgtctacgaggtgcggcagaagtgcagaaacatcgaggacatctgcatctcctgcggatctctgaacgtgaccctggagcacccactgttcatcggcggcatgtgccagaactgtaaaaactgttttctggagtgtgcctatcaatacgacgatgacggctaccagagctactgcaccatctgttgcggcggaagagaggtgctgatgtgtggaaataacaactgctgccggtgcttctgcgtggaatgcgtggacctgctggtgggccccggcgccgcccaggccgctattaaggaagatccttggaactgctacatgtgcggccacaagggcacatacggcctgctgagacggagagaggactggcctagcagactgcagatgttcttcgccaataaccacgaccaggagttcgacccccctaaggtgtaccctcccgtccccgccgagaagagaaagcccatccgggtcctgagcctgttcgatggcatcgccaccggtctgctggtgctgaaggacctgggcatccaggtggataggtacattgcctccgaggtgtgcgaggactccatcaccgtgggaatggtgcgtcatcagggcaagatcatgtacgtgggcgacgtgcggagcgtgacacagaagcatatccaggagtggggccctttcgacctggtgatcggcggcagcccttgcaatgacctgagcatcgtgaacccagcccggaagggcctgtacgagggaaccggcagactgttcttcgagttttacagactgctgcacgacgcccggcctaaggaaggcgacgaccggcccttcttttggctgttcgagaatgtggtggccatgggagtcagcgacaagcgggatattagccggttcctggagagcaaccccgtgatgatcgatgccaaggaagtgagcgccgcccaccgggccagatacttctggggcaatctgcctggcatgaacagacccctggccagcaccgtgaacgacaagctggagctgcaggagtgcctggagcacggccggatcgccaagttcagcaaggtgagaaccatcaccacccgaagcaacagcatcaaacaaggcaaggaccagcactttcctgtgttcatgaacgagaaggaggacatcctgtggtgtaccgagatggagagagtgttcgggttcccagtccactacacagatgtcagcaacatgtctagactggccagacagagactgctgggaagaagctggtccgtccctgtgatcagacacctgttcgcccctctgaaggagtacttcgcctgcgtgagcagcggcaacagcaacgccaacagccggggccccagcttctctagcggcctggtgccactgtccctgagagggagccacatgggccccatggagatctacaaaaccgtgagcgcctggaagcggcagcctgtgcgcgtgctgagcctgtttcggaatatcgataaagtcctgaaaagcctgggattcctggagagcggctctggctccggcggtggcaccctgaagtacgtggaggatgtgacaaacgtggtcagacgggatgtggagaagtggggccccttcgatctggtgtacggcagcacccaacccctgggcagctcttgtgaccggtgccctggctggtacatgtttcagttccaccggatcctgcagtacgccctgccgagacaggagtcccagcggccattcttttggattttcatggacaacttgctgctgaccgaggatgaccaggaaactaccactcggttcctgcagaccgaagccgtgaccctgcaggacgtgagaggccgggactaccagaacgccatgcgggtgtggtccaacatccctggactgaaaagcaagcacgcacctctgacccctaaagaagaggagtacctgcaggcccaggtgcggagcagaagcaagctggacgcccctaaggtggatctgctggtgaagaattgcctcctgcccctgagagagtacttcaagtatttcagccagaatagtctgcccctgggaggcagcggcggcggcgccctggtgacatttgaggacgtcgccgtgcggttcacccaggaggaatgggctctgctggatccttctcagaaaatcctgtaccgggacgtgatgagagagacataccggaatctgacctccgtgggcatcaactgggaatgttgggaccttgaagcctgcttcagaagcctgggaagaaacctgagagtgcaggtggtgaagagaaagtgcgagctgaccaacagcggcccctgcgccgagggcggcccaagcagcggcgcccctcctcccagcggcggcagcccagccggctccccaacctctaccgaggagggcacctctgagtccgccacccccgagagcggccctggcacctccaccgagcccagcgagggcagcgcacccggcagccctgccggcagccccacctccacagaggagggaaccagcaccgagcccagcgaaggcagcgccccaggcaccagcaccgagcctagtgagcaggagattaaacggatcaacaagatcagaagaagacttgtgaaagacagcaacaccaagaaggccggcaagacaggccccatgaaaaccctgctggttagagtgatgacacccgatctgagagagcggctggaaaacctgagaaagaagcctgaaaatatcccccagcccatcagcaatacatctagagccaacctgaataagctgctgaccgattacaccgaaatgaagaaggcgatcctgcatgtgtactgggaagagttccagaaggaccctgtgggcctgatgagccgggtggcccagcctgccagcaagaagatcgatcagaacaagctgaaacctgagatggacgagaagggcaacctgaccaccgccggctttgcctgctctcagtgtggccagcccctgttcgtgtacaagctggagcaggtgtctgagaagggcaaggcttacaccaactacttcggacggtgcaatgtggccgagcacgaaaagctgatcctgctggcccagctgaagcccgagaaggatagcgacgaagccgtgacatatagcctgggaaagtttgggcagagggccctggatttctacagcattcatgtgaccaaggagtccacccaccccgtgaagcccctggcccagatcgccggaaacagatacgcctccggacctgtgggaaaggccctgagcgacgcatgtatgggcacaatcgcctccttcctgtctaagtaccaggacatcatcatcgaacaccagaaggtggtgaagggcaaccagaagagactggagagcctgcgggagctggccggcaaggaaaacctggaataccctagcgtgaccctgccacctcagcctcacaccaaggagggcgttgatgcctacaacgaagtgatcgcccgggtgcgaatgtgggtgaacctgaacctgtggcagaagctgaagctaagcagagatgatgccaagcctctgctgagactgaagggattcccttcctttcctctggtcgagagacaggccaacgaagtggactggtgggacatggtgtgtaacgtgaagaagctgatcaacgagaaaaaggaggatggcaaggtgttttggcagaatctggctggctacaagagacaggaagccctgagaccatacctgagcagcgaggaagatcggaagaagggaaagaaattcgctcggtaccagctgggcgacctgctgctgcacctggaaaagaagcacggcgaggactggggaaaggtgtacgacgaggcctgggagcggattgacaagaaagtggaaggcctgagcaagcacatcaagctggaagaggaacggagaagcgaggacgcccagagcaaggccgccctgaccgactggctgcgggctaaggccagcttcgtgatcgagggcctgaaggaggccgacaaggacgagttctgcagatgcgagctgaagctgcagaagtggtacggggacctgcggggaaagcccttcgccatcgaagccgagaacagcatcctggacatcagcggcttcagcaagcagtacaactgtgccttcatctggcagaaggacggcgtgaagaagctgaacctgtacctgatcatcaactacttcaagggcggcaagctgcggttcaagaagatcaaacctgaagccttcgaagccaacagattctacaccgtgatcaacaaaaagagcggcgagatcgtgcccatggaggtgaacttcaacttcgacgaccccaacctgatcatcctgcctctggcctttggcaagagacagggcagagaattcatctggaacgacctgctgtccctggaaaccggcagcctgaagctggccaacggaagagtgatcgagaagacactgtacaacagaagaacccggcaggatgagcctgccctgttcgtggccctgaccttcgagcggcgggaggtcctggactcctccaatatcaaaccaatgaacctgatcggcgtggcaagaggcgaaaacatccccgccgtgatcgccctgaccgaccccgagggctgcccactgagccggtttaaggatagcctgggaaacccaacccacatcctgagaatcggcgagagctataaggagaagcagcggaccatccaggccaagaaggaggtggagcagcggagagccggcggctacagccggaagtacgccagcaaagccaagaatctggcagacgatatggtgagaaacaccgctagagatctgctgtactacgccgtgacccaggatgccatgctgatcttcgccaacctgagccggggcttcggccggcagggcaagcggaccttcatggccgagagacagtacacacggatggaggactggctgaccgccaagctggcctacgagggcctgagcaagacctacctgtccaagacactggcccagtacacctccaagacatgcagcaactgtgggtttaccatcaccagcgccgactacgacagggtgctggagaagctgaagaagacagcaacaggctggatgaccacaattaacggcaaggagctgaaggtggagggccagattacctactacaacagatacaagagacagaacgtagtcaaggacctgtccgtcgagctggatagactgagcgaagaatctgtgaacaacgacatctcctcctggacaaagggcagaagcggagaagctctgagcctcctgaagaaaagattctcccatagacccgtgcaggagaagttcgtgtgcctgaactgcggcttcgagacacacgcagccgagcaagccgccctgaacatcgccagatcctggctgttcctgcggagccaggagtacaagaaataccagacaaacaagacaaccggcaacaccgataagagagccttcgtcgagacctggcagtccttttaccggaagaagcttaaggaggtgtggaaacctgccgtgcggtctggcggatctggcggaggctccatgctgagcttctgggacgtggccatcgagttcagccccgaggagagggagtgcctggaccccgcccagtggagcctgtacagggacgtgatgctggagaactacagcaacctgctgttcctgggcctggccgtgcccaagccccacctggtgaccttcctggagcagaggcaggagagcagcggcgtgaagaggcaggccgccgccaccgtgcaccccggcaggatccccaacgactacaacggcggcccaagcagcggcgcccctcctcccagcggcggcagcccagccggctccccaacctctaccgaggagggcacctctgagtccgccacccccgagagcggccctggcacctccaccgagcccagcgagggcagcgcacccggcagccctgccggcagccccacctccacagaggagggaaccagcaccgagcccagcgaaggcagcgccccaggcaccagcaccgagcctagtgagcaggagattaaacggatcaacaagatcagaagaagacttgtgaaagacagcaacaccaagaaggccggcaagacaggccccatgaaaaccctgctggttagagtgatgacacccgatctgagagagcggctggaaaacctgagaaagaagcctgaaaatatcccccagcccatcagcaatacatctagagccaacctgaataagctgctgaccgattacaccgaaatgaagaaggcgatcctgcatgtgtactgggaagagttccagaaggaccctgtgggcctgatgagccgggtggcccagcctgccagcaagaagatcgatcagaacaagctgaaacctgagatggacgagaagggcaacctgaccaccgccggctttgcctgctctcagtgtggccagcccctgttcgtgtacaagctggagcaggtgtctgagaagggcaaggcttacaccaactacttcggacggtgcaatgtggccgagcacgaaaagctgatcctgctggcccagctgaagcccgagaaggatagcgacgaagccgtgacatatagcctgggaaagtttgggcagagggccctggatttctacagcattcatgtgaccaaggagtccacccaccccgtgaagcccctggcccagatcgccggaaacagatacgcctccggacctgtgggaaaggccctgagcgacgcatgtatgggcacaatcgcctccttcctgtctaagtaccaggacatcatcatcgaacaccagaaggtggtgaagggcaaccagaagagactggagagcctgcgggagctggccggcaaggaaaacctggaataccctagcgtgaccctgccacctcagcctcacaccaaggagggcgttgatgcctacaacgaagtgatcgcccgggtgcgaatgtgggtgaacctgaacctgtggcagaagctgaagctaagcagagatgatgccaagcctctgctgagactgaagggattcccttcctttcctctggtcgagagacaggccaacgaagtggactggtgggacatggtgtgtaacgtgaagaagctgatcaacgagaaaaaggaggatggcaaggtgttttggcagaatctggctggctacaagagacaggaagccctgagaccatacctgagcagcgaggaagatcggaagaagggaaagaaattcgctcggtaccagctgggcgacctgctgctgcacctggaaaagaagcacggcgaggactggggaaaggtgtacgacgaggcctgggagcggattgacaagaaagtggaaggcctgagcaagcacatcaagctggaagaggaacggagaagcgaggacgcccagagcaaggccgccctgaccgactggctgcgggctaaggccagcttcgtgatcgagggcctgaaggaggccgacaaggacgagttctgcagatgcgagctgaagctgcagaagtggtacggggacctgcggggaaagcccttcgccatcgaagccgagaacagcatcctggacatcagcggcttcagcaagcagtacaactgtgccttcatctggcagaaggacggcgtgaagaagctgaacctgtacctgatcatcaactacttcaagggcggcaagctgcggttcaagaagatcaaacctgaagccttcgaagccaacagattctacaccgtgatcaacaaaaagagcggcgagatcgtgcccatggaggtgaacttcaacttcgacgaccccaacctgatcatcctgcctctggcctttggcaagagacagggcagagaattcatctggaacgacctgctgtccctggaaaccggcagcctgaagctggccaacggaagagtgatcgagaagacactgtacaacagaagaacccggcaggatgagcctgccctgttcgtggccctgaccttcgagcggcgggaggtcctggactcctccaatatcaaaccaatgaacctgatcggcgtggcaagaggcgaaaacatccccgccgtgatcgccctgaccgaccccgagggctgcccactgagccggtttaaggatagcctgggaaacccaacccacatcctgagaatcggcgagagctataaggagaagcagcggaccatccaggccaagaaggaggtggagcagcggagagccggcggctacagccggaagtacgccagcaaagccaagaatctggcagacgatatggtgagaaacaccgctagagatctgctgtactacgccgtgacccaggatgccatgctgatcttcgccaacctgagccggggcttcggccggcagggcaagcggaccttcatggccgagagacagtacacacggatggaggactggctgaccgccaagctggcctacgagggcctgagcaagacctacctgtccaagacactggcccagtacacctccaagacatgcagcaactgtgggtttaccatcaccagcgccgactacgacagggtgctggagaagctgaagaagacagcaacaggctggatgaccacaattaacggcaaggagctgaaggtggagggccagattacctactacaacagatacaagagacagaacgtagtcaaggacctgtccgtcgagctggatagactgagcgaagaatctgtgaacaacgacatctcctcctggacaaagggcagaagcggagaagctctgagcctcctgaagaaaagattctcccatagacccgtgcaggagaagttcgtgtgcctgaactgcggcttcgagacacacgcagccgagcaagccgccctgaacatcgccagatcctggctgttcctgcggagccaggagtacaagaaataccagacaaacaagacaaccggcaacaccgataagagagccttcgtcgagacctggcagtccttttaccggaagaagcttaaggaggtgtggaaacctgccgtgcggtctggcggatctggcggaggctcctatgctgagcttctgggacgtggccatcgagttcagccccgaggagagggagtgcctggaccccgcccagtggagcctgtacagggacgtgatgctggagaactacagcaacctgctgttcctgggcctggccgtgcccaagccccacctggtgaccttcctggagcagaggcaggagagcagcggcgtgaagaggcaggccgccgccaccgtgcaccccggcaggatccccaacgactacaacggatctggctccggcagcggccccaagaaaaagagaaaagtctaagctgccttctgcggggcttgccttctggccatgcccttcttctctcccttgcacctgtacctcttggtctttgaataaagcctgagtaggaaggctagcaaaaaaaaaaaaaaaaaaaaaaaaaaaaaaaaaaaaaaaaaaaaaaaaaaaaaaaaaaaaaaaaaaaaaaaaaaaaaaaa

SEQ ID NO: 15629 - RNA, 9485 nt, synthetic construct
  source 1..9485: mol_type = other RNA
aggaaataagagagaaaagaagagtaagaagaaatataagagccaccatggcccctaagaagaagcgtaaagtgagccggatggaacgcctcgtctacgaggtgcggcagaagtgcagaaacatcgaggacatctgcatctcctgcggatctctgaacgtgaccctggagcacccactgttcatcggcggcatgtgccagaactgtaaaaactgttttctggagtgtgcctatcaatacgacgatgacggctaccagagctactgcaccatctgttgcggcggaagagaggtgctgatgtgtggaaataacaactgctgccggtgcttctgcgtggaatgcgtggacctgctggtgggccccggcgccgcccaggccgctattaaggaagatccttggaactgctacatgtgcggccacaagggcacatacggcctgctgagacggagagaggactggcctagcagactgcagatgttcttcgccaataaccacgaccaggagttcgacccccctaaggtgtaccctcccgtccccgccgagaagagaaagcccatccgggtcctgagcctgttcgatggcatcgccaccggtctgctggtgctgaaggacctgggcatccaggtggataggtacattgcctccgaggtgtgcgaggactccatcaccgtgggaatggtgcgtcatcagggcaagatcatgtacgtgggcgacgtgcggagcgtgacacagaagcatatccaggagtggggccctttcgacctggtgatcggcggcagcccttgcaatgacctgagcatcgtgaacccagcccggaagggcctgtacgagggaaccggcagactgttcttcgagttttacagactgctgcacgacgcccggcctaaggaaggcgacgaccggcccttcttttggctgttcgagaatgtggtggccatgggagtcagcgacaagcgggatattagccggttcctggagagcaaccccgtgatgatcgatgccaaggaagtgagcgccgcccaccgggccagatacttctggggcaatctgcctggcatgaacagacccctggccagcaccgtgaacgacaagctggagctgcaggagtgcctggagcacggccggatcgccaagttcagcaaggtgagaaccatcaccacccgaagcaacagcatcaaacaaggcaaggaccagcactttcctgtgttcatgaacgagaaggaggacatcctgtggtgtaccgagatggagagagtgttcgggttcccagtccactacacagatgtcagcaacatgtctagactggccagacagagactgctgggaagaagctggtccgtccctgtgatcagacacctgttcgcccctctgaaggagtacttcgcctgcgtgagcagcggcaacagcaacgccaacagccggggccccagcttctctagcggcctggtgccactgtccctgagagggagccacatgggccccatggagatctacaaaaccgtgagcgcctggaagcggcagcctgtgcgcgtgctgagcctgtttcggaatatcgataaagtcctgaaaagcctgggattcctggagagcggctctggctccggcggtggcaccctgaagtacgtggaggatgtgacaaacgtggtcagacgggatgtggagaagtggggccccttcgatctggtgtacggcagcacccaacccctgggcagctcttgtgaccggtgccctggctggtacatgtttcagttccaccggatcctgcagtacgccctgccgagacaggagtcccagcggccattcttttggattttcatggacaacttgctgctgaccgaggatgaccaggaaactaccactcggttcctgcagaccgaagccgtgaccctgcaggacgtgagaggccgggactaccagaacgccatgcgggtgtggtccaacatccctggactgaaaagcaagcacgcacctctgacccctaaagaagaggagtacctgcaggcccaggtgcggagcagaagcaagctggacgcccctaaggtggatctgctggtgaagaattgcctcctgcccctgagagagtacttcaagtatttcagccagaatagtctgcccctgggaggcagcggcggcggcgccctggtgacatttgaggacgtcgccgtgcggttcacccaggaggaatgggctctgctggatccttctcagaaaatcctgtaccgggacgtgatgagagagacataccggaatctgacctccgtgggcatcaactgggaatgttgggaccttgaagcctgcttcagaagcctgggaagaaacctgagagtgcaggtggtgaagagaaagtgcgagctgaccaacagcggcccctgcgccgagggcggcccaagcagcggcgcccctcctcccagcggcggcagcccagccggctccccaacctctaccgaggagggcacctctgagtccgccacccccgagagcggccctggcacctccaccgagcccagcgagggcagcgcacccggcagccctgccggcagccccacctccacagaggagggaaccagcaccgagcccagcgaaggcagcgccccaggcaccagcaccgagcctagtgagcaggagattaaacggatcaacaagatcagaagaagacttgtgaaagacagcaacaccaagaaggccggcaagacaggccccatgaaaaccctgctggttagagtgatgacacccgatctgagagagcggctggaaaacctgagaaagaagcctgaaaatatcccccagcccatcagcaatacatctagagccaacctgaataagctgctgaccgattacaccgaaatgaagaaggcgatcctgcatgtgtactgggaagagttccagaaggaccctgtgggcctgatgagccgggtggcccagcctgccagcaagaagatcgatcagaacaagctgaaacctgagatggacgagaagggcaacctgaccaccgccggctttgcctgctctcagtgtggccagcccctgttcgtgtacaagctggagcaggtgtctgagaagggcaaggcttacaccaactacttcggacggtgcaatgtggccgagcacgaaaagctgatcctgctggcccagctgaagcccgagaaggatagcgacgaagccgtgacatatagcctgggaaagtttgggcagagggccctggatttctacagcattcatgtgaccaaggagtccacccaccccgtgaagcccctggcccagatcgccggaaacagatacgcctccggacctgtgggaaaggccctgagcgacgcatgtatgggcacaatcgcctccttcctgtctaagtaccaggacatcatcatcgaacaccagaaggtggtgaagggcaaccagaagagactggagagcctgcgggagctggccggcaaggaaaacctggaataccctagcgtgaccctgccacctcagcctcacaccaaggagggcgttgatgcctacaacgaagtgatcgcccgggtgcgaatgtgggtgaacctgaacctgtggcagaagctgaagctaagcagagatgatgccaagcctctgctgagactgaagggattcccttcctttcctctggtcgagagacaggccaacgaagtggactggtgggacatggtgtgtaacgtgaagaagctgatcaacgagaaaaaggaggatggcaaggtgttttggcagaatctggctggctacaagagacaggaagccctgagaccatacctgagcagcgaggaagatcggaagaagggaaagaaattcgctcggtaccagctgggcgacctgctgctgcacctggaaaagaagcacggcgaggactggggaaaggtgtacgacgaggcctgggagcggattgacaagaaagtggaaggcctgagcaagcacatcaagctggaagaggaacggagaagcgaggacgcccagagcaaggccgccctgaccgactggctgcgggctaaggccagcttcgtgatcgagggcctgaaggaggccgacaaggacgagttctgcagatgcgagctgaagctgcagaagtggtacggggacctgcggggaaagcccttcgccatcgaagccgagaacagcatcctggacatcagcggcttcagcaagcagtacaactgtgccttcatctggcagaaggacggcgtgaagaagctgaacctgtacctgatcatcaactacttcaagggcggcaagctgcggttcaagaagatcaaacctgaagccttcgaagccaacagattctacaccgtgatcaacaaaaagagcggcgagatcgtgcccatggaggtgaacttcaacttcgacgaccccaacctgatcatcctgcctctggcctttggcaagagacagggcagagaattcatctggaacgacctgctgtccctggaaaccggcagcctgaagctggccaacggaagagtgatcgagaagacactgtacaacagaagaacccggcaggatgagcctgccctgttcgtggccctgaccttcgagcggcgggaggtcctggactcctccaatatcaaaccaatgaacctgatcggcgtggcaagaggcgaaaacatccccgccgtgatcgccctgaccgaccccgagggctgcccactgagccggtttaaggatagcctgggaaacccaacccacatcctgagaatcggcgagagctataaggagaagcagcggaccatccaggccaagaaggaggtggagcagcggagagccggcggctacagccggaagtacgccagcaaagccaagaatctggcagacgatatggtgagaaacaccgctagagatctgctgtactacgccgtgacccaggatgccatgctgatcttcgccaacctgagccggggcttcggccggcagggcaagcggaccttcatggccgagagacagtacacacggatggaggactggctgaccgccaagctggcctacgagggcctgagcaagacctacctgtccaagacactggcccagtacacctccaagacatgcagcaactgtgggtttaccatcaccagcgccgactacgacagggtgctggagaagctgaagaagacagcaacaggctggatgaccacaattaacggcaaggagctgaaggtggagggccagattacctactacaacagatacaagagacagaacgtagtcaaggacctgtccgtcgagctggatagactgagcgaagaatctgtgaacaacgacatctcctcctggacaaagggcagaagcggagaagctctgagcctcctgaagaaaagattctcccatagacccgtgcaggagaagttcgtgtgcctgaactgcggcttcgagacacacgcagccgagcaagccgccctgaacatcgccagatcctggctgttcctgcggagccaggagtacaagaaataccagacaaacaagacaaccggcaacaccgataagagagccttcgtcgagacctggcagtccttttaccggaagaagcttaaggaggtgtggaaacctgccgtgcggtctggcggatctggcggaggctccgccctgggcagcgtgaccttcagggacgtggccgtgttcttcagccaggacgagtggctgcacctggacagcgcccagaagaccctgtaccaggaggtgatgctggagaactacagcaccctggtgagcctgggcatccccttcagcatgcccaaggtgatctgccagctgcagcagggcgaggacccctgcatggtggagggcgaggccctgagggacccctgcctggacttcaagacctggggcggcccaagcagcggcgcccctcctcccagcggcggcagcccagccggctccccaacctctaccgaggagggcacctctgagtccgccacccccgagagcggccctggcacctccaccgagcccagcgagggcagcgcacccggcagccctgccggcagccccacctccacagaggagggaaccagcaccgagcccagcgaaggcagcgccccaggcaccagcaccgagcctagtgagcaggagattaaacggatcaacaagatcagaagaagacttgtgaaagacagcaacaccaagaaggccggcaagacaggccccatgaaaaccctgctggttagagtgatgacacccgatctgagagagcggctggaaaacctgagaaagaagcctgaaaatatcccccagcccatcagcaatacatctagagccaacctgaataagctgctgaccgattacaccgaaatgaagaaggcgatcctgcatgtgtactgggaagagttccagaaggaccctgtgggcctgatgagccgggtggcccagcctgccagcaagaagatcgatcagaacaagctgaaacctgagatggacgagaagggcaacctgaccaccgccggctttgcctgctctcagtgtggccagcccctgttcgtgtacaagctggagcaggtgtctgagaagggcaaggcttacaccaactacttcggacggtgcaatgtggccgagcacgaaaagctgatcctgctggcccagctgaagcccgagaaggatagcgacgaagccgtgacatatagcctgggaaagtttgggcagagggccctggatttctacagcattcatgtgaccaaggagtccacccaccccgtgaagcccctggcccagatcgccggaaacagatacgcctccggacctgtgggaaaggccctgagcgacgcatgtatgggcacaatcgcctccttcctgtctaagtaccaggacatcatcatcgaacaccagaaggtggtgaagggcaaccagaagagactggagagcctgcgggagctggccggcaaggaaaacctggaataccctagcgtgaccctgccacctcagcctcacaccaaggagggcgttgatgcctacaacgaagtgatcgcccgggtgcgaatgtgggtgaacctgaacctgtggcagaagctgaagctaagcagagatgatgccaagcctctgctgagactgaagggattcccttcctttcctctggtcgagagacaggccaacgaagtggactggtgggacatggtgtgtaacgtgaagaagctgatcaacgagaaaaaggaggatggcaaggtgttttggcagaatctggctggctacaagagacaggaagccctgagaccatacctgagcagcgaggaagatcggaagaagggaaagaaattcgctcggtaccagctgggcgacctgctgctgcacctggaaaagaagcacggcgaggactggggaaaggtgtacgacgaggcctgggagcggattgacaagaaagtggaaggcctgagcaagcacatcaagctggaagaggaacggagaagcgaggacgcccagagcaaggccgccctgaccgactggctgcgggctaaggccagcttcgtgatcgagggcctgaaggaggccgacaaggacgagttctgcagatgcgagctgaagctgcagaagtggtacggggacctgcggggaaagcccttcgccatcgaagccgagaacagcatcctggacatcagcggcttcagcaagcagtacaactgtgccttcatctggcagaaggacggcgtgaagaagctgaacctgtacctgatcatcaactacttcaagggcggcaagctgcggttcaagaagatcaaacctgaagccttcgaagccaacagattctacaccgtgatcaacaaaaagagcggcgagatcgtgcccatggaggtgaacttcaacttcgacgaccccaacctgatcatcctgcctctggcctttggcaagagacagggcagagaattcatctggaacgacctgctgtccctggaaaccggcagcctgaagctggccaacggaagagtgatcgagaagacactgtacaacagaagaacccggcaggatgagcctgccctgttcgtggccctgaccttcgagcggcgggaggtcctggactcctccaatatcaaaccaatgaacctgatcggcgtggcaagaggcgaaaacatccccgccgtgatcgccctgaccgaccccgagggctgcccactgagccggtttaaggatagcctgggaaacccaacccacatcctgagaatcggcgagagctataaggagaagcagcggaccatccaggccaagaaggaggtggagcagcggagagccggcggctacagccggaagtacgccagcaaagccaagaatctggcagacgatatggtgagaaacaccgctagagatctgctgtactacgccgtgacccaggatgccatgctgatcttcgccaacctgagccggggcttcggccggcagggcaagcggaccttcatggccgagagacagtacacacggatggaggactggctgaccgccaagctggcctacgagggcctgagcaagacctacctgtccaagacactggcccagtacacctccaagacatgcagcaactgtgggtttaccatcaccagcgccgactacgacagggtgctggagaagctgaagaagacagcaacaggctggatgaccacaattaacggcaaggagctgaaggtggagggccagattacctactacaacagatacaagagacagaacgtagtcaaggacctgtccgtcgagctggatagactgagcgaagaatctgtgaacaacgacatctcctcctggacaaagggcagaagcggagaagctctgagcctcctgaagaaaagattctcccatagacccgtgcaggagaagttcgtgtgcctgaactgcggcttcgagacacacgcagccgagcaagccgccctgaacatcgccagatcctggctgttcctgcggagccaggagtacaagaaataccagacaaacaagacaaccggcaacaccgataagagagccttcgtcgagacctggcagtccttttaccggaagaagcttaaggaggtgtggaaacctgccgtgcggtctggcggatctggcggaggctcctgccctgggcagcgtgaccttcagggacgtggccgtgttcttcagccaggacgagtggctgcacctggacagcgcccagaagaccctgtaccaggaggtgatgctggagaactacagcaccctggtgagcctgggcatccccttcagcatgcccaaggtgatctgccagctgcagcagggcgaggacccctgcatggtggagggcgaggccctgagggacccctgcctggacttcaagacctggggatctggctccggcagcggccccaagaaaaagagaaaagtctaagctgccttctgcggggcttgccttctggccatgcccttcttctctcccttgcacctgtacctcttggtctttgaataaagcctgagtaggaaggctagcaaaaaaaaaaaaaaaaaaaaaaaaaaaaaaaaaaaaaaaaaaaaaaaaaaaaaaaaaaaaaaaaaaaaaaaaaaaaaaaa

SEQ ID NO: 15630 - RNA, 9485 nt, synthetic construct
  source 1..9485: mol_type = other RNA
aggaaataagagagaaaagaagagtaagaagaaatataagagccaccatggcccctaagaagaagcgtaaagtgagccggatggaacgcctcgtctacgaggtgcggcagaagtgcagaaacatcgaggacatctgcatctcctgcggatctctgaacgtgaccctggagcacccactgttcatcggcggcatgtgccagaactgtaaaaactgttttctggagtgtgcctatcaatacgacgatgacggctaccagagctactgcaccatctgttgcggcggaagagaggtgctgatgtgtggaaataacaactgctgccggtgcttctgcgtggaatgcgtggacctgctggtgggccccggcgccgcccaggccgctattaaggaagatccttggaactgctacatgtgcggccacaagggcacatacggcctgctgagacggagagaggactggcctagcagactgcagatgttcttcgccaataaccacgaccaggagttcgacccccctaaggtgtaccctcccgtccccgccgagaagagaaagcccatccgggtcctgagcctgttcgatggcatcgccaccggtctgctggtgctgaaggacctgggcatccaggtggataggtacattgcctccgaggtgtgcgaggactccatcaccgtgggaatggtgcgtcatcagggcaagatcatgtacgtgggcgacgtgcggagcgtgacacagaagcatatccaggagtggggccctttcgacctggtgatcggcggcagcccttgcaatgacctgagcatcgtgaacccagcccggaagggcctgtacgagggaaccggcagactgttcttcgagttttacagactgctgcacgacgcccggcctaaggaaggcgacgaccggcccttcttttggctgttcgagaatgtggtggccatgggagtcagcgacaagcgggatattagccggttcctggagagcaaccccgtgatgatcgatgccaaggaagtgagcgccgcccaccgggccagatacttctggggcaatctgcctggcatgaacagacccctggccagcaccgtgaacgacaagctggagctgcaggagtgcctggagcacggccggatcgccaagttcagcaaggtgagaaccatcaccacccgaagcaacagcatcaaacaaggcaaggaccagcactttcctgtgttcatgaacgagaaggaggacatcctgtggtgtaccgagatggagagagtgttcgggttcccagtccactacacagatgtcagcaacatgtctagactggccagacagagactgctgggaagaagctggtccgtccctgtgatcagacacctgttcgcccctctgaaggagtacttcgcctgcgtgagcagcggcaacagcaacgccaacagccggggccccagcttctctagcggcctggtgccactgtccctgagagggagccacatgggccccatggagatctacaaaaccgtgagcgcctggaagcggcagcctgtgcgcgtgctgagcctgtttcggaatatcgataaagtcctgaaaagcctgggattcctggagagcggctctggctccggcggtggcaccctgaagtacgtggaggatgtgacaaacgtggtcagacgggatgtggagaagtggggccccttcgatctggtgtacggcagcacccaacccctgggcagctcttgtgaccggtgccctggctggtacatgtttcagttccaccggatcctgcagtacgccctgccgagacaggagtcccagcggccattcttttggattttcatggacaacttgctgctgaccgaggatgaccaggaaactaccactcggttcctgcagaccgaagccgtgaccctgcaggacgtgagaggccgggactaccagaacgccatgcgggtgtggtccaacatccctggactgaaaagcaagcacgcacctctgacccctaaagaagaggagtacctgcaggcccaggtgcggagcagaagcaagctggacgcccctaaggtggatctgctggtgaagaattgcctcctgcccctgagagagtacttcaagtatttcagccagaatagtctgcccctgggaggcagcggcggcggcgccctggtgacatttgaggacgtcgccgtgcggttcacccaggaggaatgggctctgctggatccttctcagaaaatcctgtaccgggacgtgatgagagagacataccggaatctgacctccgtgggcatcaactgggaatgttgggaccttgaagcctgcttcagaagcctgggaagaaacctgagagtgcaggtggtgaagagaaagtgcgagctgaccaacagcggcccctgcgccgagggcggcccaagcagcggcgcccctcctcccagcggcggcagcccagccggctccccaacctctaccgaggagggcacctctgagtccgccacccccgagagcggccctggcacctccaccgagcccagcgagggcagcgcacccggcagccctgccggcagccccacctccacagaggagggaaccagcaccgagcccagcgaaggcagcgccccaggcaccagcaccgagcctagtgagcaggagattaaacggatcaacaagatcagaagaagacttgtgaaagacagcaacaccaagaaggccggcaagacaggccccatgaaaaccctgctggttagagtgatgacacccgatctgagagagcggctggaaaacctgagaaagaagcctgaaaatatcccccagcccatcagcaatacatctagagccaacctgaataagctgctgaccgattacaccgaaatgaagaaggcgatcctgcatgtgtactgggaagagttccagaaggaccctgtgggcctgatgagccgggtggcccagcctgccagcaagaagatcgatcagaacaagctgaaacctgagatggacgagaagggcaacctgaccaccgccggctttgcctgctctcagtgtggccagcccctgttcgtgtacaagctggagcaggtgtctgagaagggcaaggcttacaccaactacttcggacggtgcaatgtggccgagcacgaaaagctgatcctgctggcccagctgaagcccgagaaggatagcgacgaagccgtgacatatagcctgggaaagtttgggcagagggccctggatttctacagcattcatgtgaccaaggagtccacccaccccgtgaagcccctggcccagatcgccggaaacagatacgcctccggacctgtgggaaaggccctgagcgacgcatgtatgggcacaatcgcctccttcctgtctaagtaccaggacatcatcatcgaacaccagaaggtggtgaagggcaaccagaagagactggagagcctgcgggagctggccggcaaggaaaacctggaataccctagcgtgaccctgccacctcagcctcacaccaaggagggcgttgatgcctacaacgaagtgatcgcccgggtgcgaatgtgggtgaacctgaacctgtggcagaagctgaagctaagcagagatgatgccaagcctctgctgagactgaagggattcccttcctttcctctggtcgagagacaggccaacgaagtggactggtgggacatggtgtgtaacgtgaagaagctgatcaacgagaaaaaggaggatggcaaggtgttttggcagaatctggctggctacaagagacaggaagccctgagaccatacctgagcagcgaggaagatcggaagaagggaaagaaattcgctcggtaccagctgggcgacctgctgctgcacctggaaaagaagcacggcgaggactggggaaaggtgtacgacgaggcctgggagcggattgacaagaaagtggaaggcctgagcaagcacatcaagctggaagaggaacggagaagcgaggacgcccagagcaaggccgccctgaccgactggctgcgggctaaggccagcttcgtgatcgagggcctgaaggaggccgacaaggacgagttctgcagatgcgagctgaagctgcagaagtggtacggggacctgcggggaaagcccttcgccatcgaagccgagaacagcatcctggacatcagcggcttcagcaagcagtacaactgtgccttcatctggcagaaggacggcgtgaagaagctgaacctgtacctgatcatcaactacttcaagggcggcaagctgcggttcaagaagatcaaacctgaagccttcgaagccaacagattctacaccgtgatcaacaaaaagagcggcgagatcgtgcccatggaggtgaacttcaacttcgacgaccccaacctgatcatcctgcctctggcctttggcaagagacagggcagagaattcatctggaacgacctgctgtccctggaaaccggcagcctgaagctggccaacggaagagtgatcgagaagacactgtacaacagaagaacccggcaggatgagcctgccctgttcgtggccctgaccttcgagcggcgggaggtcctggactcctccaatatcaaaccaatgaacctgatcggcgtggcaagaggcgaaaacatccccgccgtgatcgccctgaccgaccccgagggctgcccactgagccggtttaaggatagcctgggaaacccaacccacatcctgagaatcggcgagagctataaggagaagcagcggaccatccaggccaagaaggaggtggagcagcggagagccggcggctacagccggaagtacgccagcaaagccaagaatctggcagacgatatggtgagaaacaccgctagagatctgctgtactacgccgtgacccaggatgccatgctgatcttcgccaacctgagccggggcttcggccggcagggcaagcggaccttcatggccgagagacagtacacacggatggaggactggctgaccgccaagctggcctacgagggcctgagcaagacctacctgtccaagacactggcccagtacacctccaagacatgcagcaactgtgggtttaccatcaccagcgccgactacgacagggtgctggagaagctgaagaagacagcaacaggctggatgaccacaattaacggcaaggagctgaaggtggagggccagattacctactacaacagatacaagagacagaacgtagtcaaggacctgtccgtcgagctggatagactgagcgaagaatctgtgaacaacgacatctcctcctggacaaagggcagaagcggagaagctctgagcctcctgaagaaaagattctcccatagacccgtgcaggagaagttcgtgtgcctgaactgcggcttcgagacacacgcagccgagcaagccgccctgaacatcgccagatcctggctgttcctgcggagccaggagtacaagaaataccagacaaacaagacaaccggcaacaccgataagagagccttcgtcgagacctggcagtccttttaccggaagaagcttaaggaggtgtggaaacctgccgtgcggtctggcggatctggcggaggctccagcgagaccggcaacgccgtgacctacgacgacgtgcacatcagcttcaccagcaaggagtgggccctgctggaccccagccagaagagcctgtacaaggacgtgatgctggagatctacagccacctgaccgccatcggctacaagtgggaggcccacgacagcgaggaccacggccagaggttcaggaggcagaggaggcacaagaggagccacaccgaggtgaagacctacaagtgcagcggcggcccaagcagcggcgcccctcctcccagcggcggcagcccagccggctccccaacctctaccgaggagggcacctctgagtccgccacccccgagagcggccctggcacctccaccgagcccagcgagggcagcgcacccggcagccctgccggcagccccacctccacagaggagggaaccagcaccgagcccagcgaaggcagcgccccaggcaccagcaccgagcctagtgagcaggagattaaacggatcaacaagatcagaagaagacttgtgaaagacagcaacaccaagaaggccggcaagacaggccccatgaaaaccctgctggttagagtgatgacacccgatctgagagagcggctggaaaacctgagaaagaagcctgaaaatatcccccagcccatcagcaatacatctagagccaacctgaataagctgctgaccgattacaccgaaatgaagaaggcgatcctgcatgtgtactgggaagagttccagaaggaccctgtgggcctgatgagccgggtggcccagcctgccagcaagaagatcgatcagaacaagctgaaacctgagatggacgagaagggcaacctgaccaccgccggctttgcctgctctcagtgtggccagcccctgttcgtgtacaagctggagcaggtgtctgagaagggcaaggcttacaccaactacttcggacggtgcaatgtggccgagcacgaaaagctgatcctgctggcccagctgaagcccgagaaggatagcgacgaagccgtgacatatagcctgggaaagtttgggcagagggccctggatttctacagcattcatgtgaccaaggagtccacccaccccgtgaagcccctggcccagatcgccggaaacagatacgcctccggacctgtgggaaaggccctgagcgacgcatgtatgggcacaatcgcctccttcctgtctaagtaccaggacatcatcatcgaacaccagaaggtggtgaagggcaaccagaagagactggagagcctgcgggagctggccggcaaggaaaacctggaataccctagcgtgaccctgccacctcagcctcacaccaaggagggcgttgatgcctacaacgaagtgatcgcccgggtgcgaatgtgggtgaacctgaacctgtggcagaagctgaagctaagcagagatgatgccaagcctctgctgagactgaagggattcccttcctttcctctggtcgagagacaggccaacgaagtggactggtgggacatggtgtgtaacgtgaagaagctgatcaacgagaaaaaggaggatggcaaggtgttttggcagaatctggctggctacaagagacaggaagccctgagaccatacctgagcagcgaggaagatcggaagaagggaaagaaattcgctcggtaccagctgggcgacctgctgctgcacctggaaaagaagcacggcgaggactggggaaaggtgtacgacgaggcctgggagcggattgacaagaaagtggaaggcctgagcaagcacatcaagctggaagaggaacggagaagcgaggacgcccagagcaaggccgccctgaccgactggctgcgggctaaggccagcttcgtgatcgagggcctgaaggaggccgacaaggacgagttctgcagatgcgagctgaagctgcagaagtggtacggggacctgcggggaaagcccttcgccatcgaagccgagaacagcatcctggacatcagcggcttcagcaagcagtacaactgtgccttcatctggcagaaggacggcgtgaagaagctgaacctgtacctgatcatcaactacttcaagggcggcaagctgcggttcaagaagatcaaacctgaagccttcgaagccaacagattctacaccgtgatcaacaaaaagagcggcgagatcgtgcccatggaggtgaacttcaacttcgacgaccccaacctgatcatcctgcctctggcctttggcaagagacagggcagagaattcatctggaacgacctgctgtccctggaaaccggcagcctgaagctggccaacggaagagtgatcgagaagacactgtacaacagaagaacccggcaggatgagcctgccctgttcgtggccctgaccttcgagcggcgggaggtcctggactcctccaatatcaaaccaatgaacctgatcggcgtggcaagaggcgaaaacatccccgccgtgatcgccctgaccgaccccgagggctgcccactgagccggtttaaggatagcctgggaaacccaacccacatcctgagaatcggcgagagctataaggagaagcagcggaccatccaggccaagaaggaggtggagcagcggagagccggcggctacagccggaagtacgccagcaaagccaagaatctggcagacgatatggtgagaaacaccgctagagatctgctgtactacgccgtgacccaggatgccatgctgatcttcgccaacctgagccggggcttcggccggcagggcaagcggaccttcatggccgagagacagtacacacggatggaggactggctgaccgccaagctggcctacgagggcctgagcaagacctacctgtccaagacactggcccagtacacctccaagacatgcagcaactgtgggtttaccatcaccagcgccgactacgacagggtgctggagaagctgaagaagacagcaacaggctggatgaccacaattaacggcaaggagctgaaggtggagggccagattacctactacaacagatacaagagacagaacgtagtcaaggacctgtccgtcgagctggatagactgagcgaagaatctgtgaacaacgacatctcctcctggacaaagggcagaagcggagaagctctgagcctcctgaagaaaagattctcccatagacccgtgcaggagaagttcgtgtgcctgaactgcggcttcgagacacacgcagccgagcaagccgccctgaacatcgccagatcctggctgttcctgcggagccaggagtacaagaaataccagacaaacaagacaaccggcaacaccgataagagagccttcgtcgagacctggcagtccttttaccggaagaagcttaaggaggtgtggaaacctgccgtgcggtctggcggatctggcggaggctcctagcgagaccggcaacgccgtgacctacgacgacgtgcacatcagcttcaccagcaaggagtgggccctgctggaccccagccagaagagcctgtacaaggacgtgatgctggagatctacagccacctgaccgccatcggctacaagtgggaggcccacgacagcgaggaccacggccagaggttcaggaggcagaggaggcacaagaggagccacaccgaggtgaagacctacaagtgcagcggatctggctccggcagcggccccaagaaaaagagaaaagtctaagctgccttctgcggggcttgccttctggccatgcccttcttctctcccttgcacctgtacctcttggtctttgaataaagcctgagtaggaaggctagcaaaaaaaaaaaaaaaaaaaaaaaaaaaaaaaaaaaaaaaaaaaaaaaaaaaaaaaaaaaaaaaaaaaaaaaaaaaaaaaa

SEQ ID NO: 15631 - RNA, 9485 nt, synthetic construct
  source 1..9485: mol_type = other RNA
aggaaataagagagaaaagaagagtaagaagaaatataagagccaccatggcccctaagaagaagcgtaaagtgagccggatggaacgcctcgtctacgaggtgcggcagaagtgcagaaacatcgaggacatctgcatctcctgcggatctctgaacgtgaccctggagcacccactgttcatcggcggcatgtgccagaactgtaaaaactgttttctggagtgtgcctatcaatacgacgatgacggctaccagagctactgcaccatctgttgcggcggaagagaggtgctgatgtgtggaaataacaactgctgccggtgcttctgcgtggaatgcgtggacctgctggtgggccccggcgccgcccaggccgctattaaggaagatccttggaactgctacatgtgcggccacaagggcacatacggcctgctgagacggagagaggactggcctagcagactgcagatgttcttcgccaataaccacgaccaggagttcgacccccctaaggtgtaccctcccgtccccgccgagaagagaaagcccatccgggtcctgagcctgttcgatggcatcgccaccggtctgctggtgctgaaggacctgggcatccaggtggataggtacattgcctccgaggtgtgcgaggactccatcaccgtgggaatggtgcgtcatcagggcaagatcatgtacgtgggcgacgtgcggagcgtgacacagaagcatatccaggagtggggccctttcgacctggtgatcggcggcagcccttgcaatgacctgagcatcgtgaacccagcccggaagggcctgtacgagggaaccggcagactgttcttcgagttttacagactgctgcacgacgcccggcctaaggaaggcgacgaccggcccttcttttggctgttcgagaatgtggtggccatgggagtcagcgacaagcgggatattagccggttcctggagagcaaccccgtgatgatcgatgccaaggaagtgagcgccgcccaccgggccagatacttctggggcaatctgcctggcatgaacagacccctggccagcaccgtgaacgacaagctggagctgcaggagtgcctggagcacggccggatcgccaagttcagcaaggtgagaaccatcaccacccgaagcaacagcatcaaacaaggcaaggaccagcactttcctgtgttcatgaacgagaaggaggacatcctgtggtgtaccgagatggagagagtgttcgggttcccagtccactacacagatgtcagcaacatgtctagactggccagacagagactgctgggaagaagctggtccgtccctgtgatcagacacctgttcgcccctctgaaggagtacttcgcctgcgtgagcagcggcaacagcaacgccaacagccggggccccagcttctctagcggcctggtgccactgtccctgagagggagccacatgggccccatggagatctacaaaaccgtgagcgcctggaagcggcagcctgtgcgcgtgctgagcctgtttcggaatatcgataaagtcctgaaaagcctgggattcctggagagcggctctggctccggcggtggcaccctgaagtacgtggaggatgtgacaaacgtggtcagacgggatgtggagaagtggggccccttcgatctggtgtacggcagcacccaacccctgggcagctcttgtgaccggtgccctggctggtacatgtttcagttccaccggatcctgcagtacgccctgccgagacaggagtcccagcggccattcttttggattttcatggacaacttgctgctgaccgaggatgaccaggaaactaccactcggttcctgcagaccgaagccgtgaccctgcaggacgtgagaggccgggactaccagaacgccatgcgggtgtggtccaacatccctggactgaaaagcaagcacgcacctctgacccctaaagaagaggagtacctgcaggcccaggtgcggagcagaagcaagctggacgcccctaaggtggatctgctggtgaagaattgcctcctgcccctgagagagtacttcaagtatttcagccagaatagtctgcccctgggaggcagcggcggcggcgccctggtgacatttgaggacgtcgccgtgcggttcacccaggaggaatgggctctgctggatccttctcagaaaatcctgtaccgggacgtgatgagagagacataccggaatctgacctccgtgggcatcaactgggaatgttgggaccttgaagcctgcttcagaagcctgggaagaaacctgagagtgcaggtggtgaagagaaagtgcgagctgaccaacagcggcccctgcgccgagggcggcccaagcagcggcgcccctcctcccagcggcggcagcccagccggctccccaacctctaccgaggagggcacctctgagtccgccacccccgagagcggccctggcacctccaccgagcccagcgagggcagcgcacccggcagccctgccggcagccccacctccacagaggagggaaccagcaccgagcccagcgaaggcagcgccccaggcaccagcaccgagcctagtgagcaggagattaaacggatcaacaagatcagaagaagacttgtgaaagacagcaacaccaagaaggccggcaagacaggccccatgaaaaccctgctggttagagtgatgacacccgatctgagagagcggctggaaaacctgagaaagaagcctgaaaatatcccccagcccatcagcaatacatctagagccaacctgaataagctgctgaccgattacaccgaaatgaagaaggcgatcctgcatgtgtactgggaagagttccagaaggaccctgtgggcctgatgagccgggtggcccagcctgccagcaagaagatcgatcagaacaagctgaaacctgagatggacgagaagggcaacctgaccaccgccggctttgcctgctctcagtgtggccagcccctgttcgtgtacaagctggagcaggtgtctgagaagggcaaggcttacaccaactacttcggacggtgcaatgtggccgagcacgaaaagctgatcctgctggcccagctgaagcccgagaaggatagcgacgaagccgtgacatatagcctgggaaagtttgggcagagggccctggatttctacagcattcatgtgaccaaggagtccacccaccccgtgaagcccctggcccagatcgccggaaacagatacgcctccggacctgtgggaaaggccctgagcgacgcatgtatgggcacaatcgcctccttcctgtctaagtaccaggacatcatcatcgaacaccagaaggtggtgaagggcaaccagaagagactggagagcctgcgggagctggccggcaaggaaaacctggaataccctagcgtgaccctgccacctcagcctcacaccaaggagggcgttgatgcctacaacgaagtgatcgcccgggtgcgaatgtgggtgaacctgaacctgtggcagaagctgaagctaagcagagatgatgccaagcctctgctgagactgaagggattcccttcctttcctctggtcgagagacaggccaacgaagtggactggtgggacatggtgtgtaacgtgaagaagctgatcaacgagaaaaaggaggatggcaaggtgttttggcagaatctggctggctacaagagacaggaagccctgagaccatacctgagcagcgaggaagatcggaagaagggaaagaaattcgctcggtaccagctgggcgacctgctgctgcacctggaaaagaagcacggcgaggactggggaaaggtgtacgacgaggcctgggagcggattgacaagaaagtggaaggcctgagcaagcacatcaagctggaagaggaacggagaagcgaggacgcccagagcaaggccgccctgaccgactggctgcgggctaaggccagcttcgtgatcgagggcctgaaggaggccgacaaggacgagttctgcagatgcgagctgaagctgcagaagtggtacggggacctgcggggaaagcccttcgccatcgaagccgagaacagcatcctggacatcagcggcttcagcaagcagtacaactgtgccttcatctggcagaaggacggcgtgaagaagctgaacctgtacctgatcatcaactacttcaagggcggcaagctgcggttcaagaagatcaaacctgaagccttcgaagccaacagattctacaccgtgatcaacaaaaagagcggcgagatcgtgcccatggaggtgaacttcaacttcgacgaccccaacctgatcatcctgcctctggcctttggcaagagacagggcagagaattcatctggaacgacctgctgtccctggaaaccggcagcctgaagctggccaacggaagagtgatcgagaagacactgtacaacagaagaacccggcaggatgagcctgccctgttcgtggccctgaccttcgagcggcgggaggtcctggactcctccaatatcaaaccaatgaacctgatcggcgtggcaagaggcgaaaacatccccgccgtgatcgccctgaccgaccccgagggctgcccactgagccggtttaaggatagcctgggaaacccaacccacatcctgagaatcggcgagagctataaggagaagcagcggaccatccaggccaagaaggaggtggagcagcggagagccggcggctacagccggaagtacgccagcaaagccaagaatctggcagacgatatggtgagaaacaccgctagagatctgctgtactacgccgtgacccaggatgccatgctgatcttcgccaacctgagccggggcttcggccggcagggcaagcggaccttcatggccgagagacagtacacacggatggaggactggctgaccgccaagctggcctacgagggcctgagcaagacctacctgtccaagacactggcccagtacacctccaagacatgcagcaactgtgggtttaccatcaccagcgccgactacgacagggtgctggagaagctgaagaagacagcaacaggctggatgaccacaattaacggcaaggagctgaaggtggagggccagattacctactacaacagatacaagagacagaacgtagtcaaggacctgtccgtcgagctggatagactgagcgaagaatctgtgaacaacgacatctcctcctggacaaagggcagaagcggagaagctctgagcctcctgaagaaaagattctcccatagacccgtgcaggagaagttcgtgtgcctgaactgcggcttcgagacacacgcagccgagcaagccgccctgaacatcgccagatcctggctgttcctgcggagccaggagtacaagaaataccagacaaacaagacaaccggcaacaccgataagagagccttcgtcgagacctggcagtccttttaccggaagaagcttaaggaggtgtggaaacctgccgtgcggtctggcggatctggcggaggctccgtgtgcggcagcgtgaccttcaaggacgtggccgtggacttcagccaggaggagtgggcctgcctggacgccacccagaaggtgctgtacagggacatgatgctggagacctacagcaacctggtggccgtggtgggccactgcatcagcaagcccgacctgatcgtgctgctggagcaggagaaggagccctggatgaccgtgaaggaggagaccgacaggcccagccccgacctggaggccggcggcccaagcagcggcgcccctcctcccagcggcggcagcccagccggctccccaacctctaccgaggagggcacctctgagtccgccacccccgagagcggccctggcacctccaccgagcccagcgagggcagcgcacccggcagccctgccggcagccccacctccacagaggagggaaccagcaccgagcccagcgaaggcagcgccccaggcaccagcaccgagcctagtgagcaggagattaaacggatcaacaagatcagaagaagacttgtgaaagacagcaacaccaagaaggccggcaagacaggccccatgaaaaccctgctggttagagtgatgacacccgatctgagagagcggctggaaaacctgagaaagaagcctgaaaatatcccccagcccatcagcaatacatctagagccaacctgaataagctgctgaccgattacaccgaaatgaagaaggcgatcctgcatgtgtactgggaagagttccagaaggaccctgtgggcctgatgagccgggtggcccagcctgccagcaagaagatcgatcagaacaagctgaaacctgagatggacgagaagggcaacctgaccaccgccggctttgcctgctctcagtgtggccagcccctgttcgtgtacaagctggagcaggtgtctgagaagggcaaggcttacaccaactacttcggacggtgcaatgtggccgagcacgaaaagctgatcctgctggcccagctgaagcccgagaaggatagcgacgaagccgtgacatatagcctgggaaagtttgggcagagggccctggatttctacagcattcatgtgaccaaggagtccacccaccccgtgaagcccctggcccagatcgccggaaacagatacgcctccggacctgtgggaaaggccctgagcgacgcatgtatgggcacaatcgcctccttcctgtctaagtaccaggacatcatcatcgaacaccagaaggtggtgaagggcaaccagaagagactggagagcctgcgggagctggccggcaaggaaaacctggaataccctagcgtgaccctgccacctcagcctcacaccaaggagggcgttgatgcctacaacgaagtgatcgcccgggtgcgaatgtgggtgaacctgaacctgtggcagaagctgaagctaagcagagatgatgccaagcctctgctgagactgaagggattcccttcctttcctctggtcgagagacaggccaacgaagtggactggtgggacatggtgtgtaacgtgaagaagctgatcaacgagaaaaaggaggatggcaaggtgttttggcagaatctggctggctacaagagacaggaagccctgagaccatacctgagcagcgaggaagatcggaagaagggaaagaaattcgctcggtaccagctgggcgacctgctgctgcacctggaaaagaagcacggcgaggactggggaaaggtgtacgacgaggcctgggagcggattgacaagaaagtggaaggcctgagcaagcacatcaagctggaagaggaacggagaagcgaggacgcccagagcaaggccgccctgaccgactggctgcgggctaaggccagcttcgtgatcgagggcctgaaggaggccgacaaggacgagttctgcagatgcgagctgaagctgcagaagtggtacggggacctgcggggaaagcccttcgccatcgaagccgagaacagcatcctggacatcagcggcttcagcaagcagtacaactgtgccttcatctggcagaaggacggcgtgaagaagctgaacctgtacctgatcatcaactacttcaagggcggcaagctgcggttcaagaagatcaaacctgaagccttcgaagccaacagattctacaccgtgatcaacaaaaagagcggcgagatcgtgcccatggaggtgaacttcaacttcgacgaccccaacctgatcatcctgcctctggcctttggcaagagacagggcagagaattcatctggaacgacctgctgtccctggaaaccggcagcctgaagctggccaacggaagagtgatcgagaagacactgtacaacagaagaacccggcaggatgagcctgccctgttcgtggccctgaccttcgagcggcgggaggtcctggactcctccaatatcaaaccaatgaacctgatcggcgtggcaagaggcgaaaacatccccgccgtgatcgccctgaccgaccccgagggctgcccactgagccggtttaaggatagcctgggaaacccaacccacatcctgagaatcggcgagagctataaggagaagcagcggaccatccaggccaagaaggaggtggagcagcggagagccggcggctacagccggaagtacgccagcaaagccaagaatctggcagacgatatggtgagaaacaccgctagagatctgctgtactacgccgtgacccaggatgccatgctgatcttcgccaacctgagccggggcttcggccggcagggcaagcggaccttcatggccgagagacagtacacacggatggaggactggctgaccgccaagctggcctacgagggcctgagcaagacctacctgtccaagacactggcccagtacacctccaagacatgcagcaactgtgggtttaccatcaccagcgccgactacgacagggtgctggagaagctgaagaagacagcaacaggctggatgaccacaattaacggcaaggagctgaaggtggagggccagattacctactacaacagatacaagagacagaacgtagtcaaggacctgtccgtcgagctggatagactgagcgaagaatctgtgaacaacgacatctcctcctggacaaagggcagaagcggagaagctctgagcctcctgaagaaaagattctcccatagacccgtgcaggagaagttcgtgtgcctgaactgcggcttcgagacacacgcagccgagcaagccgccctgaacatcgccagatcctggctgttcctgcggagccaggagtacaagaaataccagacaaacaagacaaccggcaacaccgataagagagccttcgtcgagacctggcagtccttttaccggaagaagcttaaggaggtgtggaaacctgccgtgcggtctggcggatctggcggaggctcctgtgtgcggcagcgtgaccttcaaggacgtggccgtggacttcagccaggaggagtgggcctgcctggacgccacccagaaggtgctgtacagggacatgatgctggagacctacagcaacctggtggccgtggtgggccactgcatcagcaagcccgacctgatcgtgctgctggagcaggagaaggagccctggatgaccgtgaaggaggagaccgacaggcccagccccgacctggaggccggatctggctccggcagcggccccaagaaaaagagaaaagtctaagctgccttctgcggggcttgccttctggccatgcccttcttctctcccttgcacctgtacctcttggtctttgaataaagcctgagtaggaaggctagcaaaaaaaaaaaaaaaaaaaaaaaaaaaaaaaaaaaaaaaaaaaaaaaaaaaaaaaaaaaaaaaaaaaaaaaaaaaaaaaa

SEQ ID NO: 15632 - RNA, 9485 nt, synthetic construct
  source 1..9485: mol_type = other RNA
aggaaataagagagaaaagaagagtaagaagaaatataagagccaccatggcccctaagaagaagcgtaaagtgagccggatggaacgcctcgtctacgaggtgcggcagaagtgcagaaacatcgaggacatctgcatctcctgcggatctctgaacgtgaccctggagcacccactgttcatcggcggcatgtgccagaactgtaaaaactgttttctggagtgtgcctatcaatacgacgatgacggctaccagagctactgcaccatctgttgcggcggaagagaggtgctgatgtgtggaaataacaactgctgccggtgcttctgcgtggaatgcgtggacctgctggtgggccccggcgccgcccaggccgctattaaggaagatccttggaactgctacatgtgcggccacaagggcacatacggcctgctgagacggagagaggactggcctagcagactgcagatgttcttcgccaataaccacgaccaggagttcgacccccctaaggtgtaccctcccgtccccgccgagaagagaaagcccatccgggtcctgagcctgttcgatggcatcgccaccggtctgctggtgctgaaggacctgggcatccaggtggataggtacattgcctccgaggtgtgcgaggactccatcaccgtgggaatggtgcgtcatcagggcaagatcatgtacgtgggcgacgtgcggagcgtgacacagaagcatatccaggagtggggccctttcgacctggtgatcggcggcagcccttgcaatgacctgagcatcgtgaacccagcccggaagggcctgtacgagggaaccggcagactgttcttcgagttttacagactgctgcacgacgcccggcctaaggaaggcgacgaccggcccttcttttggctgttcgagaatgtggtggccatgggagtcagcgacaagcgggatattagccggttcctggagagcaaccccgtgatgatcgatgccaaggaagtgagcgccgcccaccgggccagatacttctggggcaatctgcctggcatgaacagacccctggccagcaccgtgaacgacaagctggagctgcaggagtgcctggagcacggccggatcgccaagttcagcaaggtgagaaccatcaccacccgaagcaacagcatcaaacaaggcaaggaccagcactttcctgtgttcatgaacgagaaggaggacatcctgtggtgtaccgagatggagagagtgttcgggttcccagtccactacacagatgtcagcaacatgtctagactggccagacagagactgctgggaagaagctggtccgtccctgtgatcagacacctgttcgcccctctgaaggagtacttcgcctgcgtgagcagcggcaacagcaacgccaacagccggggccccagcttctctagcggcctggtgccactgtccctgagagggagccacatgggccccatggagatctacaaaaccgtgagcgcctggaagcggcagcctgtgcgcgtgctgagcctgtttcggaatatcgataaagtcctgaaaagcctgggattcctggagagcggctctggctccggcggtggcaccctgaagtacgtggaggatgtgacaaacgtggtcagacgggatgtggagaagtggggccccttcgatctggtgtacggcagcacccaacccctgggcagctcttgtgaccggtgccctggctggtacatgtttcagttccaccggatcctgcagtacgccctgccgagacaggagtcccagcggccattcttttggattttcatggacaacttgctgctgaccgaggatgaccaggaaactaccactcggttcctgcagaccgaagccgtgaccctgcaggacgtgagaggccgggactaccagaacgccatgcgggtgtggtccaacatccctggactgaaaagcaagcacgcacctctgacccctaaagaagaggagtacctgcaggcccaggtgcggagcagaagcaagctggacgcccctaaggtggatctgctggtgaagaattgcctcctgcccctgagagagtacttcaagtatttcagccagaatagtctgcccctgggaggcagcggcggcggcgccctggtgacatttgaggacgtcgccgtgcggttcacccaggaggaatgggctctgctggatccttctcagaaaatcctgtaccgggacgtgatgagagagacataccggaatctgacctccgtgggcatcaactgggaatgttgggaccttgaagcctgcttcagaagcctgggaagaaacctgagagtgcaggtggtgaagagaaagtgcgagctgaccaacagcggcccctgcgccgagggcggcccaagcagcggcgcccctcctcccagcggcggcagcccagccggctccccaacctctaccgaggagggcacctctgagtccgccacccccgagagcggccctggcacctccaccgagcccagcgagggcagcgcacccggcagccctgccggcagccccacctccacagaggagggaaccagcaccgagcccagcgaaggcagcgccccaggcaccagcaccgagcctagtgagcaggagattaaacggatcaacaagatcagaagaagacttgtgaaagacagcaacaccaagaaggccggcaagacaggccccatgaaaaccctgctggttagagtgatgacacccgatctgagagagcggctggaaaacctgagaaagaagcctgaaaatatcccccagcccatcagcaatacatctagagccaacctgaataagctgctgaccgattacaccgaaatgaagaaggcgatcctgcatgtgtactgggaagagttccagaaggaccctgtgggcctgatgagccgggtggcccagcctgccagcaagaagatcgatcagaacaagctgaaacctgagatggacgagaagggcaacctgaccaccgccggctttgcctgctctcagtgtggccagcccctgttcgtgtacaagctggagcaggtgtctgagaagggcaaggcttacaccaactacttcggacggtgcaatgtggccgagcacgaaaagctgatcctgctggcccagctgaagcccgagaaggatagcgacgaagccgtgacatatagcctgggaaagtttgggcagagggccctggatttctacagcattcatgtgaccaaggagtccacccaccccgtgaagcccctggcccagatcgccggaaacagatacgcctccggacctgtgggaaaggccctgagcgacgcatgtatgggcacaatcgcctccttcctgtctaagtaccaggacatcatcatcgaacaccagaaggtggtgaagggcaaccagaagagactggagagcctgcgggagctggccggcaaggaaaacctggaataccctagcgtgaccctgccacctcagcctcacaccaaggagggcgttgatgcctacaacgaagtgatcgcccgggtgcgaatgtgggtgaacctgaacctgtggcagaagctgaagctaagcagagatgatgccaagcctctgctgagactgaagggattcccttcctttcctctggtcgagagacaggccaacgaagtggactggtgggacatggtgtgtaacgtgaagaagctgatcaacgagaaaaaggaggatggcaaggtgttttggcagaatctggctggctacaagagacaggaagccctgagaccatacctgagcagcgaggaagatcggaagaagggaaagaaattcgctcggtaccagctgggcgacctgctgctgcacctggaaaagaagcacggcgaggactggggaaaggtgtacgacgaggcctgggagcggattgacaagaaagtggaaggcctgagcaagcacatcaagctggaagaggaacggagaagcgaggacgcccagagcaaggccgccctgaccgactggctgcgggctaaggccagcttcgtgatcgagggcctgaaggaggccgacaaggacgagttctgcagatgcgagctgaagctgcagaagtggtacggggacctgcggggaaagcccttcgccatcgaagccgagaacagcatcctggacatcagcggcttcagcaagcagtacaactgtgccttcatctggcagaaggacggcgtgaagaagctgaacctgtacctgatcatcaactacttcaagggcggcaagctgcggttcaagaagatcaaacctgaagccttcgaagccaacagattctacaccgtgatcaacaaaaagagcggcgagatcgtgcccatggaggtgaacttcaacttcgacgaccccaacctgatcatcctgcctctggcctttggcaagagacagggcagagaattcatctggaacgacctgctgtccctggaaaccggcagcctgaagctggccaacggaagagtgatcgagaagacactgtacaacagaagaacccggcaggatgagcctgccctgttcgtggccctgaccttcgagcggcgggaggtcctggactcctccaatatcaaaccaatgaacctgatcggcgtggcaagaggcgaaaacatccccgccgtgatcgccctgaccgaccccgagggctgcccactgagccggtttaaggatagcctgggaaacccaacccacatcctgagaatcggcgagagctataaggagaagcagcggaccatccaggccaagaaggaggtggagcagcggagagccggcggctacagccggaagtacgccagcaaagccaagaatctggcagacgatatggtgagaaacaccgctagagatctgctgtactacgccgtgacccaggatgccatgctgatcttcgccaacctgagccggggcttcggccggcagggcaagcggaccttcatggccgagagacagtacacacggatggaggactggctgaccgccaagctggcctacgagggcctgagcaagacctacctgtccaagacactggcccagtacacctccaagacatgcagcaactgtgggtttaccatcaccagcgccgactacgacagggtgctggagaagctgaagaagacagcaacaggctggatgaccacaattaacggcaaggagctgaaggtggagggccagattacctactacaacagatacaagagacagaacgtagtcaaggacctgtccgtcgagctggatagactgagcgaagaatctgtgaacaacgacatctcctcctggacaaagggcagaagcggagaagctctgagcctcctgaagaaaagattctcccatagacccgtgcaggagaagttcgtgtgcctgaactgcggcttcgagacacacgcagccgagcaagccgccctgaacatcgccagatcctggctgttcctgcggagccaggagtacaagaaataccagacaaacaagacaaccggcaacaccgataagagagccttcgtcgagacctggcagtccttttaccggaagaagcttaaggaggtgtggaaacctgccgtgcggtctggcggatctggcggaggctccgcccaccacctggtgatgttcagggacgtggccgtggacttcagccaggaggagtgggagtgcctgaacagctaccagaggaacctgtacagggacgtgatcctggagaactacagcaacctggtgagcgtgggctgcagcatcagcaagcccgacgtgatcaccctgctggagcagggcaaggagccctggatggtggtgagggacgagaggaggaggaggagcctggacctggagagcaggggcggcccaagcagcggcgcccctcctcccagcggcggcagcccagccggctccccaacctctaccgaggagggcacctctgagtccgccacccccgagagcggccctggcacctccaccgagcccagcgagggcagcgcacccggcagccctgccggcagccccacctccacagaggagggaaccagcaccgagcccagcgaaggcagcgccccaggcaccagcaccgagcctagtgagcaggagattaaacggatcaacaagatcagaagaagacttgtgaaagacagcaacaccaagaaggccggcaagacaggccccatgaaaaccctgctggttagagtgatgacacccgatctgagagagcggctggaaaacctgagaaagaagcctgaaaatatcccccagcccatcagcaatacatctagagccaacctgaataagctgctgaccgattacaccgaaatgaagaaggcgatcctgcatgtgtactgggaagagttccagaaggaccctgtgggcctgatgagccgggtggcccagcctgccagcaagaagatcgatcagaacaagctgaaacctgagatggacgagaagggcaacctgaccaccgccggctttgcctgctctcagtgtggccagcccctgttcgtgtacaagctggagcaggtgtctgagaagggcaaggcttacaccaactacttcggacggtgcaatgtggccgagcacgaaaagctgatcctgctggcccagctgaagcccgagaaggatagcgacgaagccgtgacatatagcctgggaaagtttgggcagagggccctggatttctacagcattcatgtgaccaaggagtccacccaccccgtgaagcccctggcccagatcgccggaaacagatacgcctccggacctgtgggaaaggccctgagcgacgcatgtatgggcacaatcgcctccttcctgtctaagtaccaggacatcatcatcgaacaccagaaggtggtgaagggcaaccagaagagactggagagcctgcgggagctggccggcaaggaaaacctggaataccctagcgtgaccctgccacctcagcctcacaccaaggagggcgttgatgcctacaacgaagtgatcgcccgggtgcgaatgtgggtgaacctgaacctgtggcagaagctgaagctaagcagagatgatgccaagcctctgctgagactgaagggattcccttcctttcctctggtcgagagacaggccaacgaagtggactggtgggacatggtgtgtaacgtgaagaagctgatcaacgagaaaaaggaggatggcaaggtgttttggcagaatctggctggctacaagagacaggaagccctgagaccatacctgagcagcgaggaagatcggaagaagggaaagaaattcgctcggtaccagctgggcgacctgctgctgcacctggaaaagaagcacggcgaggactggggaaaggtgtacgacgaggcctgggagcggattgacaagaaagtggaaggcctgagcaagcacatcaagctggaagaggaacggagaagcgaggacgcccagagcaaggccgccctgaccgactggctgcgggctaaggccagcttcgtgatcgagggcctgaaggaggccgacaaggacgagttctgcagatgcgagctgaagctgcagaagtggtacggggacctgcggggaaagcccttcgccatcgaagccgagaacagcatcctggacatcagcggcttcagcaagcagtacaactgtgccttcatctggcagaaggacggcgtgaagaagctgaacctgtacctgatcatcaactacttcaagggcggcaagctgcggttcaagaagatcaaacctgaagccttcgaagccaacagattctacaccgtgatcaacaaaaagagcggcgagatcgtgcccatggaggtgaacttcaacttcgacgaccccaacctgatcatcctgcctctggcctttggcaagagacagggcagagaattcatctggaacgacctgctgtccctggaaaccggcagcctgaagctggccaacggaagagtgatcgagaagacactgtacaacagaagaacccggcaggatgagcctgccctgttcgtggccctgaccttcgagcggcgggaggtcctggactcctccaatatcaaaccaatgaacctgatcggcgtggcaagaggcgaaaacatccccgccgtgatcgccctgaccgaccccgagggctgcccactgagccggtttaaggatagcctgggaaacccaacccacatcctgagaatcggcgagagctataaggagaagcagcggaccatccaggccaagaaggaggtggagcagcggagagccggcggctacagccggaagtacgccagcaaagccaagaatctggcagacgatatggtgagaaacaccgctagagatctgctgtactacgccgtgacccaggatgccatgctgatcttcgccaacctgagccggggcttcggccggcagggcaagcggaccttcatggccgagagacagtacacacggatggaggactggctgaccgccaagctggcctacgagggcctgagcaagacctacctgtccaagacactggcccagtacacctccaagacatgcagcaactgtgggtttaccatcaccagcgccgactacgacagggtgctggagaagctgaagaagacagcaacaggctggatgaccacaattaacggcaaggagctgaaggtggagggccagattacctactacaacagatacaagagacagaacgtagtcaaggacctgtccgtcgagctggatagactgagcgaagaatctgtgaacaacgacatctcctcctggacaaagggcagaagcggagaagctctgagcctcctgaagaaaagattctcccatagacccgtgcaggagaagttcgtgtgcctgaactgcggcttcgagacacacgcagccgagcaagccgccctgaacatcgccagatcctggctgttcctgcggagccaggagtacaagaaataccagacaaacaagacaaccggcaacaccgataagagagccttcgtcgagacctggcagtccttttaccggaagaagcttaaggaggtgtggaaacctgccgtgcggtctggcggatctggcggaggctcctgcccaccacctggtgatgttcagggacgtggccgtggacttcagccaggaggagtgggagtgcctgaacagctaccagaggaacctgtacagggacgtgatcctggagaactacagcaacctggtgagcgtgggctgcagcatcagcaagcccgacgtgatcaccctgctggagcagggcaaggagccctggatggtggtgagggacgagaggaggaggaggagcctggacctggagagcaggggatctggctccggcagcggccccaagaaaaagagaaaagtctaagctgccttctgcggggcttgccttctggccatgcccttcttctctcccttgcacctgtacctcttggtctttgaataaagcctgagtaggaaggctagcaaaaaaaaaaaaaaaaaaaaaaaaaaaaaaaaaaaaaaaaaaaaaaaaaaaaaaaaaaaaaaaaaaaaaaaaaaaaaaaa

SEQ ID NO: 15633 - RNA, 9485 nt, synthetic construct
  source 1..9485: mol_type = other RNA
aggaaataagagagaaaagaagagtaagaagaaatataagagccaccatggcccctaagaagaagcgtaaagtgagccggatggaacgcctcgtctacgaggtgcggcagaagtgcagaaacatcgaggacatctgcatctcctgcggatctctgaacgtgaccctggagcacccactgttcatcggcggcatgtgccagaactgtaaaaactgttttctggagtgtgcctatcaatacgacgatgacggctaccagagctactgcaccatctgttgcggcggaagagaggtgctgatgtgtggaaataacaactgctgccggtgcttctgcgtggaatgcgtggacctgctggtgggccccggcgccgcccaggccgctattaaggaagatccttggaactgctacatgtgcggccacaagggcacatacggcctgctgagacggagagaggactggcctagcagactgcagatgttcttcgccaataaccacgaccaggagttcgacccccctaaggtgtaccctcccgtccccgccgagaagagaaagcccatccgggtcctgagcctgttcgatggcatcgccaccggtctgctggtgctgaaggacctgggcatccaggtggataggtacattgcctccgaggtgtgcgaggactccatcaccgtgggaatggtgcgtcatcagggcaagatcatgtacgtgggcgacgtgcggagcgtgacacagaagcatatccaggagtggggccctttcgacctggtgatcggcggcagcccttgcaatgacctgagcatcgtgaacccagcccggaagggcctgtacgagggaaccggcagactgttcttcgagttttacagactgctgcacgacgcccggcctaaggaaggcgacgaccggcccttcttttggctgttcgagaatgtggtggccatgggagtcagcgacaagcgggatattagccggttcctggagagcaaccccgtgatgatcgatgccaaggaagtgagcgccgcccaccgggccagatacttctggggcaatctgcctggcatgaacagacccctggccagcaccgtgaacgacaagctggagctgcaggagtgcctggagcacggccggatcgccaagttcagcaaggtgagaaccatcaccacccgaagcaacagcatcaaacaaggcaaggaccagcactttcctgtgttcatgaacgagaaggaggacatcctgtggtgtaccgagatggagagagtgttcgggttcccagtccactacacagatgtcagcaacatgtctagactggccagacagagactgctgggaagaagctggtccgtccctgtgatcagacacctgttcgcccctctgaaggagtacttcgcctgcgtgagcagcggcaacagcaacgccaacagccggggccccagcttctctagcggcctggtgccactgtccctgagagggagccacatgggccccatggagatctacaaaaccgtgagcgcctggaagcggcagcctgtgcgcgtgctgagcctgtttcggaatatcgataaagtcctgaaaagcctgggattcctggagagcggctctggctccggcggtggcaccctgaagtacgtggaggatgtgacaaacgtggtcagacgggatgtggagaagtggggccccttcgatctggtgtacggcagcacccaacccctgggcagctcttgtgaccggtgccctggctggtacatgtttcagttccaccggatcctgcagtacgccctgccgagacaggagtcccagcggccattcttttggattttcatggacaacttgctgctgaccgaggatgaccaggaaactaccactcggttcctgcagaccgaagccgtgaccctgcaggacgtgagaggccgggactaccagaacgccatgcgggtgtggtccaacatccctggactgaaaagcaagcacgcacctctgacccctaaagaagaggagtacctgcaggcccaggtgcggagcagaagcaagctggacgcccctaaggtggatctgctggtgaagaattgcctcctgcccctgagagagtacttcaagtatttcagccagaatagtctgcccctgggaggcagcggcggcggcgccctggtgacatttgaggacgtcgccgtgcggttcacccaggaggaatgggctctgctggatccttctcagaaaatcctgtaccgggacgtgatgagagagacataccggaatctgacctccgtgggcatcaactgggaatgttgggaccttgaagcctgcttcagaagcctgggaagaaacctgagagtgcaggtggtgaagagaaagtgcgagctgaccaacagcggcccctgcgccgagggcggcccaagcagcggcgcccctcctcccagcggcggcagcccagccggctccccaacctctaccgaggagggcacctctgagtccgccacccccgagagcggccctggcacctccaccgagcccagcgagggcagcgcacccggcagccctgccggcagccccacctccacagaggagggaaccagcaccgagcccagcgaaggcagcgccccaggcaccagcaccgagcctagtgagcaggagattaaacggatcaacaagatcagaagaagacttgtgaaagacagcaacaccaagaaggccggcaagacaggccccatgaaaaccctgctggttagagtgatgacacccgatctgagagagcggctggaaaacctgagaaagaagcctgaaaatatcccccagcccatcagcaatacatctagagccaacctgaataagctgctgaccgattacaccgaaatgaagaaggcgatcctgcatgtgtactgggaagagttccagaaggaccctgtgggcctgatgagccgggtggcccagcctgccagcaagaagatcgatcagaacaagctgaaacctgagatggacgagaagggcaacctgaccaccgccggctttgcctgctctcagtgtggccagcccctgttcgtgtacaagctggagcaggtgtctgagaagggcaaggcttacaccaactacttcggacggtgcaatgtggccgagcacgaaaagctgatcctgctggcccagctgaagcccgagaaggatagcgacgaagccgtgacatatagcctgggaaagtttgggcagagggccctggatttctacagcattcatgtgaccaaggagtccacccaccccgtgaagcccctggcccagatcgccggaaacagatacgcctccggacctgtgggaaaggccctgagcgacgcatgtatgggcacaatcgcctccttcctgtctaagtaccaggacatcatcatcgaacaccagaaggtggtgaagggcaaccagaagagactggagagcctgcgggagctggccggcaaggaaaacctggaataccctagcgtgaccctgccacctcagcctcacaccaaggagggcgttgatgcctacaacgaagtgatcgcccgggtgcgaatgtgggtgaacctgaacctgtggcagaagctgaagctaagcagagatgatgccaagcctctgctgagactgaagggattcccttcctttcctctggtcgagagacaggccaacgaagtggactggtgggacatggtgtgtaacgtgaagaagctgatcaacgagaaaaaggaggatggcaaggtgttttggcagaatctggctggctacaagagacaggaagccctgagaccatacctgagcagcgaggaagatcggaagaagggaaagaaattcgctcggtaccagctgggcgacctgctgctgcacctggaaaagaagcacggcgaggactggggaaaggtgtacgacgaggcctgggagcggattgacaagaaagtggaaggcctgagcaagcacatcaagctggaagaggaacggagaagcgaggacgcccagagcaaggccgccctgaccgactggctgcgggctaaggccagcttcgtgatcgagggcctgaaggaggccgacaaggacgagttctgcagatgcgagctgaagctgcagaagtggtacggggacctgcggggaaagcccttcgccatcgaagccgagaacagcatcctggacatcagcggcttcagcaagcagtacaactgtgccttcatctggcagaaggacggcgtgaagaagctgaacctgtacctgatcatcaactacttcaagggcggcaagctgcggttcaagaagatcaaacctgaagccttcgaagccaacagattctacaccgtgatcaacaaaaagagcggcgagatcgtgcccatggaggtgaacttcaacttcgacgaccccaacctgatcatcctgcctctggcctttggcaagagacagggcagagaattcatctggaacgacctgctgtccctggaaaccggcagcctgaagctggccaacggaagagtgatcgagaagacactgtacaacagaagaacccggcaggatgagcctgccctgttcgtggccctgaccttcgagcggcgggaggtcctggactcctccaatatcaaaccaatgaacctgatcggcgtggcaagaggcgaaaacatccccgccgtgatcgccctgaccgaccccgagggctgcccactgagccggtttaaggatagcctgggaaacccaacccacatcctgagaatcggcgagagctataaggagaagcagcggaccatccaggccaagaaggaggtggagcagcggagagccggcggctacagccggaagtacgccagcaaagccaagaatctggcagacgatatggtgagaaacaccgctagagatctgctgtactacgccgtgacccaggatgccatgctgatcttcgccaacctgagccggggcttcggccggcagggcaagcggaccttcatggccgagagacagtacacacggatggaggactggctgaccgccaagctggcctacgagggcctgagcaagacctacctgtccaagacactggcccagtacacctccaagacatgcagcaactgtgggtttaccatcaccagcgccgactacgacagggtgctggagaagctgaagaagacagcaacaggctggatgaccacaattaacggcaaggagctgaaggtggagggccagattacctactacaacagatacaagagacagaacgtagtcaaggacctgtccgtcgagctggatagactgagcgaagaatctgtgaacaacgacatctcctcctggacaaagggcagaagcggagaagctctgagcctcctgaagaaaagattctcccatagacccgtgcaggagaagttcgtgtgcctgaactgcggcttcgagacacacgcagccgagcaagccgccctgaacatcgccagatcctggctgttcctgcggagccaggagtacaagaaataccagacaaacaagacaaccggcaacaccgataagagagccttcgtcgagacctggcagtccttttaccggaagaagcttaaggaggtgtggaaacctgccgtgcggtctggcggatctggcggaggctccttccagggcagcctgagcttcgaggacgtgaccgtgggcttcagccaggaggagtggcagcacctggaccccgcccagaggaccctgtacagggacgtgatgctggagaactacagccacctggtggccgtgggctgctgcgtgcccaagcccgacgtgatcttcaggctggagcagggccagcagccctggctggtggaggaggagagcctggaccagatctggcccgaggtgtgcagggtgggcggcccaagcagcggcgcccctcctcccagcggcggcagcccagccggctccccaacctctaccgaggagggcacctctgagtccgccacccccgagagcggccctggcacctccaccgagcccagcgagggcagcgcacccggcagccctgccggcagccccacctccacagaggagggaaccagcaccgagcccagcgaaggcagcgccccaggcaccagcaccgagcctagtgagcaggagattaaacggatcaacaagatcagaagaagacttgtgaaagacagcaacaccaagaaggccggcaagacaggccccatgaaaaccctgctggttagagtgatgacacccgatctgagagagcggctggaaaacctgagaaagaagcctgaaaatatcccccagcccatcagcaatacatctagagccaacctgaataagctgctgaccgattacaccgaaatgaagaaggcgatcctgcatgtgtactgggaagagttccagaaggaccctgtgggcctgatgagccgggtggcccagcctgccagcaagaagatcgatcagaacaagctgaaacctgagatggacgagaagggcaacctgaccaccgccggctttgcctgctctcagtgtggccagcccctgttcgtgtacaagctggagcaggtgtctgagaagggcaaggcttacaccaactacttcggacggtgcaatgtggccgagcacgaaaagctgatcctgctggcccagctgaagcccgagaaggatagcgacgaagccgtgacatatagcctgggaaagtttgggcagagggccctggatttctacagcattcatgtgaccaaggagtccacccaccccgtgaagcccctggcccagatcgccggaaacagatacgcctccggacctgtgggaaaggccctgagcgacgcatgtatgggcacaatcgcctccttcctgtctaagtaccaggacatcatcatcgaacaccagaaggtggtgaagggcaaccagaagagactggagagcctgcgggagctggccggcaaggaaaacctggaataccctagcgtgaccctgccacctcagcctcacaccaaggagggcgttgatgcctacaacgaagtgatcgcccgggtgcgaatgtgggtgaacctgaacctgtggcagaagctgaagctaagcagagatgatgccaagcctctgctgagactgaagggattcccttcctttcctctggtcgagagacaggccaacgaagtggactggtgggacatggtgtgtaacgtgaagaagctgatcaacgagaaaaaggaggatggcaaggtgttttggcagaatctggctggctacaagagacaggaagccctgagaccatacctgagcagcgaggaagatcggaagaagggaaagaaattcgctcggtaccagctgggcgacctgctgctgcacctggaaaagaagcacggcgaggactggggaaaggtgtacgacgaggcctgggagcggattgacaagaaagtggaaggcctgagcaagcacatcaagctggaagaggaacggagaagcgaggacgcccagagcaaggccgccctgaccgactggctgcgggctaaggccagcttcgtgatcgagggcctgaaggaggccgacaaggacgagttctgcagatgcgagctgaagctgcagaagtggtacggggacctgcggggaaagcccttcgccatcgaagccgagaacagcatcctggacatcagcggcttcagcaagcagtacaactgtgccttcatctggcagaaggacggcgtgaagaagctgaacctgtacctgatcatcaactacttcaagggcggcaagctgcggttcaagaagatcaaacctgaagccttcgaagccaacagattctacaccgtgatcaacaaaaagagcggcgagatcgtgcccatggaggtgaacttcaacttcgacgaccccaacctgatcatcctgcctctggcctttggcaagagacagggcagagaattcatctggaacgacctgctgtccctggaaaccggcagcctgaagctggccaacggaagagtgatcgagaagacactgtacaacagaagaacccggcaggatgagcctgccctgttcgtggccctgaccttcgagcggcgggaggtcctggactcctccaatatcaaaccaatgaacctgatcggcgtggcaagaggcgaaaacatccccgccgtgatcgccctgaccgaccccgagggctgcccactgagccggtttaaggatagcctgggaaacccaacccacatcctgagaatcggcgagagctataaggagaagcagcggaccatccaggccaagaaggaggtggagcagcggagagccggcggctacagccggaagtacgccagcaaagccaagaatctggcagacgatatggtgagaaacaccgctagagatctgctgtactacgccgtgacccaggatgccatgctgatcttcgccaacctgagccggggcttcggccggcagggcaagcggaccttcatggccgagagacagtacacacggatggaggactggctgaccgccaagctggcctacgagggcctgagcaagacctacctgtccaagacactggcccagtacacctccaagacatgcagcaactgtgggtttaccatcaccagcgccgactacgacagggtgctggagaagctgaagaagacagcaacaggctggatgaccacaattaacggcaaggagctgaaggtggagggccagattacctactacaacagatacaagagacagaacgtagtcaaggacctgtccgtcgagctggatagactgagcgaagaatctgtgaacaacgacatctcctcctggacaaagggcagaagcggagaagctctgagcctcctgaagaaaagattctcccatagacccgtgcaggagaagttcgtgtgcctgaactgcggcttcgagacacacgcagccgagcaagccgccctgaacatcgccagatcctggctgttcctgcggagccaggagtacaagaaataccagacaaacaagacaaccggcaacaccgataagagagccttcgtcgagacctggcagtccttttaccggaagaagcttaaggaggtgtggaaacctgccgtgcggtctggcggatctggcggaggctcctttccagggcagcctgagcttcgaggacgtgaccgtgggcttcagccaggaggagtggcagcacctggaccccgcccagaggaccctgtacagggacgtgatgctggagaactacagccacctggtggccgtgggctgctgcgtgcccaagcccgacgtgatcttcaggctggagcagggccagcagccctggctggtggaggaggagagcctggaccagatctggcccgaggtgtgcagggtgggatctggctccggcagcggccccaagaaaaagagaaaagtctaagctgccttctgcggggcttgccttctggccatgcccttcttctctcccttgcacctgtacctcttggtctttgaataaagcctgagtaggaaggctagcaaaaaaaaaaaaaaaaaaaaaaaaaaaaaaaaaaaaaaaaaaaaaaaaaaaaaaaaaaaaaaaaaaaaaaaaaaaaaaaa

SEQ ID NO: 15634 - RNA, 9485 nt, synthetic construct
  source 1..9485: mol_type = other RNA
aggaaataagagagaaaagaagagtaagaagaaatataagagccaccatggcccctaagaagaagcgtaaagtgagccggatggaacgcctcgtctacgaggtgcggcagaagtgcagaaacatcgaggacatctgcatctcctgcggatctctgaacgtgaccctggagcacccactgttcatcggcggcatgtgccagaactgtaaaaactgttttctggagtgtgcctatcaatacgacgatgacggctaccagagctactgcaccatctgttgcggcggaagagaggtgctgatgtgtggaaataacaactgctgccggtgcttctgcgtggaatgcgtggacctgctggtgggccccggcgccgcccaggccgctattaaggaagatccttggaactgctacatgtgcggccacaagggcacatacggcctgctgagacggagagaggactggcctagcagactgcagatgttcttcgccaataaccacgaccaggagttcgacccccctaaggtgtaccctcccgtccccgccgagaagagaaagcccatccgggtcctgagcctgttcgatggcatcgccaccggtctgctggtgctgaaggacctgggcatccaggtggataggtacattgcctccgaggtgtgcgaggactccatcaccgtgggaatggtgcgtcatcagggcaagatcatgtacgtgggcgacgtgcggagcgtgacacagaagcatatccaggagtggggccctttcgacctggtgatcggcggcagcccttgcaatgacctgagcatcgtgaacccagcccggaagggcctgtacgagggaaccggcagactgttcttcgagttttacagactgctgcacgacgcccggcctaaggaaggcgacgaccggcccttcttttggctgttcgagaatgtggtggccatgggagtcagcgacaagcgggatattagccggttcctggagagcaaccccgtgatgatcgatgccaaggaagtgagcgccgcccaccgggccagatacttctggggcaatctgcctggcatgaacagacccctggccagcaccgtgaacgacaagctggagctgcaggagtgcctggagcacggccggatcgccaagttcagcaaggtgagaaccatcaccacccgaagcaacagcatcaaacaaggcaaggaccagcactttcctgtgttcatgaacgagaaggaggacatcctgtggtgtaccgagatggagagagtgttcgggttcccagtccactacacagatgtcagcaacatgtctagactggccagacagagactgctgggaagaagctggtccgtccctgtgatcagacacctgttcgcccctctgaaggagtacttcgcctgcgtgagcagcggcaacagcaacgccaacagccggggccccagcttctctagcggcctggtgccactgtccctgagagggagccacatgggccccatggagatctacaaaaccgtgagcgcctggaagcggcagcctgtgcgcgtgctgagcctgtttcggaatatcgataaagtcctgaaaagcctgggattcctggagagcggctctggctccggcggtggcaccctgaagtacgtggaggatgtgacaaacgtggtcagacgggatgtggagaagtggggccccttcgatctggtgtacggcagcacccaacccctgggcagctcttgtgaccggtgccctggctggtacatgtttcagttccaccggatcctgcagtacgccctgccgagacaggagtcccagcggccattcttttggattttcatggacaacttgctgctgaccgaggatgaccaggaaactaccactcggttcctgcagaccgaagccgtgaccctgcaggacgtgagaggccgggactaccagaacgccatgcgggtgtggtccaacatccctggactgaaaagcaagcacgcacctctgacccctaaagaagaggagtacctgcaggcccaggtgcggagcagaagcaagctggacgcccctaaggtggatctgctggtgaagaattgcctcctgcccctgagagagtacttcaagtatttcagccagaatagtctgcccctgggaggcagcggcggcggcgccctggtgacatttgaggacgtcgccgtgcggttcacccaggaggaatgggctctgctggatccttctcagaaaatcctgtaccgggacgtgatgagagagacataccggaatctgacctccgtgggcatcaactgggaatgttgggaccttgaagcctgcttcagaagcctgggaagaaacctgagagtgcaggtggtgaagagaaagtgcgagctgaccaacagcggcccctgcgccgagggcggcccaagcagcggcgcccctcctcccagcggcggcagcccagccggctccccaacctctaccgaggagggcacctctgagtccgccacccccgagagcggccctggcacctccaccgagcccagcgagggcagcgcacccggcagccctgccggcagccccacctccacagaggagggaaccagcaccgagcccagcgaaggcagcgccccaggcaccagcaccgagcctagtgagcaggagattaaacggatcaacaagatcagaagaagacttgtgaaagacagcaacaccaagaaggccggcaagacaggccccatgaaaaccctgctggttagagtgatgacacccgatctgagagagcggctggaaaacctgagaaagaagcctgaaaatatcccccagcccatcagcaatacatctagagccaacctgaataagctgctgaccgattacaccgaaatgaagaaggcgatcctgcatgtgtactgggaagagttccagaaggaccctgtgggcctgatgagccgggtggcccagcctgccagcaagaagatcgatcagaacaagctgaaacctgagatggacgagaagggcaacctgaccaccgccggctttgcctgctctcagtgtggccagcccctgttcgtgtacaagctggagcaggtgtctgagaagggcaaggcttacaccaactacttcggacggtgcaatgtggccgagcacgaaaagctgatcctgctggcccagctgaagcccgagaaggatagcgacgaagccgtgacatatagcctgggaaagtttgggcagagggccctggatttctacagcattcatgtgaccaaggagtccacccaccccgtgaagcccctggcccagatcgccggaaacagatacgcctccggacctgtgggaaaggccctgagcgacgcatgtatgggcacaatcgcctccttcctgtctaagtaccaggacatcatcatcgaacaccagaaggtggtgaagggcaaccagaagagactggagagcctgcgggagctggccggcaaggaaaacctggaataccctagcgtgaccctgccacctcagcctcacaccaaggagggcgttgatgcctacaacgaagtgatcgcccgggtgcgaatgtgggtgaacctgaacctgtggcagaagctgaagctaagcagagatgatgccaagcctctgctgagactgaagggattcccttcctttcctctggtcgagagacaggccaacgaagtggactggtgggacatggtgtgtaacgtgaagaagctgatcaacgagaaaaaggaggatggcaaggtgttttggcagaatctggctggctacaagagacaggaagccctgagaccatacctgagcagcgaggaagatcggaagaagggaaagaaattcgctcggtaccagctgggcgacctgctgctgcacctggaaaagaagcacggcgaggactggggaaaggtgtacgacgaggcctgggagcggattgacaagaaagtggaaggcctgagcaagcacatcaagctggaagaggaacggagaagcgaggacgcccagagcaaggccgccctgaccgactggctgcgggctaaggccagcttcgtgatcgagggcctgaaggaggccgacaaggacgagttctgcagatgcgagctgaagctgcagaagtggtacggggacctgcggggaaagcccttcgccatcgaagccgagaacagcatcctggacatcagcggcttcagcaagcagtacaactgtgccttcatctggcagaaggacggcgtgaagaagctgaacctgtacctgatcatcaactacttcaagggcggcaagctgcggttcaagaagatcaaacctgaagccttcgaagccaacagattctacaccgtgatcaacaaaaagagcggcgagatcgtgcccatggaggtgaacttcaacttcgacgaccccaacctgatcatcctgcctctggcctttggcaagagacagggcagagaattcatctggaacgacctgctgtccctggaaaccggcagcctgaagctggccaacggaagagtgatcgagaagacactgtacaacagaagaacccggcaggatgagcctgccctgttcgtggccctgaccttcgagcggcgggaggtcctggactcctccaatatcaaaccaatgaacctgatcggcgtggcaagaggcgaaaacatccccgccgtgatcgccctgaccgaccccgagggctgcccactgagccggtttaaggatagcctgggaaacccaacccacatcctgagaatcggcgagagctataaggagaagcagcggaccatccaggccaagaaggaggtggagcagcggagagccggcggctacagccggaagtacgccagcaaagccaagaatctggcagacgatatggtgagaaacaccgctagagatctgctgtactacgccgtgacccaggatgccatgctgatcttcgccaacctgagccggggcttcggccggcagggcaagcggaccttcatggccgagagacagtacacacggatggaggactggctgaccgccaagctggcctacgagggcctgagcaagacctacctgtccaagacactggcccagtacacctccaagacatgcagcaactgtgggtttaccatcaccagcgccgactacgacagggtgctggagaagctgaagaagacagcaacaggctggatgaccacaattaacggcaaggagctgaaggtggagggccagattacctactacaacagatacaagagacagaacgtagtcaaggacctgtccgtcgagctggatagactgagcgaagaatctgtgaacaacgacatctcctcctggacaaagggcagaagcggagaagctctgagcctcctgaagaaaagattctcccatagacccgtgcaggagaagttcgtgtgcctgaactgcggcttcgagacacacgcagccgagcaagccgccctgaacatcgccagatcctggctgttcctgcggagccaggagtacaagaaataccagacaaacaagacaaccggcaacaccgataagagagccttcgtcgagacctggcagtccttttaccggaagaagcttaaggaggtgtggaaacctgccgtgcggtctggcggatctggcggaggctccgcccaggagagcgtgaccttcgaggacgtggccgtgaacttcaccaacagggagtggcagagcctgacctacgcccagaggcacctgtacaagcacgtgatgctggagaactacggcaacatggtgagcctgggcttccccttccccaagccccccctgatcagccacctggagaggggcgtggagccctgcgtgcaggacccccaggacagggagagcctgagctgcagctaccccgtgagcggcggcccaagcagcggcgcccctcctcccagcggcggcagcccagccggctccccaacctctaccgaggagggcacctctgagtccgccacccccgagagcggccctggcacctccaccgagcccagcgagggcagcgcacccggcagccctgccggcagccccacctccacagaggagggaaccagcaccgagcccagcgaaggcagcgccccaggcaccagcaccgagcctagtgagcaggagattaaacggatcaacaagatcagaagaagacttgtgaaagacagcaacaccaagaaggccggcaagacaggccccatgaaaaccctgctggttagagtgatgacacccgatctgagagagcggctggaaaacctgagaaagaagcctgaaaatatcccccagcccatcagcaatacatctagagccaacctgaataagctgctgaccgattacaccgaaatgaagaaggcgatcctgcatgtgtactgggaagagttccagaaggaccctgtgggcctgatgagccgggtggcccagcctgccagcaagaagatcgatcagaacaagctgaaacctgagatggacgagaagggcaacctgaccaccgccggctttgcctgctctcagtgtggccagcccctgttcgtgtacaagctggagcaggtgtctgagaagggcaaggcttacaccaactacttcggacggtgcaatgtggccgagcacgaaaagctgatcctgctggcccagctgaagcccgagaaggatagcgacgaagccgtgacatatagcctgggaaagtttgggcagagggccctggatttctacagcattcatgtgaccaaggagtccacccaccccgtgaagcccctggcccagatcgccggaaacagatacgcctccggacctgtgggaaaggccctgagcgacgcatgtatgggcacaatcgcctccttcctgtctaagtaccaggacatcatcatcgaacaccagaaggtggtgaagggcaaccagaagagactggagagcctgcgggagctggccggcaaggaaaacctggaataccctagcgtgaccctgccacctcagcctcacaccaaggagggcgttgatgcctacaacgaagtgatcgcccgggtgcgaatgtgggtgaacctgaacctgtggcagaagctgaagctaagcagagatgatgccaagcctctgctgagactgaagggattcccttcctttcctctggtcgagagacaggccaacgaagtggactggtgggacatggtgtgtaacgtgaagaagctgatcaacgagaaaaaggaggatggcaaggtgttttggcagaatctggctggctacaagagacaggaagccctgagaccatacctgagcagcgaggaagatcggaagaagggaaagaaattcgctcggtaccagctgggcgacctgctgctgcacctggaaaagaagcacggcgaggactggggaaaggtgtacgacgaggcctgggagcggattgacaagaaagtggaaggcctgagcaagcacatcaagctggaagaggaacggagaagcgaggacgcccagagcaaggccgccctgaccgactggctgcgggctaaggccagcttcgtgatcgagggcctgaaggaggccgacaaggacgagttctgcagatgcgagctgaagctgcagaagtggtacggggacctgcggggaaagcccttcgccatcgaagccgagaacagcatcctggacatcagcggcttcagcaagcagtacaactgtgccttcatctggcagaaggacggcgtgaagaagctgaacctgtacctgatcatcaactacttcaagggcggcaagctgcggttcaagaagatcaaacctgaagccttcgaagccaacagattctacaccgtgatcaacaaaaagagcggcgagatcgtgcccatggaggtgaacttcaacttcgacgaccccaacctgatcatcctgcctctggcctttggcaagagacagggcagagaattcatctggaacgacctgctgtccctggaaaccggcagcctgaagctggccaacggaagagtgatcgagaagacactgtacaacagaagaacccggcaggatgagcctgccctgttcgtggccctgaccttcgagcggcgggaggtcctggactcctccaatatcaaaccaatgaacctgatcggcgtggcaagaggcgaaaacatccccgccgtgatcgccctgaccgaccccgagggctgcccactgagccggtttaaggatagcctgggaaacccaacccacatcctgagaatcggcgagagctataaggagaagcagcggaccatccaggccaagaaggaggtggagcagcggagagccggcggctacagccggaagtacgccagcaaagccaagaatctggcagacgatatggtgagaaacaccgctagagatctgctgtactacgccgtgacccaggatgccatgctgatcttcgccaacctgagccggggcttcggccggcagggcaagcggaccttcatggccgagagacagtacacacggatggaggactggctgaccgccaagctggcctacgagggcctgagcaagacctacctgtccaagacactggcccagtacacctccaagacatgcagcaactgtgggtttaccatcaccagcgccgactacgacagggtgctggagaagctgaagaagacagcaacaggctggatgaccacaattaacggcaaggagctgaaggtggagggccagattacctactacaacagatacaagagacagaacgtagtcaaggacctgtccgtcgagctggatagactgagcgaagaatctgtgaacaacgacatctcctcctggacaaagggcagaagcggagaagctctgagcctcctgaagaaaagattctcccatagacccgtgcaggagaagttcgtgtgcctgaactgcggcttcgagacacacgcagccgagcaagccgccctgaacatcgccagatcctggctgttcctgcggagccaggagtacaagaaataccagacaaacaagacaaccggcaacaccgataagagagccttcgtcgagacctggcagtccttttaccggaagaagcttaaggaggtgtggaaacctgccgtgcggtctggcggatctggcggaggctcctgcccaggagagcgtgaccttcgaggacgtggccgtgaacttcaccaacagggagtggcagagcctgacctacgcccagaggcacctgtacaagcacgtgatgctggagaactacggcaacatggtgagcctgggcttccccttccccaagccccccctgatcagccacctggagaggggcgtggagccctgcgtgcaggacccccaggacagggagagcctgagctgcagctaccccgtgagcggatctggctccggcagcggccccaagaaaaagagaaaagtctaagctgccttctgcggggcttgccttctggccatgcccttcttctctcccttgcacctgtacctcttggtctttgaataaagcctgagtaggaaggctagcaaaaaaaaaaaaaaaaaaaaaaaaaaaaaaaaaaaaaaaaaaaaaaaaaaaaaaaaaaaaaaaaaaaaaaaaaaaaaaaa

SEQ ID NO: 15635 - RNA, 9485 nt, synthetic construct
  source 1..9485: mol_type = other RNA
aggaaataagagagaaaagaagagtaagaagaaatataagagccaccatggcccctaagaagaagcgtaaagtgagccggatggaacgcctcgtctacgaggtgcggcagaagtgcagaaacatcgaggacatctgcatctcctgcggatctctgaacgtgaccctggagcacccactgttcatcggcggcatgtgccagaactgtaaaaactgttttctggagtgtgcctatcaatacgacgatgacggctaccagagctactgcaccatctgttgcggcggaagagaggtgctgatgtgtggaaataacaactgctgccggtgcttctgcgtggaatgcgtggacctgctggtgggccccggcgccgcccaggccgctattaaggaagatccttggaactgctacatgtgcggccacaagggcacatacggcctgctgagacggagagaggactggcctagcagactgcagatgttcttcgccaataaccacgaccaggagttcgacccccctaaggtgtaccctcccgtccccgccgagaagagaaagcccatccgggtcctgagcctgttcgatggcatcgccaccggtctgctggtgctgaaggacctgggcatccaggtggataggtacattgcctccgaggtgtgcgaggactccatcaccgtgggaatggtgcgtcatcagggcaagatcatgtacgtgggcgacgtgcggagcgtgacacagaagcatatccaggagtggggccctttcgacctggtgatcggcggcagcccttgcaatgacctgagcatcgtgaacccagcccggaagggcctgtacgagggaaccggcagactgttcttcgagttttacagactgctgcacgacgcccggcctaaggaaggcgacgaccggcccttcttttggctgttcgagaatgtggtggccatgggagtcagcgacaagcgggatattagccggttcctggagagcaaccccgtgatgatcgatgccaaggaagtgagcgccgcccaccgggccagatacttctggggcaatctgcctggcatgaacagacccctggccagcaccgtgaacgacaagctggagctgcaggagtgcctggagcacggccggatcgccaagttcagcaaggtgagaaccatcaccacccgaagcaacagcatcaaacaaggcaaggaccagcactttcctgtgttcatgaacgagaaggaggacatcctgtggtgtaccgagatggagagagtgttcgggttcccagtccactacacagatgtcagcaacatgtctagactggccagacagagactgctgggaagaagctggtccgtccctgtgatcagacacctgttcgcccctctgaaggagtacttcgcctgcgtgagcagcggcaacagcaacgccaacagccggggccccagcttctctagcggcctggtgccactgtccctgagagggagccacatgggccccatggagatctacaaaaccgtgagcgcctggaagcggcagcctgtgcgcgtgctgagcctgtttcggaatatcgataaagtcctgaaaagcctgggattcctggagagcggctctggctccggcggtggcaccctgaagtacgtggaggatgtgacaaacgtggtcagacgggatgtggagaagtggggccccttcgatctggtgtacggcagcacccaacccctgggcagctcttgtgaccggtgccctggctggtacatgtttcagttccaccggatcctgcagtacgccctgccgagacaggagtcccagcggccattcttttggattttcatggacaacttgctgctgaccgaggatgaccaggaaactaccactcggttcctgcagaccgaagccgtgaccctgcaggacgtgagaggccgggactaccagaacgccatgcgggtgtggtccaacatccctggactgaaaagcaagcacgcacctctgacccctaaagaagaggagtacctgcaggcccaggtgcggagcagaagcaagctggacgcccctaaggtggatctgctggtgaagaattgcctcctgcccctgagagagtacttcaagtatttcagccagaatagtctgcccctgggaggcagcggcggcggcgccctggtgacatttgaggacgtcgccgtgcggttcacccaggaggaatgggctctgctggatccttctcagaaaatcctgtaccgggacgtgatgagagagacataccggaatctgacctccgtgggcatcaactgggaatgttgggaccttgaagcctgcttcagaagcctgggaagaaacctgagagtgcaggtggtgaagagaaagtgcgagctgaccaacagcggcccctgcgccgagggcggcccaagcagcggcgcccctcctcccagcggcggcagcccagccggctccccaacctctaccgaggagggcacctctgagtccgccacccccgagagcggccctggcacctccaccgagcccagcgagggcagcgcacccggcagccctgccggcagccccacctccacagaggagggaaccagcaccgagcccagcgaaggcagcgccccaggcaccagcaccgagcctagtgagcaggagattaaacggatcaacaagatcagaagaagacttgtgaaagacagcaacaccaagaaggccggcaagacaggccccatgaaaaccctgctggttagagtgatgacacccgatctgagagagcggctggaaaacctgagaaagaagcctgaaaatatcccccagcccatcagcaatacatctagagccaacctgaataagctgctgaccgattacaccgaaatgaagaaggcgatcctgcatgtgtactgggaagagttccagaaggaccctgtgggcctgatgagccgggtggcccagcctgccagcaagaagatcgatcagaacaagctgaaacctgagatggacgagaagggcaacctgaccaccgccggctttgcctgctctcagtgtggccagcccctgttcgtgtacaagctggagcaggtgtctgagaagggcaaggcttacaccaactacttcggacggtgcaatgtggccgagcacgaaaagctgatcctgctggcccagctgaagcccgagaaggatagcgacgaagccgtgacatatagcctgggaaagtttgggcagagggccctggatttctacagcattcatgtgaccaaggagtccacccaccccgtgaagcccctggcccagatcgccggaaacagatacgcctccggacctgtgggaaaggccctgagcgacgcatgtatgggcacaatcgcctccttcctgtctaagtaccaggacatcatcatcgaacaccagaaggtggtgaagggcaaccagaagagactggagagcctgcgggagctggccggcaaggaaaacctggaataccctagcgtgaccctgccacctcagcctcacaccaaggagggcgttgatgcctacaacgaagtgatcgcccgggtgcgaatgtgggtgaacctgaacctgtggcagaagctgaagctaagcagagatgatgccaagcctctgctgagactgaagggattcccttcctttcctctggtcgagagacaggccaacgaagtggactggtgggacatggtgtgtaacgtgaagaagctgatcaacgagaaaaaggaggatggcaaggtgttttggcagaatctggctggctacaagagacaggaagccctgagaccatacctgagcagcgaggaagatcggaagaagggaaagaaattcgctcggtaccagctgggcgacctgctgctgcacctggaaaagaagcacggcgaggactggggaaaggtgtacgacgaggcctgggagcggattgacaagaaagtggaaggcctgagcaagcacatcaagctggaagaggaacggagaagcgaggacgcccagagcaaggccgccctgaccgactggctgcgggctaaggccagcttcgtgatcgagggcctgaaggaggccgacaaggacgagttctgcagatgcgagctgaagctgcagaagtggtacggggacctgcggggaaagcccttcgccatcgaagccgagaacagcatcctggacatcagcggcttcagcaagcagtacaactgtgccttcatctggcagaaggacggcgtgaagaagctgaacctgtacctgatcatcaactacttcaagggcggcaagctgcggttcaagaagatcaaacctgaagccttcgaagccaacagattctacaccgtgatcaacaaaaagagcggcgagatcgtgcccatggaggtgaacttcaacttcgacgaccccaacctgatcatcctgcctctggcctttggcaagagacagggcagagaattcatctggaacgacctgctgtccctggaaaccggcagcctgaagctggccaacggaagagtgatcgagaagacactgtacaacagaagaacccggcaggatgagcctgccctgttcgtggccctgaccttcgagcggcgggaggtcctggactcctccaatatcaaaccaatgaacctgatcggcgtggcaagaggcgaaaacatccccgccgtgatcgccctgaccgaccccgagggctgcccactgagccggtttaaggatagcctgggaaacccaacccacatcctgagaatcggcgagagctataaggagaagcagcggaccatccaggccaagaaggaggtggagcagcggagagccggcggctacagccggaagtacgccagcaaagccaagaatctggcagacgatatggtgagaaacaccgctagagatctgctgtactacgccgtgacccaggatgccatgctgatcttcgccaacctgagccggggcttcggccggcagggcaagcggaccttcatggccgagagacagtacacacggatggaggactggctgaccgccaagctggcctacgagggcctgagcaagacctacctgtccaagacactggcccagtacacctccaagacatgcagcaactgtgggtttaccatcaccagcgccgactacgacagggtgctggagaagctgaagaagacagcaacaggctggatgaccacaattaacggcaaggagctgaaggtggagggccagattacctactacaacagatacaagagacagaacgtagtcaaggacctgtccgtcgagctggatagactgagcgaagaatctgtgaacaacgacatctcctcctggacaaagggcagaagcggagaagctctgagcctcctgaagaaaagattctcccatagacccgtgcaggagaagttcgtgtgcctgaactgcggcttcgagacacacgcagccgagcaagccgccctgaacatcgccagatcctggctgttcctgcggagccaggagtacaagaaataccagacaaacaagacaaccggcaacaccgataagagagccttcgtcgagacctggcagtccttttaccggaagaagcttaaggaggtgtggaaacctgccgtgcggtctggcggatctggcggaggctccttccaggagagcgtgaccttcaaggacgtggccgtggacttcacctgggaggagtggggctacctggacaccagccagaaggagctgtactgggaggtgatgctggagaactacaggaacctggtgagcctgggcctggccgacagcaacgtgaacatgatcagccagctggagagcggcgaggcccacggcatcagcgtggacagcgtgctgaggagctgctggcccgacggcgacaccaggggcggcccaagcagcggcgcccctcctcccagcggcggcagcccagccggctccccaacctctaccgaggagggcacctctgagtccgccacccccgagagcggccctggcacctccaccgagcccagcgagggcagcgcacccggcagccctgccggcagccccacctccacagaggagggaaccagcaccgagcccagcgaaggcagcgccccaggcaccagcaccgagcctagtgagcaggagattaaacggatcaacaagatcagaagaagacttgtgaaagacagcaacaccaagaaggccggcaagacaggccccatgaaaaccctgctggttagagtgatgacacccgatctgagagagcggctggaaaacctgagaaagaagcctgaaaatatcccccagcccatcagcaatacatctagagccaacctgaataagctgctgaccgattacaccgaaatgaagaaggcgatcctgcatgtgtactgggaagagttccagaaggaccctgtgggcctgatgagccgggtggcccagcctgccagcaagaagatcgatcagaacaagctgaaacctgagatggacgagaagggcaacctgaccaccgccggctttgcctgctctcagtgtggccagcccctgttcgtgtacaagctggagcaggtgtctgagaagggcaaggcttacaccaactacttcggacggtgcaatgtggccgagcacgaaaagctgatcctgctggcccagctgaagcccgagaaggatagcgacgaagccgtgacatatagcctgggaaagtttgggcagagggccctggatttctacagcattcatgtgaccaaggagtccacccaccccgtgaagcccctggcccagatcgccggaaacagatacgcctccggacctgtgggaaaggccctgagcgacgcatgtatgggcacaatcgcctccttcctgtctaagtaccaggacatcatcatcgaacaccagaaggtggtgaagggcaaccagaagagactggagagcctgcgggagctggccggcaaggaaaacctggaataccctagcgtgaccctgccacctcagcctcacaccaaggagggcgttgatgcctacaacgaagtgatcgcccgggtgcgaatgtgggtgaacctgaacctgtggcagaagctgaagctaagcagagatgatgccaagcctctgctgagactgaagggattcccttcctttcctctggtcgagagacaggccaacgaagtggactggtgggacatggtgtgtaacgtgaagaagctgatcaacgagaaaaaggaggatggcaaggtgttttggcagaatctggctggctacaagagacaggaagccctgagaccatacctgagcagcgaggaagatcggaagaagggaaagaaattcgctcggtaccagctgggcgacctgctgctgcacctggaaaagaagcacggcgaggactggggaaaggtgtacgacgaggcctgggagcggattgacaagaaagtggaaggcctgagcaagcacatcaagctggaagaggaacggagaagcgaggacgcccagagcaaggccgccctgaccgactggctgcgggctaaggccagcttcgtgatcgagggcctgaaggaggccgacaaggacgagttctgcagatgcgagctgaagctgcagaagtggtacggggacctgcggggaaagcccttcgccatcgaagccgagaacagcatcctggacatcagcggcttcagcaagcagtacaactgtgccttcatctggcagaaggacggcgtgaagaagctgaacctgtacctgatcatcaactacttcaagggcggcaagctgcggttcaagaagatcaaacctgaagccttcgaagccaacagattctacaccgtgatcaacaaaaagagcggcgagatcgtgcccatggaggtgaacttcaacttcgacgaccccaacctgatcatcctgcctctggcctttggcaagagacagggcagagaattcatctggaacgacctgctgtccctggaaaccggcagcctgaagctggccaacggaagagtgatcgagaagacactgtacaacagaagaacccggcaggatgagcctgccctgttcgtggccctgaccttcgagcggcgggaggtcctggactcctccaatatcaaaccaatgaacctgatcggcgtggcaagaggcgaaaacatccccgccgtgatcgccctgaccgaccccgagggctgcccactgagccggtttaaggatagcctgggaaacccaacccacatcctgagaatcggcgagagctataaggagaagcagcggaccatccaggccaagaaggaggtggagcagcggagagccggcggctacagccggaagtacgccagcaaagccaagaatctggcagacgatatggtgagaaacaccgctagagatctgctgtactacgccgtgacccaggatgccatgctgatcttcgccaacctgagccggggcttcggccggcagggcaagcggaccttcatggccgagagacagtacacacggatggaggactggctgaccgccaagctggcctacgagggcctgagcaagacctacctgtccaagacactggcccagtacacctccaagacatgcagcaactgtgggtttaccatcaccagcgccgactacgacagggtgctggagaagctgaagaagacagcaacaggctggatgaccacaattaacggcaaggagctgaaggtggagggccagattacctactacaacagatacaagagacagaacgtagtcaaggacctgtccgtcgagctggatagactgagcgaagaatctgtgaacaacgacatctcctcctggacaaagggcagaagcggagaagctctgagcctcctgaagaaaagattctcccatagacccgtgcaggagaagttcgtgtgcctgaactgcggcttcgagacacacgcagccgagcaagccgccctgaacatcgccagatcctggctgttcctgcggagccaggagtacaagaaataccagacaaacaagacaaccggcaacaccgataagagagccttcgtcgagacctggcagtccttttaccggaagaagcttaaggaggtgtggaaacctgccgtgcggtctggcggatctggcggaggctcctttccaggagagcgtgaccttcaaggacgtggccgtggacttcacctgggaggagtggggctacctggacaccagccagaaggagctgtactgggaggtgatgctggagaactacaggaacctggtgagcctgggcctggccgacagcaacgtgaacatgatcagccagctggagagcggcgaggcccacggcatcagcgtggacagcgtgctgaggagctgctggcccgacggcgacaccaggggatctggctccggcagcggccccaagaaaaagagaaaagtctaagctgccttctgcggggcttgccttctggccatgcccttcttctctcccttgcacctgtacctcttggtctttgaataaagcctgagtaggaaggctagcaaaaaaaaaaaaaaaaaaaaaaaaaaaaaaaaaaaaaaaaaaaaaaaaaaaaaaaaaaaaaaaaaaaaaaaaaaaaaaaa

SEQ ID NO: 15636 - RNA, 9485 nt, synthetic construct
  source 1..9485: mol_type = other RNA
aggaaataagagagaaaagaagagtaagaagaaatataagagccaccatggcccctaagaagaagcgtaaagtgagccggatggaacgcctcgtctacgaggtgcggcagaagtgcagaaacatcgaggacatctgcatctcctgcggatctctgaacgtgaccctggagcacccactgttcatcggcggcatgtgccagaactgtaaaaactgttttctggagtgtgcctatcaatacgacgatgacggctaccagagctactgcaccatctgttgcggcggaagagaggtgctgatgtgtggaaataacaactgctgccggtgcttctgcgtggaatgcgtggacctgctggtgggccccggcgccgcccaggccgctattaaggaagatccttggaactgctacatgtgcggccacaagggcacatacggcctgctgagacggagagaggactggcctagcagactgcagatgttcttcgccaataaccacgaccaggagttcgacccccctaaggtgtaccctcccgtccccgccgagaagagaaagcccatccgggtcctgagcctgttcgatggcatcgccaccggtctgctggtgctgaaggacctgggcatccaggtggataggtacattgcctccgaggtgtgcgaggactccatcaccgtgggaatggtgcgtcatcagggcaagatcatgtacgtgggcgacgtgcggagcgtgacacagaagcatatccaggagtggggccctttcgacctggtgatcggcggcagcccttgcaatgacctgagcatcgtgaacccagcccggaagggcctgtacgagggaaccggcagactgttcttcgagttttacagactgctgcacgacgcccggcctaaggaaggcgacgaccggcccttcttttggctgttcgagaatgtggtggccatgggagtcagcgacaagcgggatattagccggttcctggagagcaaccccgtgatgatcgatgccaaggaagtgagcgccgcccaccgggccagatacttctggggcaatctgcctggcatgaacagacccctggccagcaccgtgaacgacaagctggagctgcaggagtgcctggagcacggccggatcgccaagttcagcaaggtgagaaccatcaccacccgaagcaacagcatcaaacaaggcaaggaccagcactttcctgtgttcatgaacgagaaggaggacatcctgtggtgtaccgagatggagagagtgttcgggttcccagtccactacacagatgtcagcaacatgtctagactggccagacagagactgctgggaagaagctggtccgtccctgtgatcagacacctgttcgcccctctgaaggagtacttcgcctgcgtgagcagcggcaacagcaacgccaacagccggggccccagcttctctagcggcctggtgccactgtccctgagagggagccacatgggccccatggagatctacaaaaccgtgagcgcctggaagcggcagcctgtgcgcgtgctgagcctgtttcggaatatcgataaagtcctgaaaagcctgggattcctggagagcggctctggctccggcggtggcaccctgaagtacgtggaggatgtgacaaacgtggtcagacgggatgtggagaagtggggccccttcgatctggtgtacggcagcacccaacccctgggcagctcttgtgaccggtgccctggctggtacatgtttcagttccaccggatcctgcagtacgccctgccgagacaggagtcccagcggccattcttttggattttcatggacaacttgctgctgaccgaggatgaccaggaaactaccactcggttcctgcagaccgaagccgtgaccctgcaggacgtgagaggccgggactaccagaacgccatgcgggtgtggtccaacatccctggactgaaaagcaagcacgcacctctgacccctaaagaagaggagtacctgcaggcccaggtgcggagcagaagcaagctggacgcccctaaggtggatctgctggtgaagaattgcctcctgcccctgagagagtacttcaagtatttcagccagaatagtctgcccctgggaggcagcggcggcggcgccctggtgacatttgaggacgtcgccgtgcggttcacccaggaggaatgggctctgctggatccttctcagaaaatcctgtaccgggacgtgatgagagagacataccggaatctgacctccgtgggcatcaactgggaatgttgggaccttgaagcctgcttcagaagcctgggaagaaacctgagagtgcaggtggtgaagagaaagtgcgagctgaccaacagcggcccctgcgccgagggcggcccaagcagcggcgcccctcctcccagcggcggcagcccagccggctccccaacctctaccgaggagggcacctctgagtccgccacccccgagagcggccctggcacctccaccgagcccagcgagggcagcgcacccggcagccctgccggcagccccacctccacagaggagggaaccagcaccgagcccagcgaaggcagcgccccaggcaccagcaccgagcctagtgagcaggagattaaacggatcaacaagatcagaagaagacttgtgaaagacagcaacaccaagaaggccggcaagacaggccccatgaaaaccctgctggttagagtgatgacacccgatctgagagagcggctggaaaacctgagaaagaagcctgaaaatatcccccagcccatcagcaatacatctagagccaacctgaataagctgctgaccgattacaccgaaatgaagaaggcgatcctgcatgtgtactgggaagagttccagaaggaccctgtgggcctgatgagccgggtggcccagcctgccagcaagaagatcgatcagaacaagctgaaacctgagatggacgagaagggcaacctgaccaccgccggctttgcctgctctcagtgtggccagcccctgttcgtgtacaagctggagcaggtgtctgagaagggcaaggcttacaccaactacttcggacggtgcaatgtggccgagcacgaaaagctgatcctgctggcccagctgaagcccgagaaggatagcgacgaagccgtgacatatagcctgggaaagtttgggcagagggccctggatttctacagcattcatgtgaccaaggagtccacccaccccgtgaagcccctggcccagatcgccggaaacagatacgcctccggacctgtgggaaaggccctgagcgacgcatgtatgggcacaatcgcctccttcctgtctaagtaccaggacatcatcatcgaacaccagaaggtggtgaagggcaaccagaagagactggagagcctgcgggagctggccggcaaggaaaacctggaataccctagcgtgaccctgccacctcagcctcacaccaaggagggcgttgatgcctacaacgaagtgatcgcccgggtgcgaatgtgggtgaacctgaacctgtggcagaagctgaagctaagcagagatgatgccaagcctctgctgagactgaagggattcccttcctttcctctggtcgagagacaggccaacgaagtggactggtgggacatggtgtgtaacgtgaagaagctgatcaacgagaaaaaggaggatggcaaggtgttttggcagaatctggctggctacaagagacaggaagccctgagaccatacctgagcagcgaggaagatcggaagaagggaaagaaattcgctcggtaccagctgggcgacctgctgctgcacctggaaaagaagcacggcgaggactggggaaaggtgtacgacgaggcctgggagcggattgacaagaaagtggaaggcctgagcaagcacatcaagctggaagaggaacggagaagcgaggacgcccagagcaaggccgccctgaccgactggctgcgggctaaggccagcttcgtgatcgagggcctgaaggaggccgacaaggacgagttctgcagatgcgagctgaagctgcagaagtggtacggggacctgcggggaaagcccttcgccatcgaagccgagaacagcatcctggacatcagcggcttcagcaagcagtacaactgtgccttcatctggcagaaggacggcgtgaagaagctgaacctgtacctgatcatcaactacttcaagggcggcaagctgcggttcaagaagatcaaacctgaagccttcgaagccaacagattctacaccgtgatcaacaaaaagagcggcgagatcgtgcccatggaggtgaacttcaacttcgacgaccccaacctgatcatcctgcctctggcctttggcaagagacagggcagagaattcatctggaacgacctgctgtccctggaaaccggcagcctgaagctggccaacggaagagtgatcgagaagacactgtacaacagaagaacccggcaggatgagcctgccctgttcgtggccctgaccttcgagcggcgggaggtcctggactcctccaatatcaaaccaatgaacctgatcggcgtggcaagaggcgaaaacatccccgccgtgatcgccctgaccgaccccgagggctgcccactgagccggtttaaggatagcctgggaaacccaacccacatcctgagaatcggcgagagctataaggagaagcagcggaccatccaggccaagaaggaggtggagcagcggagagccggcggctacagccggaagtacgccagcaaagccaagaatctggcagacgatatggtgagaaacaccgctagagatctgctgtactacgccgtgacccaggatgccatgctgatcttcgccaacctgagccggggcttcggccggcagggcaagcggaccttcatggccgagagacagtacacacggatggaggactggctgaccgccaagctggcctacgagggcctgagcaagacctacctgtccaagacactggcccagtacacctccaagacatgcagcaactgtgggtttaccatcaccagcgccgactacgacagggtgctggagaagctgaagaagacagcaacaggctggatgaccacaattaacggcaaggagctgaaggtggagggccagattacctactacaacagatacaagagacagaacgtagtcaaggacctgtccgtcgagctggatagactgagcgaagaatctgtgaacaacgacatctcctcctggacaaagggcagaagcggagaagctctgagcctcctgaagaaaagattctcccatagacccgtgcaggagaagttcgtgtgcctgaactgcggcttcgagacacacgcagccgagcaagccgccctgaacatcgccagatcctggctgttcctgcggagccaggagtacaagaaataccagacaaacaagacaaccggcaacaccgataagagagccttcgtcgagacctggcagtccttttaccggaagaagcttaaggaggtgtggaaacctgccgtgcggtctggcggatctggcggaggctccatggagagcgtgagcttcgaggacgtggccgtgaagttcacccaggaggagtgggccgtgctggaccccagccagaagaagctgtacaaggacgtgatgcaggagaccctgaagaacctggccagcatcggcaacaagagcggcaagcagaaggtgatcaacgagtacggcaagctgtggaggaagctgagcagccacctggccggcaagttcagcgactacaacgagaaccaccagtgcgccggcggcccaagcagcggcgcccctcctcccagcggcggcagcccagccggctccccaacctctaccgaggagggcacctctgagtccgccacccccgagagcggccctggcacctccaccgagcccagcgagggcagcgcacccggcagccctgccggcagccccacctccacagaggagggaaccagcaccgagcccagcgaaggcagcgccccaggcaccagcaccgagcctagtgagcaggagattaaacggatcaacaagatcagaagaagacttgtgaaagacagcaacaccaagaaggccggcaagacaggccccatgaaaaccctgctggttagagtgatgacacccgatctgagagagcggctggaaaacctgagaaagaagcctgaaaatatcccccagcccatcagcaatacatctagagccaacctgaataagctgctgaccgattacaccgaaatgaagaaggcgatcctgcatgtgtactgggaagagttccagaaggaccctgtgggcctgatgagccgggtggcccagcctgccagcaagaagatcgatcagaacaagctgaaacctgagatggacgagaagggcaacctgaccaccgccggctttgcctgctctcagtgtggccagcccctgttcgtgtacaagctggagcaggtgtctgagaagggcaaggcttacaccaactacttcggacggtgcaatgtggccgagcacgaaaagctgatcctgctggcccagctgaagcccgagaaggatagcgacgaagccgtgacatatagcctgggaaagtttgggcagagggccctggatttctacagcattcatgtgaccaaggagtccacccaccccgtgaagcccctggcccagatcgccggaaacagatacgcctccggacctgtgggaaaggccctgagcgacgcatgtatgggcacaatcgcctccttcctgtctaagtaccaggacatcatcatcgaacaccagaaggtggtgaagggcaaccagaagagactggagagcctgcgggagctggccggcaaggaaaacctggaataccctagcgtgaccctgccacctcagcctcacaccaaggagggcgttgatgcctacaacgaagtgatcgcccgggtgcgaatgtgggtgaacctgaacctgtggcagaagctgaagctaagcagagatgatgccaagcctctgctgagactgaagggattcccttcctttcctctggtcgagagacaggccaacgaagtggactggtgggacatggtgtgtaacgtgaagaagctgatcaacgagaaaaaggaggatggcaaggtgttttggcagaatctggctggctacaagagacaggaagccctgagaccatacctgagcagcgaggaagatcggaagaagggaaagaaattcgctcggtaccagctgggcgacctgctgctgcacctggaaaagaagcacggcgaggactggggaaaggtgtacgacgaggcctgggagcggattgacaagaaagtggaaggcctgagcaagcacatcaagctggaagaggaacggagaagcgaggacgcccagagcaaggccgccctgaccgactggctgcgggctaaggccagcttcgtgatcgagggcctgaaggaggccgacaaggacgagttctgcagatgcgagctgaagctgcagaagtggtacggggacctgcggggaaagcccttcgccatcgaagccgagaacagcatcctggacatcagcggcttcagcaagcagtacaactgtgccttcatctggcagaaggacggcgtgaagaagctgaacctgtacctgatcatcaactacttcaagggcggcaagctgcggttcaagaagatcaaacctgaagccttcgaagccaacagattctacaccgtgatcaacaaaaagagcggcgagatcgtgcccatggaggtgaacttcaacttcgacgaccccaacctgatcatcctgcctctggcctttggcaagagacagggcagagaattcatctggaacgacctgctgtccctggaaaccggcagcctgaagctggccaacggaagagtgatcgagaagacactgtacaacagaagaacccggcaggatgagcctgccctgttcgtggccctgaccttcgagcggcgggaggtcctggactcctccaatatcaaaccaatgaacctgatcggcgtggcaagaggcgaaaacatccccgccgtgatcgccctgaccgaccccgagggctgcccactgagccggtttaaggatagcctgggaaacccaacccacatcctgagaatcggcgagagctataaggagaagcagcggaccatccaggccaagaaggaggtggagcagcggagagccggcggctacagccggaagtacgccagcaaagccaagaatctggcagacgatatggtgagaaacaccgctagagatctgctgtactacgccgtgacccaggatgccatgctgatcttcgccaacctgagccggggcttcggccggcagggcaagcggaccttcatggccgagagacagtacacacggatggaggactggctgaccgccaagctggcctacgagggcctgagcaagacctacctgtccaagacactggcccagtacacctccaagacatgcagcaactgtgggtttaccatcaccagcgccgactacgacagggtgctggagaagctgaagaagacagcaacaggctggatgaccacaattaacggcaaggagctgaaggtggagggccagattacctactacaacagatacaagagacagaacgtagtcaaggacctgtccgtcgagctggatagactgagcgaagaatctgtgaacaacgacatctcctcctggacaaagggcagaagcggagaagctctgagcctcctgaagaaaagattctcccatagacccgtgcaggagaagttcgtgtgcctgaactgcggcttcgagacacacgcagccgagcaagccgccctgaacatcgccagatcctggctgttcctgcggagccaggagtacaagaaataccagacaaacaagacaaccggcaacaccgataagagagccttcgtcgagacctggcagtccttttaccggaagaagcttaaggaggtgtggaaacctgccgtgcggtctggcggatctggcggaggctcctatggagagcgtgagcttcgaggacgtggccgtgaagttcacccaggaggagtgggccgtgctggaccccagccagaagaagctgtacaaggacgtgatgcaggagaccctgaagaacctggccagcatcggcaacaagagcggcaagcagaaggtgatcaacgagtacggcaagctgtggaggaagctgagcagccacctggccggcaagttcagcgactacaacgagaaccaccagtgcgccggatctggctccggcagcggccccaagaaaaagagaaaagtctaagctgccttctgcggggcttgccttctggccatgcccttcttctctcccttgcacctgtacctcttggtctttgaataaagcctgagtaggaaggctagcaaaaaaaaaaaaaaaaaaaaaaaaaaaaaaaaaaaaaaaaaaaaaaaaaaaaaaaaaaaaaaaaaaaaaaaaaaaaaaaa

SEQ ID NO: 15637 - RNA, 9485 nt, synthetic construct
  source 1..9485: mol_type = other RNA
aggaaataagagagaaaagaagagtaagaagaaatataagagccaccatggcccctaagaagaagcgtaaagtgagccggatggaacgcctcgtctacgaggtgcggcagaagtgcagaaacatcgaggacatctgcatctcctgcggatctctgaacgtgaccctggagcacccactgttcatcggcggcatgtgccagaactgtaaaaactgttttctggagtgtgcctatcaatacgacgatgacggctaccagagctactgcaccatctgttgcggcggaagagaggtgctgatgtgtggaaataacaactgctgccggtgcttctgcgtggaatgcgtggacctgctggtgggccccggcgccgcccaggccgctattaaggaagatccttggaactgctacatgtgcggccacaagggcacatacggcctgctgagacggagagaggactggcctagcagactgcagatgttcttcgccaataaccacgaccaggagttcgacccccctaaggtgtaccctcccgtccccgccgagaagagaaagcccatccgggtcctgagcctgttcgatggcatcgccaccggtctgctggtgctgaaggacctgggcatccaggtggataggtacattgcctccgaggtgtgcgaggactccatcaccgtgggaatggtgcgtcatcagggcaagatcatgtacgtgggcgacgtgcggagcgtgacacagaagcatatccaggagtggggccctttcgacctggtgatcggcggcagcccttgcaatgacctgagcatcgtgaacccagcccggaagggcctgtacgagggaaccggcagactgttcttcgagttttacagactgctgcacgacgcccggcctaaggaaggcgacgaccggcccttcttttggctgttcgagaatgtggtggccatgggagtcagcgacaagcgggatattagccggttcctggagagcaaccccgtgatgatcgatgccaaggaagtgagcgccgcccaccgggccagatacttctggggcaatctgcctggcatgaacagacccctggccagcaccgtgaacgacaagctggagctgcaggagtgcctggagcacggccggatcgccaagttcagcaaggtgagaaccatcaccacccgaagcaacagcatcaaacaaggcaaggaccagcactttcctgtgttcatgaacgagaaggaggacatcctgtggtgtaccgagatggagagagtgttcgggttcccagtccactacacagatgtcagcaacatgtctagactggccagacagagactgctgggaagaagctggtccgtccctgtgatcagacacctgttcgcccctctgaaggagtacttcgcctgcgtgagcagcggcaacagcaacgccaacagccggggccccagcttctctagcggcctggtgccactgtccctgagagggagccacatgggccccatggagatctacaaaaccgtgagcgcctggaagcggcagcctgtgcgcgtgctgagcctgtttcggaatatcgataaagtcctgaaaagcctgggattcctggagagcggctctggctccggcggtggcaccctgaagtacgtggaggatgtgacaaacgtggtcagacgggatgtggagaagtggggccccttcgatctggtgtacggcagcacccaacccctgggcagctcttgtgaccggtgccctggctggtacatgtttcagttccaccggatcctgcagtacgccctgccgagacaggagtcccagcggccattcttttggattttcatggacaacttgctgctgaccgaggatgaccaggaaactaccactcggttcctgcagaccgaagccgtgaccctgcaggacgtgagaggccgggactaccagaacgccatgcgggtgtggtccaacatccctggactgaaaagcaagcacgcacctctgacccctaaagaagaggagtacctgcaggcccaggtgcggagcagaagcaagctggacgcccctaaggtggatctgctggtgaagaattgcctcctgcccctgagagagtacttcaagtatttcagccagaatagtctgcccctgggaggcagcggcggcggcgccctggtgacatttgaggacgtcgccgtgcggttcacccaggaggaatgggctctgctggatccttctcagaaaatcctgtaccgggacgtgatgagagagacataccggaatctgacctccgtgggcatcaactgggaatgttgggaccttgaagcctgcttcagaagcctgggaagaaacctgagagtgcaggtggtgaagagaaagtgcgagctgaccaacagcggcccctgcgccgagggcggcccaagcagcggcgcccctcctcccagcggcggcagcccagccggctccccaacctctaccgaggagggcacctctgagtccgccacccccgagagcggccctggcacctccaccgagcccagcgagggcagcgcacccggcagccctgccggcagccccacctccacagaggagggaaccagcaccgagcccagcgaaggcagcgccccaggcaccagcaccgagcctagtgagcaggagattaaacggatcaacaagatcagaagaagacttgtgaaagacagcaacaccaagaaggccggcaagacaggccccatgaaaaccctgctggttagagtgatgacacccgatctgagagagcggctggaaaacctgagaaagaagcctgaaaatatcccccagcccatcagcaatacatctagagccaacctgaataagctgctgaccgattacaccgaaatgaagaaggcgatcctgcatgtgtactgggaagagttccagaaggaccctgtgggcctgatgagccgggtggcccagcctgccagcaagaagatcgatcagaacaagctgaaacctgagatggacgagaagggcaacctgaccaccgccggctttgcctgctctcagtgtggccagcccctgttcgtgtacaagctggagcaggtgtctgagaagggcaaggcttacaccaactacttcggacggtgcaatgtggccgagcacgaaaagctgatcctgctggcccagctgaagcccgagaaggatagcgacgaagccgtgacatatagcctgggaaagtttgggcagagggccctggatttctacagcattcatgtgaccaaggagtccacccaccccgtgaagcccctggcccagatcgccggaaacagatacgcctccggacctgtgggaaaggccctgagcgacgcatgtatgggcacaatcgcctccttcctgtctaagtaccaggacatcatcatcgaacaccagaaggtggtgaagggcaaccagaagagactggagagcctgcgggagctggccggcaaggaaaacctggaataccctagcgtgaccctgccacctcagcctcacaccaaggagggcgttgatgcctacaacgaagtgatcgcccgggtgcgaatgtgggtgaacctgaacctgtggcagaagctgaagctaagcagagatgatgccaagcctctgctgagactgaagggattcccttcctttcctctggtcgagagacaggccaacgaagtggactggtgggacatggtgtgtaacgtgaagaagctgatcaacgagaaaaaggaggatggcaaggtgttttggcagaatctggctggctacaagagacaggaagccctgagaccatacctgagcagcgaggaagatcggaagaagggaaagaaattcgctcggtaccagctgggcgacctgctgctgcacctggaaaagaagcacggcgaggactggggaaaggtgtacgacgaggcctgggagcggattgacaagaaagtggaaggcctgagcaagcacatcaagctggaagaggaacggagaagcgaggacgcccagagcaaggccgccctgaccgactggctgcgggctaaggccagcttcgtgatcgagggcctgaaggaggccgacaaggacgagttctgcagatgcgagctgaagctgcagaagtggtacggggacctgcggggaaagcccttcgccatcgaagccgagaacagcatcctggacatcagcggcttcagcaagcagtacaactgtgccttcatctggcagaaggacggcgtgaagaagctgaacctgtacctgatcatcaactacttcaagggcggcaagctgcggttcaagaagatcaaacctgaagccttcgaagccaacagattctacaccgtgatcaacaaaaagagcggcgagatcgtgcccatggaggtgaacttcaacttcgacgaccccaacctgatcatcctgcctctggcctttggcaagagacagggcagagaattcatctggaacgacctgctgtccctggaaaccggcagcctgaagctggccaacggaagagtgatcgagaagacactgtacaacagaagaacccggcaggatgagcctgccctgttcgtggccctgaccttcgagcggcgggaggtcctggactcctccaatatcaaaccaatgaacctgatcggcgtggcaagaggcgaaaacatccccgccgtgatcgccctgaccgaccccgagggctgcccactgagccggtttaaggatagcctgggaaacccaacccacatcctgagaatcggcgagagctataaggagaagcagcggaccatccaggccaagaaggaggtggagcagcggagagccggcggctacagccggaagtacgccagcaaagccaagaatctggcagacgatatggtgagaaacaccgctagagatctgctgtactacgccgtgacccaggatgccatgctgatcttcgccaacctgagccggggcttcggccggcagggcaagcggaccttcatggccgagagacagtacacacggatggaggactggctgaccgccaagctggcctacgagggcctgagcaagacctacctgtccaagacactggcccagtacacctccaagacatgcagcaactgtgggtttaccatcaccagcgccgactacgacagggtgctggagaagctgaagaagacagcaacaggctggatgaccacaattaacggcaaggagctgaaggtggagggccagattacctactacaacagatacaagagacagaacgtagtcaaggacctgtccgtcgagctggatagactgagcgaagaatctgtgaacaacgacatctcctcctggacaaagggcagaagcggagaagctctgagcctcctgaagaaaagattctcccatagacccgtgcaggagaagttcgtgtgcctgaactgcggcttcgagacacacgcagccgagcaagccgccctgaacatcgccagatcctggctgttcctgcggagccaggagtacaagaaataccagacaaacaagacaaccggcaacaccgataagagagccttcgtcgagacctggcagtccttttaccggaagaagcttaaggaggtgtggaaacctgccgtgcggtctggcggatctggcggaggctccagccaggagcccgtgaccttcgaggacgtggccgtgtacttcacccagaaccagtgggccagcctggaccccatgcagagggccctgtacctggaggtgatgctggagaactacgccaacatcaccagcctggccgccctgcccttccccaagcccgacctgatcctgcagctggagcagggcgaggccccctggggcctggacccctggacccccctggagagggaggccctgggcggcgtgggcggcccaagcagcggcgcccctcctcccagcggcggcagcccagccggctccccaacctctaccgaggagggcacctctgagtccgccacccccgagagcggccctggcacctccaccgagcccagcgagggcagcgcacccggcagccctgccggcagccccacctccacagaggagggaaccagcaccgagcccagcgaaggcagcgccccaggcaccagcaccgagcctagtgagcaggagattaaacggatcaacaagatcagaagaagacttgtgaaagacagcaacaccaagaaggccggcaagacaggccccatgaaaaccctgctggttagagtgatgacacccgatctgagagagcggctggaaaacctgagaaagaagcctgaaaatatcccccagcccatcagcaatacatctagagccaacctgaataagctgctgaccgattacaccgaaatgaagaaggcgatcctgcatgtgtactgggaagagttccagaaggaccctgtgggcctgatgagccgggtggcccagcctgccagcaagaagatcgatcagaacaagctgaaacctgagatggacgagaagggcaacctgaccaccgccggctttgcctgctctcagtgtggccagcccctgttcgtgtacaagctggagcaggtgtctgagaagggcaaggcttacaccaactacttcggacggtgcaatgtggccgagcacgaaaagctgatcctgctggcccagctgaagcccgagaaggatagcgacgaagccgtgacatatagcctgggaaagtttgggcagagggccctggatttctacagcattcatgtgaccaaggagtccacccaccccgtgaagcccctggcccagatcgccggaaacagatacgcctccggacctgtgggaaaggccctgagcgacgcatgtatgggcacaatcgcctccttcctgtctaagtaccaggacatcatcatcgaacaccagaaggtggtgaagggcaaccagaagagactggagagcctgcgggagctggccggcaaggaaaacctggaataccctagcgtgaccctgccacctcagcctcacaccaaggagggcgttgatgcctacaacgaagtgatcgcccgggtgcgaatgtgggtgaacctgaacctgtggcagaagctgaagctaagcagagatgatgccaagcctctgctgagactgaagggattcccttcctttcctctggtcgagagacaggccaacgaagtggactggtgggacatggtgtgtaacgtgaagaagctgatcaacgagaaaaaggaggatggcaaggtgttttggcagaatctggctggctacaagagacaggaagccctgagaccatacctgagcagcgaggaagatcggaagaagggaaagaaattcgctcggtaccagctgggcgacctgctgctgcacctggaaaagaagcacggcgaggactggggaaaggtgtacgacgaggcctgggagcggattgacaagaaagtggaaggcctgagcaagcacatcaagctggaagaggaacggagaagcgaggacgcccagagcaaggccgccctgaccgactggctgcgggctaaggccagcttcgtgatcgagggcctgaaggaggccgacaaggacgagttctgcagatgcgagctgaagctgcagaagtggtacggggacctgcggggaaagcccttcgccatcgaagccgagaacagcatcctggacatcagcggcttcagcaagcagtacaactgtgccttcatctggcagaaggacggcgtgaagaagctgaacctgtacctgatcatcaactacttcaagggcggcaagctgcggttcaagaagatcaaacctgaagccttcgaagccaacagattctacaccgtgatcaacaaaaagagcggcgagatcgtgcccatggaggtgaacttcaacttcgacgaccccaacctgatcatcctgcctctggcctttggcaagagacagggcagagaattcatctggaacgacctgctgtccctggaaaccggcagcctgaagctggccaacggaagagtgatcgagaagacactgtacaacagaagaacccggcaggatgagcctgccctgttcgtggccctgaccttcgagcggcgggaggtcctggactcctccaatatcaaaccaatgaacctgatcggcgtggcaagaggcgaaaacatccccgccgtgatcgccctgaccgaccccgagggctgcccactgagccggtttaaggatagcctgggaaacccaacccacatcctgagaatcggcgagagctataaggagaagcagcggaccatccaggccaagaaggaggtggagcagcggagagccggcggctacagccggaagtacgccagcaaagccaagaatctggcagacgatatggtgagaaacaccgctagagatctgctgtactacgccgtgacccaggatgccatgctgatcttcgccaacctgagccggggcttcggccggcagggcaagcggaccttcatggccgagagacagtacacacggatggaggactggctgaccgccaagctggcctacgagggcctgagcaagacctacctgtccaagacactggcccagtacacctccaagacatgcagcaactgtgggtttaccatcaccagcgccgactacgacagggtgctggagaagctgaagaagacagcaacaggctggatgaccacaattaacggcaaggagctgaaggtggagggccagattacctactacaacagatacaagagacagaacgtagtcaaggacctgtccgtcgagctggatagactgagcgaagaatctgtgaacaacgacatctcctcctggacaaagggcagaagcggagaagctctgagcctcctgaagaaaagattctcccatagacccgtgcaggagaagttcgtgtgcctgaactgcggcttcgagacacacgcagccgagcaagccgccctgaacatcgccagatcctggctgttcctgcggagccaggagtacaagaaataccagacaaacaagacaaccggcaacaccgataagagagccttcgtcgagacctggcagtccttttaccggaagaagcttaaggaggtgtggaaacctgccgtgcggtctggcggatctggcggaggctcctagccaggagcccgtgaccttcgaggacgtggccgtgtacttcacccagaaccagtgggccagcctggaccccatgcagagggccctgtacctggaggtgatgctggagaactacgccaacatcaccagcctggccgccctgcccttccccaagcccgacctgatcctgcagctggagcagggcgaggccccctggggcctggacccctggacccccctggagagggaggccctgggcggcgtgggatctggctccggcagcggccccaagaaaaagagaaaagtctaagctgccttctgcggggcttgccttctggccatgcccttcttctctcccttgcacctgtacctcttggtctttgaataaagcctgagtaggaaggctagcaaaaaaaaaaaaaaaaaaaaaaaaaaaaaaaaaaaaaaaaaaaaaaaaaaaaaaaaaaaaaaaaaaaaaaaaaaaaaaaa

SEQ ID NO: 15638 - RNA, 9485 nt, synthetic construct
  source 1..9485: mol_type = other RNA
aggaaataagagagaaaagaagagtaagaagaaatataagagccaccatggcccctaagaagaagcgtaaagtgagccggatggaacgcctcgtctacgaggtgcggcagaagtgcagaaacatcgaggacatctgcatctcctgcggatctctgaacgtgaccctggagcacccactgttcatcggcggcatgtgccagaactgtaaaaactgttttctggagtgtgcctatcaatacgacgatgacggctaccagagctactgcaccatctgttgcggcggaagagaggtgctgatgtgtggaaataacaactgctgccggtgcttctgcgtggaatgcgtggacctgctggtgggccccggcgccgcccaggccgctattaaggaagatccttggaactgctacatgtgcggccacaagggcacatacggcctgctgagacggagagaggactggcctagcagactgcagatgttcttcgccaataaccacgaccaggagttcgacccccctaaggtgtaccctcccgtccccgccgagaagagaaagcccatccgggtcctgagcctgttcgatggcatcgccaccggtctgctggtgctgaaggacctgggcatccaggtggataggtacattgcctccgaggtgtgcgaggactccatcaccgtgggaatggtgcgtcatcagggcaagatcatgtacgtgggcgacgtgcggagcgtgacacagaagcatatccaggagtggggccctttcgacctggtgatcggcggcagcccttgcaatgacctgagcatcgtgaacccagcccggaagggcctgtacgagggaaccggcagactgttcttcgagttttacagactgctgcacgacgcccggcctaaggaaggcgacgaccggcccttcttttggctgttcgagaatgtggtggccatgggagtcagcgacaagcgggatattagccggttcctggagagcaaccccgtgatgatcgatgccaaggaagtgagcgccgcccaccgggccagatacttctggggcaatctgcctggcatgaacagacccctggccagcaccgtgaacgacaagctggagctgcaggagtgcctggagcacggccggatcgccaagttcagcaaggtgagaaccatcaccacccgaagcaacagcatcaaacaaggcaaggaccagcactttcctgtgttcatgaacgagaaggaggacatcctgtggtgtaccgagatggagagagtgttcgggttcccagtccactacacagatgtcagcaacatgtctagactggccagacagagactgctgggaagaagctggtccgtccctgtgatcagacacctgttcgcccctctgaaggagtacttcgcctgcgtgagcagcggcaacagcaacgccaacagccggggccccagcttctctagcggcctggtgccactgtccctgagagggagccacatgggccccatggagatctacaaaaccgtgagcgcctggaagcggcagcctgtgcgcgtgctgagcctgtttcggaatatcgataaagtcctgaaaagcctgggattcctggagagcggctctggctccggcggtggcaccctgaagtacgtggaggatgtgacaaacgtggtcagacgggatgtggagaagtggggccccttcgatctggtgtacggcagcacccaacccctgggcagctcttgtgaccggtgccctggctggtacatgtttcagttccaccggatcctgcagtacgccctgccgagacaggagtcccagcggccattcttttggattttcatggacaacttgctgctgaccgaggatgaccaggaaactaccactcggttcctgcagaccgaagccgtgaccctgcaggacgtgagaggccgggactaccagaacgccatgcgggtgtggtccaacatccctggactgaaaagcaagcacgcacctctgacccctaaagaagaggagtacctgcaggcccaggtgcggagcagaagcaagctggacgcccctaaggtggatctgctggtgaagaattgcctcctgcccctgagagagtacttcaagtatttcagccagaatagtctgcccctgggaggcagcggcggcggcgccctggtgacatttgaggacgtcgccgtgcggttcacccaggaggaatgggctctgctggatccttctcagaaaatcctgtaccgggacgtgatgagagagacataccggaatctgacctccgtgggcatcaactgggaatgttgggaccttgaagcctgcttcagaagcctgggaagaaacctgagagtgcaggtggtgaagagaaagtgcgagctgaccaacagcggcccctgcgccgagggcggcccaagcagcggcgcccctcctcccagcggcggcagcccagccggctccccaacctctaccgaggagggcacctctgagtccgccacccccgagagcggccctggcacctccaccgagcccagcgagggcagcgcacccggcagccctgccggcagccccacctccacagaggagggaaccagcaccgagcccagcgaaggcagcgccccaggcaccagcaccgagcctagtgagcaggagattaaacggatcaacaagatcagaagaagacttgtgaaagacagcaacaccaagaaggccggcaagacaggccccatgaaaaccctgctggttagagtgatgacacccgatctgagagagcggctggaaaacctgagaaagaagcctgaaaatatcccccagcccatcagcaatacatctagagccaacctgaataagctgctgaccgattacaccgaaatgaagaaggcgatcctgcatgtgtactgggaagagttccagaaggaccctgtgggcctgatgagccgggtggcccagcctgccagcaagaagatcgatcagaacaagctgaaacctgagatggacgagaagggcaacctgaccaccgccggctttgcctgctctcagtgtggccagcccctgttcgtgtacaagctggagcaggtgtctgagaagggcaaggcttacaccaactacttcggacggtgcaatgtggccgagcacgaaaagctgatcctgctggcccagctgaagcccgagaaggatagcgacgaagccgtgacatatagcctgggaaagtttgggcagagggccctggatttctacagcattcatgtgaccaaggagtccacccaccccgtgaagcccctggcccagatcgccggaaacagatacgcctccggacctgtgggaaaggccctgagcgacgcatgtatgggcacaatcgcctccttcctgtctaagtaccaggacatcatcatcgaacaccagaaggtggtgaagggcaaccagaagagactggagagcctgcgggagctggccggcaaggaaaacctggaataccctagcgtgaccctgccacctcagcctcacaccaaggagggcgttgatgcctacaacgaagtgatcgcccgggtgcgaatgtgggtgaacctgaacctgtggcagaagctgaagctaagcagagatgatgccaagcctctgctgagactgaagggattcccttcctttcctctggtcgagagacaggccaacgaagtggactggtgggacatggtgtgtaacgtgaagaagctgatcaacgagaaaaaggaggatggcaaggtgttttggcagaatctggctggctacaagagacaggaagccctgagaccatacctgagcagcgaggaagatcggaagaagggaaagaaattcgctcggtaccagctgggcgacctgctgctgcacctggaaaagaagcacggcgaggactggggaaaggtgtacgacgaggcctgggagcggattgacaagaaagtggaaggcctgagcaagcacatcaagctggaagaggaacggagaagcgaggacgcccagagcaaggccgccctgaccgactggctgcgggctaaggccagcttcgtgatcgagggcctgaaggaggccgacaaggacgagttctgcagatgcgagctgaagctgcagaagtggtacggggacctgcggggaaagcccttcgccatcgaagccgagaacagcatcctggacatcagcggcttcagcaagcagtacaactgtgccttcatctggcagaaggacggcgtgaagaagctgaacctgtacctgatcatcaactacttcaagggcggcaagctgcggttcaagaagatcaaacctgaagccttcgaagccaacagattctacaccgtgatcaacaaaaagagcggcgagatcgtgcccatggaggtgaacttcaacttcgacgaccccaacctgatcatcctgcctctggcctttggcaagagacagggcagagaattcatctggaacgacctgctgtccctggaaaccggcagcctgaagctggccaacggaagagtgatcgagaagacactgtacaacagaagaacccggcaggatgagcctgccctgttcgtggccctgaccttcgagcggcgggaggtcctggactcctccaatatcaaaccaatgaacctgatcggcgtggcaagaggcgaaaacatccccgccgtgatcgccctgaccgaccccgagggctgcccactgagccggtttaaggatagcctgggaaacccaacccacatcctgagaatcggcgagagctataaggagaagcagcggaccatccaggccaagaaggaggtggagcagcggagagccggcggctacagccggaagtacgccagcaaagccaagaatctggcagacgatatggtgagaaacaccgctagagatctgctgtactacgccgtgacccaggatgccatgctgatcttcgccaacctgagccggggcttcggccggcagggcaagcggaccttcatggccgagagacagtacacacggatggaggactggctgaccgccaagctggcctacgagggcctgagcaagacctacctgtccaagacactggcccagtacacctccaagacatgcagcaactgtgggtttaccatcaccagcgccgactacgacagggtgctggagaagctgaagaagacagcaacaggctggatgaccacaattaacggcaaggagctgaaggtggagggccagattacctactacaacagatacaagagacagaacgtagtcaaggacctgtccgtcgagctggatagactgagcgaagaatctgtgaacaacgacatctcctcctggacaaagggcagaagcggagaagctctgagcctcctgaagaaaagattctcccatagacccgtgcaggagaagttcgtgtgcctgaactgcggcttcgagacacacgcagccgagcaagccgccctgaacatcgccagatcctggctgttcctgcggagccaggagtacaagaaataccagacaaacaagacaaccggcaacaccgataagagagccttcgtcgagacctggcagtccttttaccggaagaagcttaaggaggtgtggaaacctgccgtgcggtctggcggatctggcggaggctccgaggagctgcccgtggtgttcgaggacgtggccgtgtacttcaccagggaggagtgggccatgctggacaagaggcagaaggagctgtacagggacgtgatgaggatgaactacgagctgctggccagcctgggccccgccgccgccaagcccgagctgatcagcaagctggagaggagggccgccccctggatcaaggaccccaacggccccaagtggggcaagggcaggccccccggcaagggcggcccaagcagcggcgcccctcctcccagcggcggcagcccagccggctccccaacctctaccgaggagggcacctctgagtccgccacccccgagagcggccctggcacctccaccgagcccagcgagggcagcgcacccggcagccctgccggcagccccacctccacagaggagggaaccagcaccgagcccagcgaaggcagcgccccaggcaccagcaccgagcctagtgagcaggagattaaacggatcaacaagatcagaagaagacttgtgaaagacagcaacaccaagaaggccggcaagacaggccccatgaaaaccctgctggttagagtgatgacacccgatctgagagagcggctggaaaacctgagaaagaagcctgaaaatatcccccagcccatcagcaatacatctagagccaacctgaataagctgctgaccgattacaccgaaatgaagaaggcgatcctgcatgtgtactgggaagagttccagaaggaccctgtgggcctgatgagccgggtggcccagcctgccagcaagaagatcgatcagaacaagctgaaacctgagatggacgagaagggcaacctgaccaccgccggctttgcctgctctcagtgtggccagcccctgttcgtgtacaagctggagcaggtgtctgagaagggcaaggcttacaccaactacttcggacggtgcaatgtggccgagcacgaaaagctgatcctgctggcccagctgaagcccgagaaggatagcgacgaagccgtgacatatagcctgggaaagtttgggcagagggccctggatttctacagcattcatgtgaccaaggagtccacccaccccgtgaagcccctggcccagatcgccggaaacagatacgcctccggacctgtgggaaaggccctgagcgacgcatgtatgggcacaatcgcctccttcctgtctaagtaccaggacatcatcatcgaacaccagaaggtggtgaagggcaaccagaagagactggagagcctgcgggagctggccggcaaggaaaacctggaataccctagcgtgaccctgccacctcagcctcacaccaaggagggcgttgatgcctacaacgaagtgatcgcccgggtgcgaatgtgggtgaacctgaacctgtggcagaagctgaagctaagcagagatgatgccaagcctctgctgagactgaagggattcccttcctttcctctggtcgagagacaggccaacgaagtggactggtgggacatggtgtgtaacgtgaagaagctgatcaacgagaaaaaggaggatggcaaggtgttttggcagaatctggctggctacaagagacaggaagccctgagaccatacctgagcagcgaggaagatcggaagaagggaaagaaattcgctcggtaccagctgggcgacctgctgctgcacctggaaaagaagcacggcgaggactggggaaaggtgtacgacgaggcctgggagcggattgacaagaaagtggaaggcctgagcaagcacatcaagctggaagaggaacggagaagcgaggacgcccagagcaaggccgccctgaccgactggctgcgggctaaggccagcttcgtgatcgagggcctgaaggaggccgacaaggacgagttctgcagatgcgagctgaagctgcagaagtggtacggggacctgcggggaaagcccttcgccatcgaagccgagaacagcatcctggacatcagcggcttcagcaagcagtacaactgtgccttcatctggcagaaggacggcgtgaagaagctgaacctgtacctgatcatcaactacttcaagggcggcaagctgcggttcaagaagatcaaacctgaagccttcgaagccaacagattctacaccgtgatcaacaaaaagagcggcgagatcgtgcccatggaggtgaacttcaacttcgacgaccccaacctgatcatcctgcctctggcctttggcaagagacagggcagagaattcatctggaacgacctgctgtccctggaaaccggcagcctgaagctggccaacggaagagtgatcgagaagacactgtacaacagaagaacccggcaggatgagcctgccctgttcgtggccctgaccttcgagcggcgggaggtcctggactcctccaatatcaaaccaatgaacctgatcggcgtggcaagaggcgaaaacatccccgccgtgatcgccctgaccgaccccgagggctgcccactgagccggtttaaggatagcctgggaaacccaacccacatcctgagaatcggcgagagctataaggagaagcagcggaccatccaggccaagaaggaggtggagcagcggagagccggcggctacagccggaagtacgccagcaaagccaagaatctggcagacgatatggtgagaaacaccgctagagatctgctgtactacgccgtgacccaggatgccatgctgatcttcgccaacctgagccggggcttcggccggcagggcaagcggaccttcatggccgagagacagtacacacggatggaggactggctgaccgccaagctggcctacgagggcctgagcaagacctacctgtccaagacactggcccagtacacctccaagacatgcagcaactgtgggtttaccatcaccagcgccgactacgacagggtgctggagaagctgaagaagacagcaacaggctggatgaccacaattaacggcaaggagctgaaggtggagggccagattacctactacaacagatacaagagacagaacgtagtcaaggacctgtccgtcgagctggatagactgagcgaagaatctgtgaacaacgacatctcctcctggacaaagggcagaagcggagaagctctgagcctcctgaagaaaagattctcccatagacccgtgcaggagaagttcgtgtgcctgaactgcggcttcgagacacacgcagccgagcaagccgccctgaacatcgccagatcctggctgttcctgcggagccaggagtacaagaaataccagacaaacaagacaaccggcaacaccgataagagagccttcgtcgagacctggcagtccttttaccggaagaagcttaaggaggtgtggaaacctgccgtgcggtctggcggatctggcggaggctcctgaggagctgcccgtggtgttcgaggacgtggccgtgtacttcaccagggaggagtgggccatgctggacaagaggcagaaggagctgtacagggacgtgatgaggatgaactacgagctgctggccagcctgggccccgccgccgccaagcccgagctgatcagcaagctggagaggagggccgccccctggatcaaggaccccaacggccccaagtggggcaagggcaggccccccggcaagggatctggctccggcagcggccccaagaaaaagagaaaagtctaagctgccttctgcggggcttgccttctggccatgcccttcttctctcccttgcacctgtacctcttggtctttgaataaagcctgagtaggaaggctagcaaaaaaaaaaaaaaaaaaaaaaaaaaaaaaaaaaaaaaaaaaaaaaaaaaaaaaaaaaaaaaaaaaaaaaaaaaaaaaaa

SEQ ID NO: 15639 - RNA, 9485 nt, synthetic construct
  source 1..9485: mol_type = other RNA
aggaaataagagagaaaagaagagtaagaagaaatataagagccaccatggcccctaagaagaagcgtaaagtgagccggatggaacgcctcgtctacgaggtgcggcagaagtgcagaaacatcgaggacatctgcatctcctgcggatctctgaacgtgaccctggagcacccactgttcatcggcggcatgtgccagaactgtaaaaactgttttctggagtgtgcctatcaatacgacgatgacggctaccagagctactgcaccatctgttgcggcggaagagaggtgctgatgtgtggaaataacaactgctgccggtgcttctgcgtggaatgcgtggacctgctggtgggccccggcgccgcccaggccgctattaaggaagatccttggaactgctacatgtgcggccacaagggcacatacggcctgctgagacggagagaggactggcctagcagactgcagatgttcttcgccaataaccacgaccaggagttcgacccccctaaggtgtaccctcccgtccccgccgagaagagaaagcccatccgggtcctgagcctgttcgatggcatcgccaccggtctgctggtgctgaaggacctgggcatccaggtggataggtacattgcctccgaggtgtgcgaggactccatcaccgtgggaatggtgcgtcatcagggcaagatcatgtacgtgggcgacgtgcggagcgtgacacagaagcatatccaggagtggggccctttcgacctggtgatcggcggcagcccttgcaatgacctgagcatcgtgaacccagcccggaagggcctgtacgagggaaccggcagactgttcttcgagttttacagactgctgcacgacgcccggcctaaggaaggcgacgaccggcccttcttttggctgttcgagaatgtggtggccatgggagtcagcgacaagcgggatattagccggttcctggagagcaaccccgtgatgatcgatgccaaggaagtgagcgccgcccaccgggccagatacttctggggcaatctgcctggcatgaacagacccctggccagcaccgtgaacgacaagctggagctgcaggagtgcctggagcacggccggatcgccaagttcagcaaggtgagaaccatcaccacccgaagcaacagcatcaaacaaggcaaggaccagcactttcctgtgttcatgaacgagaaggaggacatcctgtggtgtaccgagatggagagagtgttcgggttcccagtccactacacagatgtcagcaacatgtctagactggccagacagagactgctgggaagaagctggtccgtccctgtgatcagacacctgttcgcccctctgaaggagtacttcgcctgcgtgagcagcggcaacagcaacgccaacagccggggccccagcttctctagcggcctggtgccactgtccctgagagggagccacatgggccccatggagatctacaaaaccgtgagcgcctggaagcggcagcctgtgcgcgtgctgagcctgtttcggaatatcgataaagtcctgaaaagcctgggattcctggagagcggctctggctccggcggtggcaccctgaagtacgtggaggatgtgacaaacgtggtcagacgggatgtggagaagtggggccccttcgatctggtgtacggcagcacccaacccctgggcagctcttgtgaccggtgccctggctggtacatgtttcagttccaccggatcctgcagtacgccctgccgagacaggagtcccagcggccattcttttggattttcatggacaacttgctgctgaccgaggatgaccaggaaactaccactcggttcctgcagaccgaagccgtgaccctgcaggacgtgagaggccgggactaccagaacgccatgcgggtgtggtccaacatccctggactgaaaagcaagcacgcacctctgacccctaaagaagaggagtacctgcaggcccaggtgcggagcagaagcaagctggacgcccctaaggtggatctgctggtgaagaattgcctcctgcccctgagagagtacttcaagtatttcagccagaatagtctgcccctgggaggcagcggcggcggcgccctggtgacatttgaggacgtcgccgtgcggttcacccaggaggaatgggctctgctggatccttctcagaaaatcctgtaccgggacgtgatgagagagacataccggaatctgacctccgtgggcatcaactgggaatgttgggaccttgaagcctgcttcagaagcctgggaagaaacctgagagtgcaggtggtgaagagaaagtgcgagctgaccaacagcggcccctgcgccgagggcggcccaagcagcggcgcccctcctcccagcggcggcagcccagccggctccccaacctctaccgaggagggcacctctgagtccgccacccccgagagcggccctggcacctccaccgagcccagcgagggcagcgcacccggcagccctgccggcagccccacctccacagaggagggaaccagcaccgagcccagcgaaggcagcgccccaggcaccagcaccgagcctagtgagcaggagattaaacggatcaacaagatcagaagaagacttgtgaaagacagcaacaccaagaaggccggcaagacaggccccatgaaaaccctgctggttagagtgatgacacccgatctgagagagcggctggaaaacctgagaaagaagcctgaaaatatcccccagcccatcagcaatacatctagagccaacctgaataagctgctgaccgattacaccgaaatgaagaaggcgatcctgcatgtgtactgggaagagttccagaaggaccctgtgggcctgatgagccgggtggcccagcctgccagcaagaagatcgatcagaacaagctgaaacctgagatggacgagaagggcaacctgaccaccgccggctttgcctgctctcagtgtggccagcccctgttcgtgtacaagctggagcaggtgtctgagaagggcaaggcttacaccaactacttcggacggtgcaatgtggccgagcacgaaaagctgatcctgctggcccagctgaagcccgagaaggatagcgacgaagccgtgacatatagcctgggaaagtttgggcagagggccctggatttctacagcattcatgtgaccaaggagtccacccaccccgtgaagcccctggcccagatcgccggaaacagatacgcctccggacctgtgggaaaggccctgagcgacgcatgtatgggcacaatcgcctccttcctgtctaagtaccaggacatcatcatcgaacaccagaaggtggtgaagggcaaccagaagagactggagagcctgcgggagctggccggcaaggaaaacctggaataccctagcgtgaccctgccacctcagcctcacaccaaggagggcgttgatgcctacaacgaagtgatcgcccgggtgcgaatgtgggtgaacctgaacctgtggcagaagctgaagctaagcagagatgatgccaagcctctgctgagactgaagggattcccttcctttcctctggtcgagagacaggccaacgaagtggactggtgggacatggtgtgtaacgtgaagaagctgatcaacgagaaaaaggaggatggcaaggtgttttggcagaatctggctggctacaagagacaggaagccctgagaccatacctgagcagcgaggaagatcggaagaagggaaagaaattcgctcggtaccagctgggcgacctgctgctgcacctggaaaagaagcacggcgaggactggggaaaggtgtacgacgaggcctgggagcggattgacaagaaagtggaaggcctgagcaagcacatcaagctggaagaggaacggagaagcgaggacgcccagagcaaggccgccctgaccgactggctgcgggctaaggccagcttcgtgatcgagggcctgaaggaggccgacaaggacgagttctgcagatgcgagctgaagctgcagaagtggtacggggacctgcggggaaagcccttcgccatcgaagccgagaacagcatcctggacatcagcggcttcagcaagcagtacaactgtgccttcatctggcagaaggacggcgtgaagaagctgaacctgtacctgatcatcaactacttcaagggcggcaagctgcggttcaagaagatcaaacctgaagccttcgaagccaacagattctacaccgtgatcaacaaaaagagcggcgagatcgtgcccatggaggtgaacttcaacttcgacgaccccaacctgatcatcctgcctctggcctttggcaagagacagggcagagaattcatctggaacgacctgctgtccctggaaaccggcagcctgaagctggccaacggaagagtgatcgagaagacactgtacaacagaagaacccggcaggatgagcctgccctgttcgtggccctgaccttcgagcggcgggaggtcctggactcctccaatatcaaaccaatgaacctgatcggcgtggcaagaggcgaaaacatccccgccgtgatcgccctgaccgaccccgagggctgcccactgagccggtttaaggatagcctgggaaacccaacccacatcctgagaatcggcgagagctataaggagaagcagcggaccatccaggccaagaaggaggtggagcagcggagagccggcggctacagccggaagtacgccagcaaagccaagaatctggcagacgatatggtgagaaacaccgctagagatctgctgtactacgccgtgacccaggatgccatgctgatcttcgccaacctgagccggggcttcggccggcagggcaagcggaccttcatggccgagagacagtacacacggatggaggactggctgaccgccaagctggcctacgagggcctgagcaagacctacctgtccaagacactggcccagtacacctccaagacatgcagcaactgtgggtttaccatcaccagcgccgactacgacagggtgctggagaagctgaagaagacagcaacaggctggatgaccacaattaacggcaaggagctgaaggtggagggccagattacctactacaacagatacaagagacagaacgtagtcaaggacctgtccgtcgagctggatagactgagcgaagaatctgtgaacaacgacatctcctcctggacaaagggcagaagcggagaagctctgagcctcctgaagaaaagattctcccatagacccgtgcaggagaagttcgtgtgcctgaactgcggcttcgagacacacgcagccgagcaagccgccctgaacatcgccagatcctggctgttcctgcggagccaggagtacaagaaataccagacaaacaagacaaccggcaacaccgataagagagccttcgtcgagacctggcagtccttttaccggaagaagcttaaggaggtgtggaaacctgccgtgcggtctggcggatctggcggaggctccgcccagggccccgtgaccttcgaggacgtggccgtgtacttcagcgccgaggagtggcaggagctggccggctggcagagggagctgtacagggacgtgatgatggacacctacgagctggtggccagcctgggccccgccggcctgaagcccgaggtggtgagcaagctggagaggggcgaggagccccaccagcccgccaggagcagggagagccccagggcccccctgcccgtgctgctgggcggcccaagcagcggcgcccctcctcccagcggcggcagcccagccggctccccaacctctaccgaggagggcacctctgagtccgccacccccgagagcggccctggcacctccaccgagcccagcgagggcagcgcacccggcagccctgccggcagccccacctccacagaggagggaaccagcaccgagcccagcgaaggcagcgccccaggcaccagcaccgagcctagtgagcaggagattaaacggatcaacaagatcagaagaagacttgtgaaagacagcaacaccaagaaggccggcaagacaggccccatgaaaaccctgctggttagagtgatgacacccgatctgagagagcggctggaaaacctgagaaagaagcctgaaaatatcccccagcccatcagcaatacatctagagccaacctgaataagctgctgaccgattacaccgaaatgaagaaggcgatcctgcatgtgtactgggaagagttccagaaggaccctgtgggcctgatgagccgggtggcccagcctgccagcaagaagatcgatcagaacaagctgaaacctgagatggacgagaagggcaacctgaccaccgccggctttgcctgctctcagtgtggccagcccctgttcgtgtacaagctggagcaggtgtctgagaagggcaaggcttacaccaactacttcggacggtgcaatgtggccgagcacgaaaagctgatcctgctggcccagctgaagcccgagaaggatagcgacgaagccgtgacatatagcctgggaaagtttgggcagagggccctggatttctacagcattcatgtgaccaaggagtccacccaccccgtgaagcccctggcccagatcgccggaaacagatacgcctccggacctgtgggaaaggccctgagcgacgcatgtatgggcacaatcgcctccttcctgtctaagtaccaggacatcatcatcgaacaccagaaggtggtgaagggcaaccagaagagactggagagcctgcgggagctggccggcaaggaaaacctggaataccctagcgtgaccctgccacctcagcctcacaccaaggagggcgttgatgcctacaacgaagtgatcgcccgggtgcgaatgtgggtgaacctgaacctgtggcagaagctgaagctaagcagagatgatgccaagcctctgctgagactgaagggattcccttcctttcctctggtcgagagacaggccaacgaagtggactggtgggacatggtgtgtaacgtgaagaagctgatcaacgagaaaaaggaggatggcaaggtgttttggcagaatctggctggctacaagagacaggaagccctgagaccatacctgagcagcgaggaagatcggaagaagggaaagaaattcgctcggtaccagctgggcgacctgctgctgcacctggaaaagaagcacggcgaggactggggaaaggtgtacgacgaggcctgggagcggattgacaagaaagtggaaggcctgagcaagcacatcaagctggaagaggaacggagaagcgaggacgcccagagcaaggccgccctgaccgactggctgcgggctaaggccagcttcgtgatcgagggcctgaaggaggccgacaaggacgagttctgcagatgcgagctgaagctgcagaagtggtacggggacctgcggggaaagcccttcgccatcgaagccgagaacagcatcctggacatcagcggcttcagcaagcagtacaactgtgccttcatctggcagaaggacggcgtgaagaagctgaacctgtacctgatcatcaactacttcaagggcggcaagctgcggttcaagaagatcaaacctgaagccttcgaagccaacagattctacaccgtgatcaacaaaaagagcggcgagatcgtgcccatggaggtgaacttcaacttcgacgaccccaacctgatcatcctgcctctggcctttggcaagagacagggcagagaattcatctggaacgacctgctgtccctggaaaccggcagcctgaagctggccaacggaagagtgatcgagaagacactgtacaacagaagaacccggcaggatgagcctgccctgttcgtggccctgaccttcgagcggcgggaggtcctggactcctccaatatcaaaccaatgaacctgatcggcgtggcaagaggcgaaaacatccccgccgtgatcgccctgaccgaccccgagggctgcccactgagccggtttaaggatagcctgggaaacccaacccacatcctgagaatcggcgagagctataaggagaagcagcggaccatccaggccaagaaggaggtggagcagcggagagccggcggctacagccggaagtacgccagcaaagccaagaatctggcagacgatatggtgagaaacaccgctagagatctgctgtactacgccgtgacccaggatgccatgctgatcttcgccaacctgagccggggcttcggccggcagggcaagcggaccttcatggccgagagacagtacacacggatggaggactggctgaccgccaagctggcctacgagggcctgagcaagacctacctgtccaagacactggcccagtacacctccaagacatgcagcaactgtgggtttaccatcaccagcgccgactacgacagggtgctggagaagctgaagaagacagcaacaggctggatgaccacaattaacggcaaggagctgaaggtggagggccagattacctactacaacagatacaagagacagaacgtagtcaaggacctgtccgtcgagctggatagactgagcgaagaatctgtgaacaacgacatctcctcctggacaaagggcagaagcggagaagctctgagcctcctgaagaaaagattctcccatagacccgtgcaggagaagttcgtgtgcctgaactgcggcttcgagacacacgcagccgagcaagccgccctgaacatcgccagatcctggctgttcctgcggagccaggagtacaagaaataccagacaaacaagacaaccggcaacaccgataagagagccttcgtcgagacctggcagtccttttaccggaagaagcttaaggaggtgtggaaacctgccgtgcggtctggcggatctggcggaggctcctgcccagggccccgtgaccttcgaggacgtggccgtgtacttcagcgccgaggagtggcaggagctggccggctggcagagggagctgtacagggacgtgatgatggacacctacgagctggtggccagcctgggccccgccggcctgaagcccgaggtggtgagcaagctggagaggggcgaggagccccaccagcccgccaggagcagggagagccccagggcccccctgcccgtgctgctgggatctggctccggcagcggccccaagaaaaagagaaaagtctaagctgccttctgcggggcttgccttctggccatgcccttcttctctcccttgcacctgtacctcttggtctttgaataaagcctgagtaggaaggctagcaaaaaaaaaaaaaaaaaaaaaaaaaaaaaaaaaaaaaaaaaaaaaaaaaaaaaaaaaaaaaaaaaaaaaaaaaaaaaaaa

SEQ ID NO: 15640 - RNA, 9485 nt, synthetic construct
  source 1..9485: mol_type = other RNA
aggaaataagagagaaaagaagagtaagaagaaatataagagccaccatggcccctaagaagaagcgtaaagtgagccggatggaacgcctcgtctacgaggtgcggcagaagtgcagaaacatcgaggacatctgcatctcctgcggatctctgaacgtgaccctggagcacccactgttcatcggcggcatgtgccagaactgtaaaaactgttttctggagtgtgcctatcaatacgacgatgacggctaccagagctactgcaccatctgttgcggcggaagagaggtgctgatgtgtggaaataacaactgctgccggtgcttctgcgtggaatgcgtggacctgctggtgggccccggcgccgcccaggccgctattaaggaagatccttggaactgctacatgtgcggccacaagggcacatacggcctgctgagacggagagaggactggcctagcagactgcagatgttcttcgccaataaccacgaccaggagttcgacccccctaaggtgtaccctcccgtccccgccgagaagagaaagcccatccgggtcctgagcctgttcgatggcatcgccaccggtctgctggtgctgaaggacctgggcatccaggtggataggtacattgcctccgaggtgtgcgaggactccatcaccgtgggaatggtgcgtcatcagggcaagatcatgtacgtgggcgacgtgcggagcgtgacacagaagcatatccaggagtggggccctttcgacctggtgatcggcggcagcccttgcaatgacctgagcatcgtgaacccagcccggaagggcctgtacgagggaaccggcagactgttcttcgagttttacagactgctgcacgacgcccggcctaaggaaggcgacgaccggcccttcttttggctgttcgagaatgtggtggccatgggagtcagcgacaagcgggatattagccggttcctggagagcaaccccgtgatgatcgatgccaaggaagtgagcgccgcccaccgggccagatacttctggggcaatctgcctggcatgaacagacccctggccagcaccgtgaacgacaagctggagctgcaggagtgcctggagcacggccggatcgccaagttcagcaaggtgagaaccatcaccacccgaagcaacagcatcaaacaaggcaaggaccagcactttcctgtgttcatgaacgagaaggaggacatcctgtggtgtaccgagatggagagagtgttcgggttcccagtccactacacagatgtcagcaacatgtctagactggccagacagagactgctgggaagaagctggtccgtccctgtgatcagacacctgttcgcccctctgaaggagtacttcgcctgcgtgagcagcggcaacagcaacgccaacagccggggccccagcttctctagcggcctggtgccactgtccctgagagggagccacatgggccccatggagatctacaaaaccgtgagcgcctggaagcggcagcctgtgcgcgtgctgagcctgtttcggaatatcgataaagtcctgaaaagcctgggattcctggagagcggctctggctccggcggtggcaccctgaagtacgtggaggatgtgacaaacgtggtcagacgggatgtggagaagtggggccccttcgatctggtgtacggcagcacccaacccctgggcagctcttgtgaccggtgccctggctggtacatgtttcagttccaccggatcctgcagtacgccctgccgagacaggagtcccagcggccattcttttggattttcatggacaacttgctgctgaccgaggatgaccaggaaactaccactcggttcctgcagaccgaagccgtgaccctgcaggacgtgagaggccgggactaccagaacgccatgcgggtgtggtccaacatccctggactgaaaagcaagcacgcacctctgacccctaaagaagaggagtacctgcaggcccaggtgcggagcagaagcaagctggacgcccctaaggtggatctgctggtgaagaattgcctcctgcccctgagagagtacttcaagtatttcagccagaatagtctgcccctgggaggcagcggcggcggcgccctggtgacatttgaggacgtcgccgtgcggttcacccaggaggaatgggctctgctggatccttctcagaaaatcctgtaccgggacgtgatgagagagacataccggaatctgacctccgtgggcatcaactgggaatgttgggaccttgaagcctgcttcagaagcctgggaagaaacctgagagtgcaggtggtgaagagaaagtgcgagctgaccaacagcggcccctgcgccgagggcggcccaagcagcggcgcccctcctcccagcggcggcagcccagccggctccccaacctctaccgaggagggcacctctgagtccgccacccccgagagcggccctggcacctccaccgagcccagcgagggcagcgcacccggcagccctgccggcagccccacctccacagaggagggaaccagcaccgagcccagcgaaggcagcgccccaggcaccagcaccgagcctagtgagcaggagattaaacggatcaacaagatcagaagaagacttgtgaaagacagcaacaccaagaaggccggcaagacaggccccatgaaaaccctgctggttagagtgatgacacccgatctgagagagcggctggaaaacctgagaaagaagcctgaaaatatcccccagcccatcagcaatacatctagagccaacctgaataagctgctgaccgattacaccgaaatgaagaaggcgatcctgcatgtgtactgggaagagttccagaaggaccctgtgggcctgatgagccgggtggcccagcctgccagcaagaagatcgatcagaacaagctgaaacctgagatggacgagaagggcaacctgaccaccgccggctttgcctgctctcagtgtggccagcccctgttcgtgtacaagctggagcaggtgtctgagaagggcaaggcttacaccaactacttcggacggtgcaatgtggccgagcacgaaaagctgatcctgctggcccagctgaagcccgagaaggatagcgacgaagccgtgacatatagcctgggaaagtttgggcagagggccctggatttctacagcattcatgtgaccaaggagtccacccaccccgtgaagcccctggcccagatcgccggaaacagatacgcctccggacctgtgggaaaggccctgagcgacgcatgtatgggcacaatcgcctccttcctgtctaagtaccaggacatcatcatcgaacaccagaaggtggtgaagggcaaccagaagagactggagagcctgcgggagctggccggcaaggaaaacctggaataccctagcgtgaccctgccacctcagcctcacaccaaggagggcgttgatgcctacaacgaagtgatcgcccgggtgcgaatgtgggtgaacctgaacctgtggcagaagctgaagctaagcagagatgatgccaagcctctgctgagactgaagggattcccttcctttcctctggtcgagagacaggccaacgaagtggactggtgggacatggtgtgtaacgtgaagaagctgatcaacgagaaaaaggaggatggcaaggtgttttggcagaatctggctggctacaagagacaggaagccctgagaccatacctgagcagcgaggaagatcggaagaagggaaagaaattcgctcggtaccagctgggcgacctgctgctgcacctggaaaagaagcacggcgaggactggggaaaggtgtacgacgaggcctgggagcggattgacaagaaagtggaaggcctgagcaagcacatcaagctggaagaggaacggagaagcgaggacgcccagagcaaggccgccctgaccgactggctgcgggctaaggccagcttcgtgatcgagggcctgaaggaggccgacaaggacgagttctgcagatgcgagctgaagctgcagaagtggtacggggacctgcggggaaagcccttcgccatcgaagccgagaacagcatcctggacatcagcggcttcagcaagcagtacaactgtgccttcatctggcagaaggacggcgtgaagaagctgaacctgtacctgatcatcaactacttcaagggcggcaagctgcggttcaagaagatcaaacctgaagccttcgaagccaacagattctacaccgtgatcaacaaaaagagcggcgagatcgtgcccatggaggtgaacttcaacttcgacgaccccaacctgatcatcctgcctctggcctttggcaagagacagggcagagaattcatctggaacgacctgctgtccctggaaaccggcagcctgaagctggccaacggaagagtgatcgagaagacactgtacaacagaagaacccggcaggatgagcctgccctgttcgtggccctgaccttcgagcggcgggaggtcctggactcctccaatatcaaaccaatgaacctgatcggcgtggcaagaggcgaaaacatccccgccgtgatcgccctgaccgaccccgagggctgcccactgagccggtttaaggatagcctgggaaacccaacccacatcctgagaatcggcgagagctataaggagaagcagcggaccatccaggccaagaaggaggtggagcagcggagagccggcggctacagccggaagtacgccagcaaagccaagaatctggcagacgatatggtgagaaacaccgctagagatctgctgtactacgccgtgacccaggatgccatgctgatcttcgccaacctgagccggggcttcggccggcagggcaagcggaccttcatggccgagagacagtacacacggatggaggactggctgaccgccaagctggcctacgagggcctgagcaagacctacctgtccaagacactggcccagtacacctccaagacatgcagcaactgtgggtttaccatcaccagcgccgactacgacagggtgctggagaagctgaagaagacagcaacaggctggatgaccacaattaacggcaaggagctgaaggtggagggccagattacctactacaacagatacaagagacagaacgtagtcaaggacctgtccgtcgagctggatagactgagcgaagaatctgtgaacaacgacatctcctcctggacaaagggcagaagcggagaagctctgagcctcctgaagaaaagattctcccatagacccgtgcaggagaagttcgtgtgcctgaactgcggcttcgagacacacgcagccgagcaagccgccctgaacatcgccagatcctggctgttcctgcggagccaggagtacaagaaataccagacaaacaagacaaccggcaacaccgataagagagccttcgtcgagacctggcagtccttttaccggaagaagcttaaggaggtgtggaaacctgccgtgcggtctggcggatctggcggaggctccaagaccgcccccgtgaccttcgacgacgtggccgtgtacttcagcgccgaggagtgggaggagctggccgagtggcagaaggagctgtacaaggacgtgatgagggacaactacgaggccctgatcagcctgggccacgccgccgccaagcccgacatcatccagctgctggagcacggcgaggagccctgcgtgaagggccacaaggacagcggcaacggcaaggccttcaacttcatcagcggcggcccaagcagcggcgcccctcctcccagcggcggcagcccagccggctccccaacctctaccgaggagggcacctctgagtccgccacccccgagagcggccctggcacctccaccgagcccagcgagggcagcgcacccggcagccctgccggcagccccacctccacagaggagggaaccagcaccgagcccagcgaaggcagcgccccaggcaccagcaccgagcctagtgagcaggagattaaacggatcaacaagatcagaagaagacttgtgaaagacagcaacaccaagaaggccggcaagacaggccccatgaaaaccctgctggttagagtgatgacacccgatctgagagagcggctggaaaacctgagaaagaagcctgaaaatatcccccagcccatcagcaatacatctagagccaacctgaataagctgctgaccgattacaccgaaatgaagaaggcgatcctgcatgtgtactgggaagagttccagaaggaccctgtgggcctgatgagccgggtggcccagcctgccagcaagaagatcgatcagaacaagctgaaacctgagatggacgagaagggcaacctgaccaccgccggctttgcctgctctcagtgtggccagcccctgttcgtgtacaagctggagcaggtgtctgagaagggcaaggcttacaccaactacttcggacggtgcaatgtggccgagcacgaaaagctgatcctgctggcccagctgaagcccgagaaggatagcgacgaagccgtgacatatagcctgggaaagtttgggcagagggccctggatttctacagcattcatgtgaccaaggagtccacccaccccgtgaagcccctggcccagatcgccggaaacagatacgcctccggacctgtgggaaaggccctgagcgacgcatgtatgggcacaatcgcctccttcctgtctaagtaccaggacatcatcatcgaacaccagaaggtggtgaagggcaaccagaagagactggagagcctgcgggagctggccggcaaggaaaacctggaataccctagcgtgaccctgccacctcagcctcacaccaaggagggcgttgatgcctacaacgaagtgatcgcccgggtgcgaatgtgggtgaacctgaacctgtggcagaagctgaagctaagcagagatgatgccaagcctctgctgagactgaagggattcccttcctttcctctggtcgagagacaggccaacgaagtggactggtgggacatggtgtgtaacgtgaagaagctgatcaacgagaaaaaggaggatggcaaggtgttttggcagaatctggctggctacaagagacaggaagccctgagaccatacctgagcagcgaggaagatcggaagaagggaaagaaattcgctcggtaccagctgggcgacctgctgctgcacctggaaaagaagcacggcgaggactggggaaaggtgtacgacgaggcctgggagcggattgacaagaaagtggaaggcctgagcaagcacatcaagctggaagaggaacggagaagcgaggacgcccagagcaaggccgccctgaccgactggctgcgggctaaggccagcttcgtgatcgagggcctgaaggaggccgacaaggacgagttctgcagatgcgagctgaagctgcagaagtggtacggggacctgcggggaaagcccttcgccatcgaagccgagaacagcatcctggacatcagcggcttcagcaagcagtacaactgtgccttcatctggcagaaggacggcgtgaagaagctgaacctgtacctgatcatcaactacttcaagggcggcaagctgcggttcaagaagatcaaacctgaagccttcgaagccaacagattctacaccgtgatcaacaaaaagagcggcgagatcgtgcccatggaggtgaacttcaacttcgacgaccccaacctgatcatcctgcctctggcctttggcaagagacagggcagagaattcatctggaacgacctgctgtccctggaaaccggcagcctgaagctggccaacggaagagtgatcgagaagacactgtacaacagaagaacccggcaggatgagcctgccctgttcgtggccctgaccttcgagcggcgggaggtcctggactcctccaatatcaaaccaatgaacctgatcggcgtggcaagaggcgaaaacatccccgccgtgatcgccctgaccgaccccgagggctgcccactgagccggtttaaggatagcctgggaaacccaacccacatcctgagaatcggcgagagctataaggagaagcagcggaccatccaggccaagaaggaggtggagcagcggagagccggcggctacagccggaagtacgccagcaaagccaagaatctggcagacgatatggtgagaaacaccgctagagatctgctgtactacgccgtgacccaggatgccatgctgatcttcgccaacctgagccggggcttcggccggcagggcaagcggaccttcatggccgagagacagtacacacggatggaggactggctgaccgccaagctggcctacgagggcctgagcaagacctacctgtccaagacactggcccagtacacctccaagacatgcagcaactgtgggtttaccatcaccagcgccgactacgacagggtgctggagaagctgaagaagacagcaacaggctggatgaccacaattaacggcaaggagctgaaggtggagggccagattacctactacaacagatacaagagacagaacgtagtcaaggacctgtccgtcgagctggatagactgagcgaagaatctgtgaacaacgacatctcctcctggacaaagggcagaagcggagaagctctgagcctcctgaagaaaagattctcccatagacccgtgcaggagaagttcgtgtgcctgaactgcggcttcgagacacacgcagccgagcaagccgccctgaacatcgccagatcctggctgttcctgcggagccaggagtacaagaaataccagacaaacaagacaaccggcaacaccgataagagagccttcgtcgagacctggcagtccttttaccggaagaagcttaaggaggtgtggaaacctgccgtgcggtctggcggatctggcggaggctcctaagaccgcccccgtgaccttcgacgacgtggccgtgtacttcagcgccgaggagtgggaggagctggccgagtggcagaaggagctgtacaaggacgtgatgagggacaactacgaggccctgatcagcctgggccacgccgccgccaagcccgacatcatccagctgctggagcacggcgaggagccctgcgtgaagggccacaaggacagcggcaacggcaaggccttcaacttcatcagcggatctggctccggcagcggccccaagaaaaagagaaaagtctaagctgccttctgcggggcttgccttctggccatgcccttcttctctcccttgcacctgtacctcttggtctttgaataaagcctgagtaggaaggctagcaaaaaaaaaaaaaaaaaaaaaaaaaaaaaaaaaaaaaaaaaaaaaaaaaaaaaaaaaaaaaaaaaaaaaaaaaaaaaaaa

SEQ ID NO: 15641 - RNA, 9485 nt, synthetic construct
  source 1..9485: mol_type = other RNA
aggaaataagagagaaaagaagagtaagaagaaatataagagccaccatggcccctaagaagaagcgtaaagtgagccggatggaacgcctcgtctacgaggtgcggcagaagtgcagaaacatcgaggacatctgcatctcctgcggatctctgaacgtgaccctggagcacccactgttcatcggcggcatgtgccagaactgtaaaaactgttttctggagtgtgcctatcaatacgacgatgacggctaccagagctactgcaccatctgttgcggcggaagagaggtgctgatgtgtggaaataacaactgctgccggtgcttctgcgtggaatgcgtggacctgctggtgggccccggcgccgcccaggccgctattaaggaagatccttggaactgctacatgtgcggccacaagggcacatacggcctgctgagacggagagaggactggcctagcagactgcagatgttcttcgccaataaccacgaccaggagttcgacccccctaaggtgtaccctcccgtccccgccgagaagagaaagcccatccgggtcctgagcctgttcgatggcatcgccaccggtctgctggtgctgaaggacctgggcatccaggtggataggtacattgcctccgaggtgtgcgaggactccatcaccgtgggaatggtgcgtcatcagggcaagatcatgtacgtgggcgacgtgcggagcgtgacacagaagcatatccaggagtggggccctttcgacctggtgatcggcggcagcccttgcaatgacctgagcatcgtgaacccagcccggaagggcctgtacgagggaaccggcagactgttcttcgagttttacagactgctgcacgacgcccggcctaaggaaggcgacgaccggcccttcttttggctgttcgagaatgtggtggccatgggagtcagcgacaagcgggatattagccggttcctggagagcaaccccgtgatgatcgatgccaaggaagtgagcgccgcccaccgggccagatacttctggggcaatctgcctggcatgaacagacccctggccagcaccgtgaacgacaagctggagctgcaggagtgcctggagcacggccggatcgccaagttcagcaaggtgagaaccatcaccacccgaagcaacagcatcaaacaaggcaaggaccagcactttcctgtgttcatgaacgagaaggaggacatcctgtggtgtaccgagatggagagagtgttcgggttcccagtccactacacagatgtcagcaacatgtctagactggccagacagagactgctgggaagaagctggtccgtccctgtgatcagacacctgttcgcccctctgaaggagtacttcgcctgcgtgagcagcggcaacagcaacgccaacagccggggccccagcttctctagcggcctggtgccactgtccctgagagggagccacatgggccccatggagatctacaaaaccgtgagcgcctggaagcggcagcctgtgcgcgtgctgagcctgtttcggaatatcgataaagtcctgaaaagcctgggattcctggagagcggctctggctccggcggtggcaccctgaagtacgtggaggatgtgacaaacgtggtcagacgggatgtggagaagtggggccccttcgatctggtgtacggcagcacccaacccctgggcagctcttgtgaccggtgccctggctggtacatgtttcagttccaccggatcctgcagtacgccctgccgagacaggagtcccagcggccattcttttggattttcatggacaacttgctgctgaccgaggatgaccaggaaactaccactcggttcctgcagaccgaagccgtgaccctgcaggacgtgagaggccgggactaccagaacgccatgcgggtgtggtccaacatccctggactgaaaagcaagcacgcacctctgacccctaaagaagaggagtacctgcaggcccaggtgcggagcagaagcaagctggacgcccctaaggtggatctgctggtgaagaattgcctcctgcccctgagagagtacttcaagtatttcagccagaatagtctgcccctgggaggcagcggcggcggcgccctggtgacatttgaggacgtcgccgtgcggttcacccaggaggaatgggctctgctggatccttctcagaaaatcctgtaccgggacgtgatgagagagacataccggaatctgacctccgtgggcatcaactgggaatgttgggaccttgaagcctgcttcagaagcctgggaagaaacctgagagtgcaggtggtgaagagaaagtgcgagctgaccaacagcggcccctgcgccgagggcggcccaagcagcggcgcccctcctcccagcggcggcagcccagccggctccccaacctctaccgaggagggcacctctgagtccgccacccccgagagcggccctggcacctccaccgagcccagcgagggcagcgcacccggcagccctgccggcagccccacctccacagaggagggaaccagcaccgagcccagcgaaggcagcgccccaggcaccagcaccgagcctagtgagcaggagattaaacggatcaacaagatcagaagaagacttgtgaaagacagcaacaccaagaaggccggcaagacaggccccatgaaaaccctgctggttagagtgatgacacccgatctgagagagcggctggaaaacctgagaaagaagcctgaaaatatcccccagcccatcagcaatacatctagagccaacctgaataagctgctgaccgattacaccgaaatgaagaaggcgatcctgcatgtgtactgggaagagttccagaaggaccctgtgggcctgatgagccgggtggcccagcctgccagcaagaagatcgatcagaacaagctgaaacctgagatggacgagaagggcaacctgaccaccgccggctttgcctgctctcagtgtggccagcccctgttcgtgtacaagctggagcaggtgtctgagaagggcaaggcttacaccaactacttcggacggtgcaatgtggccgagcacgaaaagctgatcctgctggcccagctgaagcccgagaaggatagcgacgaagccgtgacatatagcctgggaaagtttgggcagagggccctggatttctacagcattcatgtgaccaaggagtccacccaccccgtgaagcccctggcccagatcgccggaaacagatacgcctccggacctgtgggaaaggccctgagcgacgcatgtatgggcacaatcgcctccttcctgtctaagtaccaggacatcatcatcgaacaccagaaggtggtgaagggcaaccagaagagactggagagcctgcgggagctggccggcaaggaaaacctggaataccctagcgtgaccctgccacctcagcctcacaccaaggagggcgttgatgcctacaacgaagtgatcgcccgggtgcgaatgtgggtgaacctgaacctgtggcagaagctgaagctaagcagagatgatgccaagcctctgctgagactgaagggattcccttcctttcctctggtcgagagacaggccaacgaagtggactggtgggacatggtgtgtaacgtgaagaagctgatcaacgagaaaaaggaggatggcaaggtgttttggcagaatctggctggctacaagagacaggaagccctgagaccatacctgagcagcgaggaagatcggaagaagggaaagaaattcgctcggtaccagctgggcgacctgctgctgcacctggaaaagaagcacggcgaggactggggaaaggtgtacgacgaggcctgggagcggattgacaagaaagtggaaggcctgagcaagcacatcaagctggaagaggaacggagaagcgaggacgcccagagcaaggccgccctgaccgactggctgcgggctaaggccagcttcgtgatcgagggcctgaaggaggccgacaaggacgagttctgcagatgcgagctgaagctgcagaagtggtacggggacctgcggggaaagcccttcgccatcgaagccgagaacagcatcctggacatcagcggcttcagcaagcagtacaactgtgccttcatctggcagaaggacggcgtgaagaagctgaacctgtacctgatcatcaactacttcaagggcggcaagctgcggttcaagaagatcaaacctgaagccttcgaagccaacagattctacaccgtgatcaacaaaaagagcggcgagatcgtgcccatggaggtgaacttcaacttcgacgaccccaacctgatcatcctgcctctggcctttggcaagagacagggcagagaattcatctggaacgacctgctgtccctggaaaccggcagcctgaagctggccaacggaagagtgatcgagaagacactgtacaacagaagaacccggcaggatgagcctgccctgttcgtggccctgaccttcgagcggcgggaggtcctggactcctccaatatcaaaccaatgaacctgatcggcgtggcaagaggcgaaaacatccccgccgtgatcgccctgaccgaccccgagggctgcccactgagccggtttaaggatagcctgggaaacccaacccacatcctgagaatcggcgagagctataaggagaagcagcggaccatccaggccaagaaggaggtggagcagcggagagccggcggctacagccggaagtacgccagcaaagccaagaatctggcagacgatatggtgagaaacaccgctagagatctgctgtactacgccgtgacccaggatgccatgctgatcttcgccaacctgagccggggcttcggccggcagggcaagcggaccttcatggccgagagacagtacacacggatggaggactggctgaccgccaagctggcctacgagggcctgagcaagacctacctgtccaagacactggcccagtacacctccaagacatgcagcaactgtgggtttaccatcaccagcgccgactacgacagggtgctggagaagctgaagaagacagcaacaggctggatgaccacaattaacggcaaggagctgaaggtggagggccagattacctactacaacagatacaagagacagaacgtagtcaaggacctgtccgtcgagctggatagactgagcgaagaatctgtgaacaacgacatctcctcctggacaaagggcagaagcggagaagctctgagcctcctgaagaaaagattctcccatagacccgtgcaggagaagttcgtgtgcctgaactgcggcttcgagacacacgcagccgagcaagccgccctgaacatcgccagatcctggctgttcctgcggagccaggagtacaagaaataccagacaaacaagacaaccggcaacaccgataagagagccttcgtcgagacctggcagtccttttaccggaagaagcttaaggaggtgtggaaacctgccgtgcggtctggcggatctggcggaggctccatggccgtggacctgctgagcgcccaggagagggtgaccttcagggacgtggccgtgttcttcagccaggacgagtggctgcacctggacagcgcccagagggccctgtacagggaggtgatgctggagaactacagcatcctggtgagcctgggcatccccttcagcatgcccaagctgatccaccagctgcagcagggcgaggacccctgcatggtggagagggaggtgcccagcgacaccggcggcccaagcagcggcgcccctcctcccagcggcggcagcccagccggctccccaacctctaccgaggagggcacctctgagtccgccacccccgagagcggccctggcacctccaccgagcccagcgagggcagcgcacccggcagccctgccggcagccccacctccacagaggagggaaccagcaccgagcccagcgaaggcagcgccccaggcaccagcaccgagcctagtgagcaggagattaaacggatcaacaagatcagaagaagacttgtgaaagacagcaacaccaagaaggccggcaagacaggccccatgaaaaccctgctggttagagtgatgacacccgatctgagagagcggctggaaaacctgagaaagaagcctgaaaatatcccccagcccatcagcaatacatctagagccaacctgaataagctgctgaccgattacaccgaaatgaagaaggcgatcctgcatgtgtactgggaagagttccagaaggaccctgtgggcctgatgagccgggtggcccagcctgccagcaagaagatcgatcagaacaagctgaaacctgagatggacgagaagggcaacctgaccaccgccggctttgcctgctctcagtgtggccagcccctgttcgtgtacaagctggagcaggtgtctgagaagggcaaggcttacaccaactacttcggacggtgcaatgtggccgagcacgaaaagctgatcctgctggcccagctgaagcccgagaaggatagcgacgaagccgtgacatatagcctgggaaagtttgggcagagggccctggatttctacagcattcatgtgaccaaggagtccacccaccccgtgaagcccctggcccagatcgccggaaacagatacgcctccggacctgtgggaaaggccctgagcgacgcatgtatgggcacaatcgcctccttcctgtctaagtaccaggacatcatcatcgaacaccagaaggtggtgaagggcaaccagaagagactggagagcctgcgggagctggccggcaaggaaaacctggaataccctagcgtgaccctgccacctcagcctcacaccaaggagggcgttgatgcctacaacgaagtgatcgcccgggtgcgaatgtgggtgaacctgaacctgtggcagaagctgaagctaagcagagatgatgccaagcctctgctgagactgaagggattcccttcctttcctctggtcgagagacaggccaacgaagtggactggtgggacatggtgtgtaacgtgaagaagctgatcaacgagaaaaaggaggatggcaaggtgttttggcagaatctggctggctacaagagacaggaagccctgagaccatacctgagcagcgaggaagatcggaagaagggaaagaaattcgctcggtaccagctgggcgacctgctgctgcacctggaaaagaagcacggcgaggactggggaaaggtgtacgacgaggcctgggagcggattgacaagaaagtggaaggcctgagcaagcacatcaagctggaagaggaacggagaagcgaggacgcccagagcaaggccgccctgaccgactggctgcgggctaaggccagcttcgtgatcgagggcctgaaggaggccgacaaggacgagttctgcagatgcgagctgaagctgcagaagtggtacggggacctgcggggaaagcccttcgccatcgaagccgagaacagcatcctggacatcagcggcttcagcaagcagtacaactgtgccttcatctggcagaaggacggcgtgaagaagctgaacctgtacctgatcatcaactacttcaagggcggcaagctgcggttcaagaagatcaaacctgaagccttcgaagccaacagattctacaccgtgatcaacaaaaagagcggcgagatcgtgcccatggaggtgaacttcaacttcgacgaccccaacctgatcatcctgcctctggcctttggcaagagacagggcagagaattcatctggaacgacctgctgtccctggaaaccggcagcctgaagctggccaacggaagagtgatcgagaagacactgtacaacagaagaacccggcaggatgagcctgccctgttcgtggccctgaccttcgagcggcgggaggtcctggactcctccaatatcaaaccaatgaacctgatcggcgtggcaagaggcgaaaacatccccgccgtgatcgccctgaccgaccccgagggctgcccactgagccggtttaaggatagcctgggaaacccaacccacatcctgagaatcggcgagagctataaggagaagcagcggaccatccaggccaagaaggaggtggagcagcggagagccggcggctacagccggaagtacgccagcaaagccaagaatctggcagacgatatggtgagaaacaccgctagagatctgctgtactacgccgtgacccaggatgccatgctgatcttcgccaacctgagccggggcttcggccggcagggcaagcggaccttcatggccgagagacagtacacacggatggaggactggctgaccgccaagctggcctacgagggcctgagcaagacctacctgtccaagacactggcccagtacacctccaagacatgcagcaactgtgggtttaccatcaccagcgccgactacgacagggtgctggagaagctgaagaagacagcaacaggctggatgaccacaattaacggcaaggagctgaaggtggagggccagattacctactacaacagatacaagagacagaacgtagtcaaggacctgtccgtcgagctggatagactgagcgaagaatctgtgaacaacgacatctcctcctggacaaagggcagaagcggagaagctctgagcctcctgaagaaaagattctcccatagacccgtgcaggagaagttcgtgtgcctgaactgcggcttcgagacacacgcagccgagcaagccgccctgaacatcgccagatcctggctgttcctgcggagccaggagtacaagaaataccagacaaacaagacaaccggcaacaccgataagagagccttcgtcgagacctggcagtccttttaccggaagaagcttaaggaggtgtggaaacctgccgtgcggtctggcggatctggcggaggctcctatggccgtggacctgctgagcgcccaggagagggtgaccttcagggacgtggccgtgttcttcagccaggacgagtggctgcacctggacagcgcccagagggccctgtacagggaggtgatgctggagaactacagcatcctggtgagcctgggcatccccttcagcatgcccaagctgatccaccagctgcagcagggcgaggacccctgcatggtggagagggaggtgcccagcgacaccggatctggctccggcagcggccccaagaaaaagagaaaagtctaagctgccttctgcggggcttgccttctggccatgcccttcttctctcccttgcacctgtacctcttggtctttgaataaagcctgagtaggaaggctagcaaaaaaaaaaaaaaaaaaaaaaaaaaaaaaaaaaaaaaaaaaaaaaaaaaaaaaaaaaaaaaaaaaaaaaaaaaaaaaaa

SEQ ID NO: 15642 - RNA, 9485 nt, synthetic construct
  source 1..9485: mol_type = other RNA
aggaaataagagagaaaagaagagtaagaagaaatataagagccaccatggcccctaagaagaagcgtaaagtgagccggatggaacgcctcgtctacgaggtgcggcagaagtgcagaaacatcgaggacatctgcatctcctgcggatctctgaacgtgaccctggagcacccactgttcatcggcggcatgtgccagaactgtaaaaactgttttctggagtgtgcctatcaatacgacgatgacggctaccagagctactgcaccatctgttgcggcggaagagaggtgctgatgtgtggaaataacaactgctgccggtgcttctgcgtggaatgcgtggacctgctggtgggccccggcgccgcccaggccgctattaaggaagatccttggaactgctacatgtgcggccacaagggcacatacggcctgctgagacggagagaggactggcctagcagactgcagatgttcttcgccaataaccacgaccaggagttcgacccccctaaggtgtaccctcccgtccccgccgagaagagaaagcccatccgggtcctgagcctgttcgatggcatcgccaccggtctgctggtgctgaaggacctgggcatccaggtggataggtacattgcctccgaggtgtgcgaggactccatcaccgtgggaatggtgcgtcatcagggcaagatcatgtacgtgggcgacgtgcggagcgtgacacagaagcatatccaggagtggggccctttcgacctggtgatcggcggcagcccttgcaatgacctgagcatcgtgaacccagcccggaagggcctgtacgagggaaccggcagactgttcttcgagttttacagactgctgcacgacgcccggcctaaggaaggcgacgaccggcccttcttttggctgttcgagaatgtggtggccatgggagtcagcgacaagcgggatattagccggttcctggagagcaaccccgtgatgatcgatgccaaggaagtgagcgccgcccaccgggccagatacttctggggcaatctgcctggcatgaacagacccctggccagcaccgtgaacgacaagctggagctgcaggagtgcctggagcacggccggatcgccaagttcagcaaggtgagaaccatcaccacccgaagcaacagcatcaaacaaggcaaggaccagcactttcctgtgttcatgaacgagaaggaggacatcctgtggtgtaccgagatggagagagtgttcgggttcccagtccactacacagatgtcagcaacatgtctagactggccagacagagactgctgggaagaagctggtccgtccctgtgatcagacacctgttcgcccctctgaaggagtacttcgcctgcgtgagcagcggcaacagcaacgccaacagccggggccccagcttctctagcggcctggtgccactgtccctgagagggagccacatgggccccatggagatctacaaaaccgtgagcgcctggaagcggcagcctgtgcgcgtgctgagcctgtttcggaatatcgataaagtcctgaaaagcctgggattcctggagagcggctctggctccggcggtggcaccctgaagtacgtggaggatgtgacaaacgtggtcagacgggatgtggagaagtggggccccttcgatctggtgtacggcagcacccaacccctgggcagctcttgtgaccggtgccctggctggtacatgtttcagttccaccggatcctgcagtacgccctgccgagacaggagtcccagcggccattcttttggattttcatggacaacttgctgctgaccgaggatgaccaggaaactaccactcggttcctgcagaccgaagccgtgaccctgcaggacgtgagaggccgggactaccagaacgccatgcgggtgtggtccaacatccctggactgaaaagcaagcacgcacctctgacccctaaagaagaggagtacctgcaggcccaggtgcggagcagaagcaagctggacgcccctaaggtggatctgctggtgaagaattgcctcctgcccctgagagagtacttcaagtatttcagccagaatagtctgcccctgggaggcagcggcggcggcgccctggtgacatttgaggacgtcgccgtgcggttcacccaggaggaatgggctctgctggatccttctcagaaaatcctgtaccgggacgtgatgagagagacataccggaatctgacctccgtgggcatcaactgggaatgttgggaccttgaagcctgcttcagaagcctgggaagaaacctgagagtgcaggtggtgaagagaaagtgcgagctgaccaacagcggcccctgcgccgagggcggcccaagcagcggcgcccctcctcccagcggcggcagcccagccggctccccaacctctaccgaggagggcacctctgagtccgccacccccgagagcggccctggcacctccaccgagcccagcgagggcagcgcacccggcagccctgccggcagccccacctccacagaggagggaaccagcaccgagcccagcgaaggcagcgccccaggcaccagcaccgagcctagtgagcaggagattaaacggatcaacaagatcagaagaagacttgtgaaagacagcaacaccaagaaggccggcaagacaggccccatgaaaaccctgctggttagagtgatgacacccgatctgagagagcggctggaaaacctgagaaagaagcctgaaaatatcccccagcccatcagcaatacatctagagccaacctgaataagctgctgaccgattacaccgaaatgaagaaggcgatcctgcatgtgtactgggaagagttccagaaggaccctgtgggcctgatgagccgggtggcccagcctgccagcaagaagatcgatcagaacaagctgaaacctgagatggacgagaagggcaacctgaccaccgccggctttgcctgctctcagtgtggccagcccctgttcgtgtacaagctggagcaggtgtctgagaagggcaaggcttacaccaactacttcggacggtgcaatgtggccgagcacgaaaagctgatcctgctggcccagctgaagcccgagaaggatagcgacgaagccgtgacatatagcctgggaaagtttgggcagagggccctggatttctacagcattcatgtgaccaaggagtccacccaccccgtgaagcccctggcccagatcgccggaaacagatacgcctccggacctgtgggaaaggccctgagcgacgcatgtatgggcacaatcgcctccttcctgtctaagtaccaggacatcatcatcgaacaccagaaggtggtgaagggcaaccagaagagactggagagcctgcgggagctggccggcaaggaaaacctggaataccctagcgtgaccctgccacctcagcctcacaccaaggagggcgttgatgcctacaacgaagtgatcgcccgggtgcgaatgtgggtgaacctgaacctgtggcagaagctgaagctaagcagagatgatgccaagcctctgctgagactgaagggattcccttcctttcctctggtcgagagacaggccaacgaagtggactggtgggacatggtgtgtaacgtgaagaagctgatcaacgagaaaaaggaggatggcaaggtgttttggcagaatctggctggctacaagagacaggaagccctgagaccatacctgagcagcgaggaagatcggaagaagggaaagaaattcgctcggtaccagctgggcgacctgctgctgcacctggaaaagaagcacggcgaggactggggaaaggtgtacgacgaggcctgggagcggattgacaagaaagtggaaggcctgagcaagcacatcaagctggaagaggaacggagaagcgaggacgcccagagcaaggccgccctgaccgactggctgcgggctaaggccagcttcgtgatcgagggcctgaaggaggccgacaaggacgagttctgcagatgcgagctgaagctgcagaagtggtacggggacctgcggggaaagcccttcgccatcgaagccgagaacagcatcctggacatcagcggcttcagcaagcagtacaactgtgccttcatctggcagaaggacggcgtgaagaagctgaacctgtacctgatcatcaactacttcaagggcggcaagctgcggttcaagaagatcaaacctgaagccttcgaagccaacagattctacaccgtgatcaacaaaaagagcggcgagatcgtgcccatggaggtgaacttcaacttcgacgaccccaacctgatcatcctgcctctggcctttggcaagagacagggcagagaattcatctggaacgacctgctgtccctggaaaccggcagcctgaagctggccaacggaagagtgatcgagaagacactgtacaacagaagaacccggcaggatgagcctgccctgttcgtggccctgaccttcgagcggcgggaggtcctggactcctccaatatcaaaccaatgaacctgatcggcgtggcaagaggcgaaaacatccccgccgtgatcgccctgaccgaccccgagggctgcccactgagccggtttaaggatagcctgggaaacccaacccacatcctgagaatcggcgagagctataaggagaagcagcggaccatccaggccaagaaggaggtggagcagcggagagccggcggctacagccggaagtacgccagcaaagccaagaatctggcagacgatatggtgagaaacaccgctagagatctgctgtactacgccgtgacccaggatgccatgctgatcttcgccaacctgagccggggcttcggccggcagggcaagcggaccttcatggccgagagacagtacacacggatggaggactggctgaccgccaagctggcctacgagggcctgagcaagacctacctgtccaagacactggcccagtacacctccaagacatgcagcaactgtgggtttaccatcaccagcgccgactacgacagggtgctggagaagctgaagaagacagcaacaggctggatgaccacaattaacggcaaggagctgaaggtggagggccagattacctactacaacagatacaagagacagaacgtagtcaaggacctgtccgtcgagctggatagactgagcgaagaatctgtgaacaacgacatctcctcctggacaaagggcagaagcggagaagctctgagcctcctgaagaaaagattctcccatagacccgtgcaggagaagttcgtgtgcctgaactgcggcttcgagacacacgcagccgagcaagccgccctgaacatcgccagatcctggctgttcctgcggagccaggagtacaagaaataccagacaaacaagacaaccggcaacaccgataagagagccttcgtcgagacctggcagtccttttaccggaagaagcttaaggaggtgtggaaacctgccgtgcggtctggcggatctggcggaggctccccccaggagctggtgaccttcgaggacgtggccgtgtacctgaccaaggaggagtgggagcacctgggccccgcccagaggaggctgtacagggacgtgatgctggagaactacgagaacgtggtgagcctgggcttccccgtgagcaagcccgacctgatcagccagctggagcagggcgaggtgccctgcctgcccgacctgcccaggaccgaggtgcccgagatccacggcggccccctgggcggcccaagcagcggcgcccctcctcccagcggcggcagcccagccggctccccaacctctaccgaggagggcacctctgagtccgccacccccgagagcggccctggcacctccaccgagcccagcgagggcagcgcacccggcagccctgccggcagccccacctccacagaggagggaaccagcaccgagcccagcgaaggcagcgccccaggcaccagcaccgagcctagtgagcaggagattaaacggatcaacaagatcagaagaagacttgtgaaagacagcaacaccaagaaggccggcaagacaggccccatgaaaaccctgctggttagagtgatgacacccgatctgagagagcggctggaaaacctgagaaagaagcctgaaaatatcccccagcccatcagcaatacatctagagccaacctgaataagctgctgaccgattacaccgaaatgaagaaggcgatcctgcatgtgtactgggaagagttccagaaggaccctgtgggcctgatgagccgggtggcccagcctgccagcaagaagatcgatcagaacaagctgaaacctgagatggacgagaagggcaacctgaccaccgccggctttgcctgctctcagtgtggccagcccctgttcgtgtacaagctggagcaggtgtctgagaagggcaaggcttacaccaactacttcggacggtgcaatgtggccgagcacgaaaagctgatcctgctggcccagctgaagcccgagaaggatagcgacgaagccgtgacatatagcctgggaaagtttgggcagagggccctggatttctacagcattcatgtgaccaaggagtccacccaccccgtgaagcccctggcccagatcgccggaaacagatacgcctccggacctgtgggaaaggccctgagcgacgcatgtatgggcacaatcgcctccttcctgtctaagtaccaggacatcatcatcgaacaccagaaggtggtgaagggcaaccagaagagactggagagcctgcgggagctggccggcaaggaaaacctggaataccctagcgtgaccctgccacctcagcctcacaccaaggagggcgttgatgcctacaacgaagtgatcgcccgggtgcgaatgtgggtgaacctgaacctgtggcagaagctgaagctaagcagagatgatgccaagcctctgctgagactgaagggattcccttcctttcctctggtcgagagacaggccaacgaagtggactggtgggacatggtgtgtaacgtgaagaagctgatcaacgagaaaaaggaggatggcaaggtgttttggcagaatctggctggctacaagagacaggaagccctgagaccatacctgagcagcgaggaagatcggaagaagggaaagaaattcgctcggtaccagctgggcgacctgctgctgcacctggaaaagaagcacggcgaggactggggaaaggtgtacgacgaggcctgggagcggattgacaagaaagtggaaggcctgagcaagcacatcaagctggaagaggaacggagaagcgaggacgcccagagcaaggccgccctgaccgactggctgcgggctaaggccagcttcgtgatcgagggcctgaaggaggccgacaaggacgagttctgcagatgcgagctgaagctgcagaagtggtacggggacctgcggggaaagcccttcgccatcgaagccgagaacagcatcctggacatcagcggcttcagcaagcagtacaactgtgccttcatctggcagaaggacggcgtgaagaagctgaacctgtacctgatcatcaactacttcaagggcggcaagctgcggttcaagaagatcaaacctgaagccttcgaagccaacagattctacaccgtgatcaacaaaaagagcggcgagatcgtgcccatggaggtgaacttcaacttcgacgaccccaacctgatcatcctgcctctggcctttggcaagagacagggcagagaattcatctggaacgacctgctgtccctggaaaccggcagcctgaagctggccaacggaagagtgatcgagaagacactgtacaacagaagaacccggcaggatgagcctgccctgttcgtggccctgaccttcgagcggcgggaggtcctggactcctccaatatcaaaccaatgaacctgatcggcgtggcaagaggcgaaaacatccccgccgtgatcgccctgaccgaccccgagggctgcccactgagccggtttaaggatagcctgggaaacccaacccacatcctgagaatcggcgagagctataaggagaagcagcggaccatccaggccaagaaggaggtggagcagcggagagccggcggctacagccggaagtacgccagcaaagccaagaatctggcagacgatatggtgagaaacaccgctagagatctgctgtactacgccgtgacccaggatgccatgctgatcttcgccaacctgagccggggcttcggccggcagggcaagcggaccttcatggccgagagacagtacacacggatggaggactggctgaccgccaagctggcctacgagggcctgagcaagacctacctgtccaagacactggcccagtacacctccaagacatgcagcaactgtgggtttaccatcaccagcgccgactacgacagggtgctggagaagctgaagaagacagcaacaggctggatgaccacaattaacggcaaggagctgaaggtggagggccagattacctactacaacagatacaagagacagaacgtagtcaaggacctgtccgtcgagctggatagactgagcgaagaatctgtgaacaacgacatctcctcctggacaaagggcagaagcggagaagctctgagcctcctgaagaaaagattctcccatagacccgtgcaggagaagttcgtgtgcctgaactgcggcttcgagacacacgcagccgagcaagccgccctgaacatcgccagatcctggctgttcctgcggagccaggagtacaagaaataccagacaaacaagacaaccggcaacaccgataagagagccttcgtcgagacctggcagtccttttaccggaagaagcttaaggaggtgtggaaacctgccgtgcggtctggcggatctggcggaggctcctccccaggagctggtgaccttcgaggacgtggccgtgtacctgaccaaggaggagtgggagcacctgggccccgcccagaggaggctgtacagggacgtgatgctggagaactacgagaacgtggtgagcctgggcttccccgtgagcaagcccgacctgatcagccagctggagcagggcgaggtgccctgcctgcccgacctgcccaggaccgaggtgcccgagatccacggcggccccctgggatctggctccggcagcggccccaagaaaaagagaaaagtctaagctgccttctgcggggcttgccttctggccatgcccttcttctctcccttgcacctgtacctcttggtctttgaataaagcctgagtaggaaggctagcaaaaaaaaaaaaaaaaaaaaaaaaaaaaaaaaaaaaaaaaaaaaaaaaaaaaaaaaaaaaaaaaaaaaaaaaaaaaaaaa

SEQ ID NO: 15643 - RNA, 9485 nt, synthetic construct
  source 1..9485: mol_type = other RNA
aggaaataagagagaaaagaagagtaagaagaaatataagagccaccatggcccctaagaagaagcgtaaagtgagccggatggaacgcctcgtctacgaggtgcggcagaagtgcagaaacatcgaggacatctgcatctcctgcggatctctgaacgtgaccctggagcacccactgttcatcggcggcatgtgccagaactgtaaaaactgttttctggagtgtgcctatcaatacgacgatgacggctaccagagctactgcaccatctgttgcggcggaagagaggtgctgatgtgtggaaataacaactgctgccggtgcttctgcgtggaatgcgtggacctgctggtgggccccggcgccgcccaggccgctattaaggaagatccttggaactgctacatgtgcggccacaagggcacatacggcctgctgagacggagagaggactggcctagcagactgcagatgttcttcgccaataaccacgaccaggagttcgacccccctaaggtgtaccctcccgtccccgccgagaagagaaagcccatccgggtcctgagcctgttcgatggcatcgccaccggtctgctggtgctgaaggacctgggcatccaggtggataggtacattgcctccgaggtgtgcgaggactccatcaccgtgggaatggtgcgtcatcagggcaagatcatgtacgtgggcgacgtgcggagcgtgacacagaagcatatccaggagtggggccctttcgacctggtgatcggcggcagcccttgcaatgacctgagcatcgtgaacccagcccggaagggcctgtacgagggaaccggcagactgttcttcgagttttacagactgctgcacgacgcccggcctaaggaaggcgacgaccggcccttcttttggctgttcgagaatgtggtggccatgggagtcagcgacaagcgggatattagccggttcctggagagcaaccccgtgatgatcgatgccaaggaagtgagcgccgcccaccgggccagatacttctggggcaatctgcctggcatgaacagacccctggccagcaccgtgaacgacaagctggagctgcaggagtgcctggagcacggccggatcgccaagttcagcaaggtgagaaccatcaccacccgaagcaacagcatcaaacaaggcaaggaccagcactttcctgtgttcatgaacgagaaggaggacatcctgtggtgtaccgagatggagagagtgttcgggttcccagtccactacacagatgtcagcaacatgtctagactggccagacagagactgctgggaagaagctggtccgtccctgtgatcagacacctgttcgcccctctgaaggagtacttcgcctgcgtgagcagcggcaacagcaacgccaacagccggggccccagcttctctagcggcctggtgccactgtccctgagagggagccacatgggccccatggagatctacaaaaccgtgagcgcctggaagcggcagcctgtgcgcgtgctgagcctgtttcggaatatcgataaagtcctgaaaagcctgggattcctggagagcggctctggctccggcggtggcaccctgaagtacgtggaggatgtgacaaacgtggtcagacgggatgtggagaagtggggccccttcgatctggtgtacggcagcacccaacccctgggcagctcttgtgaccggtgccctggctggtacatgtttcagttccaccggatcctgcagtacgccctgccgagacaggagtcccagcggccattcttttggattttcatggacaacttgctgctgaccgaggatgaccaggaaactaccactcggttcctgcagaccgaagccgtgaccctgcaggacgtgagaggccgggactaccagaacgccatgcgggtgtggtccaacatccctggactgaaaagcaagcacgcacctctgacccctaaagaagaggagtacctgcaggcccaggtgcggagcagaagcaagctggacgcccctaaggtggatctgctggtgaagaattgcctcctgcccctgagagagtacttcaagtatttcagccagaatagtctgcccctgggaggcagcggcggcggcgccctggtgacatttgaggacgtcgccgtgcggttcacccaggaggaatgggctctgctggatccttctcagaaaatcctgtaccgggacgtgatgagagagacataccggaatctgacctccgtgggcatcaactgggaatgttgggaccttgaagcctgcttcagaagcctgggaagaaacctgagagtgcaggtggtgaagagaaagtgcgagctgaccaacagcggcccctgcgccgagggcggcccaagcagcggcgcccctcctcccagcggcggcagcccagccggctccccaacctctaccgaggagggcacctctgagtccgccacccccgagagcggccctggcacctccaccgagcccagcgagggcagcgcacccggcagccctgccggcagccccacctccacagaggagggaaccagcaccgagcccagcgaaggcagcgccccaggcaccagcaccgagcctagtgagcaggagattaaacggatcaacaagatcagaagaagacttgtgaaagacagcaacaccaagaaggccggcaagacaggccccatgaaaaccctgctggttagagtgatgacacccgatctgagagagcggctggaaaacctgagaaagaagcctgaaaatatcccccagcccatcagcaatacatctagagccaacctgaataagctgctgaccgattacaccgaaatgaagaaggcgatcctgcatgtgtactgggaagagttccagaaggaccctgtgggcctgatgagccgggtggcccagcctgccagcaagaagatcgatcagaacaagctgaaacctgagatggacgagaagggcaacctgaccaccgccggctttgcctgctctcagtgtggccagcccctgttcgtgtacaagctggagcaggtgtctgagaagggcaaggcttacaccaactacttcggacggtgcaatgtggccgagcacgaaaagctgatcctgctggcccagctgaagcccgagaaggatagcgacgaagccgtgacatatagcctgggaaagtttgggcagagggccctggatttctacagcattcatgtgaccaaggagtccacccaccccgtgaagcccctggcccagatcgccggaaacagatacgcctccggacctgtgggaaaggccctgagcgacgcatgtatgggcacaatcgcctccttcctgtctaagtaccaggacatcatcatcgaacaccagaaggtggtgaagggcaaccagaagagactggagagcctgcgggagctggccggcaaggaaaacctggaataccctagcgtgaccctgccacctcagcctcacaccaaggagggcgttgatgcctacaacgaagtgatcgcccgggtgcgaatgtgggtgaacctgaacctgtggcagaagctgaagctaagcagagatgatgccaagcctctgctgagactgaagggattcccttcctttcctctggtcgagagacaggccaacgaagtggactggtgggacatggtgtgtaacgtgaagaagctgatcaacgagaaaaaggaggatggcaaggtgttttggcagaatctggctggctacaagagacaggaagccctgagaccatacctgagcagcgaggaagatcggaagaagggaaagaaattcgctcggtaccagctgggcgacctgctgctgcacctggaaaagaagcacggcgaggactggggaaaggtgtacgacgaggcctgggagcggattgacaagaaagtggaaggcctgagcaagcacatcaagctggaagaggaacggagaagcgaggacgcccagagcaaggccgccctgaccgactggctgcgggctaaggccagcttcgtgatcgagggcctgaaggaggccgacaaggacgagttctgcagatgcgagctgaagctgcagaagtggtacggggacctgcggggaaagcccttcgccatcgaagccgagaacagcatcctggacatcagcggcttcagcaagcagtacaactgtgccttcatctggcagaaggacggcgtgaagaagctgaacctgtacctgatcatcaactacttcaagggcggcaagctgcggttcaagaagatcaaacctgaagccttcgaagccaacagattctacaccgtgatcaacaaaaagagcggcgagatcgtgcccatggaggtgaacttcaacttcgacgaccccaacctgatcatcctgcctctggcctttggcaagagacagggcagagaattcatctggaacgacctgctgtccctggaaaccggcagcctgaagctggccaacggaagagtgatcgagaagacactgtacaacagaagaacccggcaggatgagcctgccctgttcgtggccctgaccttcgagcggcgggaggtcctggactcctccaatatcaaaccaatgaacctgatcggcgtggcaagaggcgaaaacatccccgccgtgatcgccctgaccgaccccgagggctgcccactgagccggtttaaggatagcctgggaaacccaacccacatcctgagaatcggcgagagctataaggagaagcagcggaccatccaggccaagaaggaggtggagcagcggagagccggcggctacagccggaagtacgccagcaaagccaagaatctggcagacgatatggtgagaaacaccgctagagatctgctgtactacgccgtgacccaggatgccatgctgatcttcgccaacctgagccggggcttcggccggcagggcaagcggaccttcatggccgagagacagtacacacggatggaggactggctgaccgccaagctggcctacgagggcctgagcaagacctacctgtccaagacactggcccagtacacctccaagacatgcagcaactgtgggtttaccatcaccagcgccgactacgacagggtgctggagaagctgaagaagacagcaacaggctggatgaccacaattaacggcaaggagctgaaggtggagggccagattacctactacaacagatacaagagacagaacgtagtcaaggacctgtccgtcgagctggatagactgagcgaagaatctgtgaacaacgacatctcctcctggacaaagggcagaagcggagaagctctgagcctcctgaagaaaagattctcccatagacccgtgcaggagaagttcgtgtgcctgaactgcggcttcgagacacacgcagccgagcaagccgccctgaacatcgccagatcctggctgttcctgcggagccaggagtacaagaaataccagacaaacaagacaaccggcaacaccgataagagagccttcgtcgagacctggcagtccttttaccggaagaagcttaaggaggtgtggaaacctgccgtgcggtctggcggatctggcggaggctccttccaggaggccgtgaccttcaaggacgtggccgtggtgttcagcgaggaggagctgggcctgctggacagcacccagaggaagctgtacagggacgtgatgctggagaacttcaggaacctggtgagcgtgggccacagcagcagcaagcccgacatgatcagccagctggagagggaggaggagaagctgtacgtgaaggagatctgcaccgagaggggcaggcacagcgacaagaactgcggcggcccaagcagcggcgcccctcctcccagcggcggcagcccagccggctccccaacctctaccgaggagggcacctctgagtccgccacccccgagagcggccctggcacctccaccgagcccagcgagggcagcgcacccggcagccctgccggcagccccacctccacagaggagggaaccagcaccgagcccagcgaaggcagcgccccaggcaccagcaccgagcctagtgagcaggagattaaacggatcaacaagatcagaagaagacttgtgaaagacagcaacaccaagaaggccggcaagacaggccccatgaaaaccctgctggttagagtgatgacacccgatctgagagagcggctggaaaacctgagaaagaagcctgaaaatatcccccagcccatcagcaatacatctagagccaacctgaataagctgctgaccgattacaccgaaatgaagaaggcgatcctgcatgtgtactgggaagagttccagaaggaccctgtgggcctgatgagccgggtggcccagcctgccagcaagaagatcgatcagaacaagctgaaacctgagatggacgagaagggcaacctgaccaccgccggctttgcctgctctcagtgtggccagcccctgttcgtgtacaagctggagcaggtgtctgagaagggcaaggcttacaccaactacttcggacggtgcaatgtggccgagcacgaaaagctgatcctgctggcccagctgaagcccgagaaggatagcgacgaagccgtgacatatagcctgggaaagtttgggcagagggccctggatttctacagcattcatgtgaccaaggagtccacccaccccgtgaagcccctggcccagatcgccggaaacagatacgcctccggacctgtgggaaaggccctgagcgacgcatgtatgggcacaatcgcctccttcctgtctaagtaccaggacatcatcatcgaacaccagaaggtggtgaagggcaaccagaagagactggagagcctgcgggagctggccggcaaggaaaacctggaataccctagcgtgaccctgccacctcagcctcacaccaaggagggcgttgatgcctacaacgaagtgatcgcccgggtgcgaatgtgggtgaacctgaacctgtggcagaagctgaagctaagcagagatgatgccaagcctctgctgagactgaagggattcccttcctttcctctggtcgagagacaggccaacgaagtggactggtgggacatggtgtgtaacgtgaagaagctgatcaacgagaaaaaggaggatggcaaggtgttttggcagaatctggctggctacaagagacaggaagccctgagaccatacctgagcagcgaggaagatcggaagaagggaaagaaattcgctcggtaccagctgggcgacctgctgctgcacctggaaaagaagcacggcgaggactggggaaaggtgtacgacgaggcctgggagcggattgacaagaaagtggaaggcctgagcaagcacatcaagctggaagaggaacggagaagcgaggacgcccagagcaaggccgccctgaccgactggctgcgggctaaggccagcttcgtgatcgagggcctgaaggaggccgacaaggacgagttctgcagatgcgagctgaagctgcagaagtggtacggggacctgcggggaaagcccttcgccatcgaagccgagaacagcatcctggacatcagcggcttcagcaagcagtacaactgtgccttcatctggcagaaggacggcgtgaagaagctgaacctgtacctgatcatcaactacttcaagggcggcaagctgcggttcaagaagatcaaacctgaagccttcgaagccaacagattctacaccgtgatcaacaaaaagagcggcgagatcgtgcccatggaggtgaacttcaacttcgacgaccccaacctgatcatcctgcctctggcctttggcaagagacagggcagagaattcatctggaacgacctgctgtccctggaaaccggcagcctgaagctggccaacggaagagtgatcgagaagacactgtacaacagaagaacccggcaggatgagcctgccctgttcgtggccctgaccttcgagcggcgggaggtcctggactcctccaatatcaaaccaatgaacctgatcggcgtggcaagaggcgaaaacatccccgccgtgatcgccctgaccgaccccgagggctgcccactgagccggtttaaggatagcctgggaaacccaacccacatcctgagaatcggcgagagctataaggagaagcagcggaccatccaggccaagaaggaggtggagcagcggagagccggcggctacagccggaagtacgccagcaaagccaagaatctggcagacgatatggtgagaaacaccgctagagatctgctgtactacgccgtgacccaggatgccatgctgatcttcgccaacctgagccggggcttcggccggcagggcaagcggaccttcatggccgagagacagtacacacggatggaggactggctgaccgccaagctggcctacgagggcctgagcaagacctacctgtccaagacactggcccagtacacctccaagacatgcagcaactgtgggtttaccatcaccagcgccgactacgacagggtgctggagaagctgaagaagacagcaacaggctggatgaccacaattaacggcaaggagctgaaggtggagggccagattacctactacaacagatacaagagacagaacgtagtcaaggacctgtccgtcgagctggatagactgagcgaagaatctgtgaacaacgacatctcctcctggacaaagggcagaagcggagaagctctgagcctcctgaagaaaagattctcccatagacccgtgcaggagaagttcgtgtgcctgaactgcggcttcgagacacacgcagccgagcaagccgccctgaacatcgccagatcctggctgttcctgcggagccaggagtacaagaaataccagacaaacaagacaaccggcaacaccgataagagagccttcgtcgagacctggcagtccttttaccggaagaagcttaaggaggtgtggaaacctgccgtgcggtctggcggatctggcggaggctcctttccaggaggccgtgaccttcaaggacgtggccgtggtgttcagcgaggaggagctgggcctgctggacagcacccagaggaagctgtacagggacgtgatgctggagaacttcaggaacctggtgagcgtgggccacagcagcagcaagcccgacatgatcagccagctggagagggaggaggagaagctgtacgtgaaggagatctgcaccgagaggggcaggcacagcgacaagaactgcggatctggctccggcagcggccccaagaaaaagagaaaagtctaagctgccttctgcggggcttgccttctggccatgcccttcttctctcccttgcacctgtacctcttggtctttgaataaagcctgagtaggaaggctagcaaaaaaaaaaaaaaaaaaaaaaaaaaaaaaaaaaaaaaaaaaaaaaaaaaaaaaaaaaaaaaaaaaaaaaaaaaaaaaaa

SEQ ID NO: 15644 - RNA, 9485 nt, synthetic construct
  source 1..9485: mol_type = other RNA
aggaaataagagagaaaagaagagtaagaagaaatataagagccaccatggcccctaagaagaagcgtaaagtgagccggatggaacgcctcgtctacgaggtgcggcagaagtgcagaaacatcgaggacatctgcatctcctgcggatctctgaacgtgaccctggagcacccactgttcatcggcggcatgtgccagaactgtaaaaactgttttctggagtgtgcctatcaatacgacgatgacggctaccagagctactgcaccatctgttgcggcggaagagaggtgctgatgtgtggaaataacaactgctgccggtgcttctgcgtggaatgcgtggacctgctggtgggccccggcgccgcccaggccgctattaaggaagatccttggaactgctacatgtgcggccacaagggcacatacggcctgctgagacggagagaggactggcctagcagactgcagatgttcttcgccaataaccacgaccaggagttcgacccccctaaggtgtaccctcccgtccccgccgagaagagaaagcccatccgggtcctgagcctgttcgatggcatcgccaccggtctgctggtgctgaaggacctgggcatccaggtggataggtacattgcctccgaggtgtgcgaggactccatcaccgtgggaatggtgcgtcatcagggcaagatcatgtacgtgggcgacgtgcggagcgtgacacagaagcatatccaggagtggggccctttcgacctggtgatcggcggcagcccttgcaatgacctgagcatcgtgaacccagcccggaagggcctgtacgagggaaccggcagactgttcttcgagttttacagactgctgcacgacgcccggcctaaggaaggcgacgaccggcccttcttttggctgttcgagaatgtggtggccatgggagtcagcgacaagcgggatattagccggttcctggagagcaaccccgtgatgatcgatgccaaggaagtgagcgccgcccaccgggccagatacttctggggcaatctgcctggcatgaacagacccctggccagcaccgtgaacgacaagctggagctgcaggagtgcctggagcacggccggatcgccaagttcagcaaggtgagaaccatcaccacccgaagcaacagcatcaaacaaggcaaggaccagcactttcctgtgttcatgaacgagaaggaggacatcctgtggtgtaccgagatggagagagtgttcgggttcccagtccactacacagatgtcagcaacatgtctagactggccagacagagactgctgggaagaagctggtccgtccctgtgatcagacacctgttcgcccctctgaaggagtacttcgcctgcgtgagcagcggcaacagcaacgccaacagccggggccccagcttctctagcggcctggtgccactgtccctgagagggagccacatgggccccatggagatctacaaaaccgtgagcgcctggaagcggcagcctgtgcgcgtgctgagcctgtttcggaatatcgataaagtcctgaaaagcctgggattcctggagagcggctctggctccggcggtggcaccctgaagtacgtggaggatgtgacaaacgtggtcagacgggatgtggagaagtggggccccttcgatctggtgtacggcagcacccaacccctgggcagctcttgtgaccggtgccctggctggtacatgtttcagttccaccggatcctgcagtacgccctgccgagacaggagtcccagcggccattcttttggattttcatggacaacttgctgctgaccgaggatgaccaggaaactaccactcggttcctgcagaccgaagccgtgaccctgcaggacgtgagaggccgggactaccagaacgccatgcgggtgtggtccaacatccctggactgaaaagcaagcacgcacctctgacccctaaagaagaggagtacctgcaggcccaggtgcggagcagaagcaagctggacgcccctaaggtggatctgctggtgaagaattgcctcctgcccctgagagagtacttcaagtatttcagccagaatagtctgcccctgggaggcagcggcggcggcgccctggtgacatttgaggacgtcgccgtgcggttcacccaggaggaatgggctctgctggatccttctcagaaaatcctgtaccgggacgtgatgagagagacataccggaatctgacctccgtgggcatcaactgggaatgttgggaccttgaagcctgcttcagaagcctgggaagaaacctgagagtgcaggtggtgaagagaaagtgcgagctgaccaacagcggcccctgcgccgagggcggcccaagcagcggcgcccctcctcccagcggcggcagcccagccggctccccaacctctaccgaggagggcacctctgagtccgccacccccgagagcggccctggcacctccaccgagcccagcgagggcagcgcacccggcagccctgccggcagccccacctccacagaggagggaaccagcaccgagcccagcgaaggcagcgccccaggcaccagcaccgagcctagtgagcaggagattaaacggatcaacaagatcagaagaagacttgtgaaagacagcaacaccaagaaggccggcaagacaggccccatgaaaaccctgctggttagagtgatgacacccgatctgagagagcggctggaaaacctgagaaagaagcctgaaaatatcccccagcccatcagcaatacatctagagccaacctgaataagctgctgaccgattacaccgaaatgaagaaggcgatcctgcatgtgtactgggaagagttccagaaggaccctgtgggcctgatgagccgggtggcccagcctgccagcaagaagatcgatcagaacaagctgaaacctgagatggacgagaagggcaacctgaccaccgccggctttgcctgctctcagtgtggccagcccctgttcgtgtacaagctggagcaggtgtctgagaagggcaaggcttacaccaactacttcggacggtgcaatgtggccgagcacgaaaagctgatcctgctggcccagctgaagcccgagaaggatagcgacgaagccgtgacatatagcctgggaaagtttgggcagagggccctggatttctacagcattcatgtgaccaaggagtccacccaccccgtgaagcccctggcccagatcgccggaaacagatacgcctccggacctgtgggaaaggccctgagcgacgcatgtatgggcacaatcgcctccttcctgtctaagtaccaggacatcatcatcgaacaccagaaggtggtgaagggcaaccagaagagactggagagcctgcgggagctggccggcaaggaaaacctggaataccctagcgtgaccctgccacctcagcctcacaccaaggagggcgttgatgcctacaacgaagtgatcgcccgggtgcgaatgtgggtgaacctgaacctgtggcagaagctgaagctaagcagagatgatgccaagcctctgctgagactgaagggattcccttcctttcctctggtcgagagacaggccaacgaagtggactggtgggacatggtgtgtaacgtgaagaagctgatcaacgagaaaaaggaggatggcaaggtgttttggcagaatctggctggctacaagagacaggaagccctgagaccatacctgagcagcgaggaagatcggaagaagggaaagaaattcgctcggtaccagctgggcgacctgctgctgcacctggaaaagaagcacggcgaggactggggaaaggtgtacgacgaggcctgggagcggattgacaagaaagtggaaggcctgagcaagcacatcaagctggaagaggaacggagaagcgaggacgcccagagcaaggccgccctgaccgactggctgcgggctaaggccagcttcgtgatcgagggcctgaaggaggccgacaaggacgagttctgcagatgcgagctgaagctgcagaagtggtacggggacctgcggggaaagcccttcgccatcgaagccgagaacagcatcctggacatcagcggcttcagcaagcagtacaactgtgccttcatctggcagaaggacggcgtgaagaagctgaacctgtacctgatcatcaactacttcaagggcggcaagctgcggttcaagaagatcaaacctgaagccttcgaagccaacagattctacaccgtgatcaacaaaaagagcggcgagatcgtgcccatggaggtgaacttcaacttcgacgaccccaacctgatcatcctgcctctggcctttggcaagagacagggcagagaattcatctggaacgacctgctgtccctggaaaccggcagcctgaagctggccaacggaagagtgatcgagaagacactgtacaacagaagaacccggcaggatgagcctgccctgttcgtggccctgaccttcgagcggcgggaggtcctggactcctccaatatcaaaccaatgaacctgatcggcgtggcaagaggcgaaaacatccccgccgtgatcgccctgaccgaccccgagggctgcccactgagccggtttaaggatagcctgggaaacccaacccacatcctgagaatcggcgagagctataaggagaagcagcggaccatccaggccaagaaggaggtggagcagcggagagccggcggctacagccggaagtacgccagcaaagccaagaatctggcagacgatatggtgagaaacaccgctagagatctgctgtactacgccgtgacccaggatgccatgctgatcttcgccaacctgagccggggcttcggccggcagggcaagcggaccttcatggccgagagacagtacacacggatggaggactggctgaccgccaagctggcctacgagggcctgagcaagacctacctgtccaagacactggcccagtacacctccaagacatgcagcaactgtgggtttaccatcaccagcgccgactacgacagggtgctggagaagctgaagaagacagcaacaggctggatgaccacaattaacggcaaggagctgaaggtggagggccagattacctactacaacagatacaagagacagaacgtagtcaaggacctgtccgtcgagctggatagactgagcgaagaatctgtgaacaacgacatctcctcctggacaaagggcagaagcggagaagctctgagcctcctgaagaaaagattctcccatagacccgtgcaggagaagttcgtgtgcctgaactgcggcttcgagacacacgcagccgagcaagccgccctgaacatcgccagatcctggctgttcctgcggagccaggagtacaagaaataccagacaaacaagacaaccggcaacaccgataagagagccttcgtcgagacctggcagtccttttaccggaagaagcttaaggaggtgtggaaacctgccgtgcggtctggcggatctggcggaggctccgcccaggcccccctgagcttcgaggacgtggccgtgagcttcagcagggaggagtggaggctgctggtgcccgcccagaaggacctgtacagggacgtgatgctggagaactacaggaacctggtgagcgtgggctaccaggccagcgagcccgacagcctgttccagctggagcacggcggccccctgtgggccgtggagggcgccgcccccaggcccccctgccccggcttcgtgctgcagggcggcccaagcagcggcgcccctcctcccagcggcggcagcccagccggctccccaacctctaccgaggagggcacctctgagtccgccacccccgagagcggccctggcacctccaccgagcccagcgagggcagcgcacccggcagccctgccggcagccccacctccacagaggagggaaccagcaccgagcccagcgaaggcagcgccccaggcaccagcaccgagcctagtgagcaggagattaaacggatcaacaagatcagaagaagacttgtgaaagacagcaacaccaagaaggccggcaagacaggccccatgaaaaccctgctggttagagtgatgacacccgatctgagagagcggctggaaaacctgagaaagaagcctgaaaatatcccccagcccatcagcaatacatctagagccaacctgaataagctgctgaccgattacaccgaaatgaagaaggcgatcctgcatgtgtactgggaagagttccagaaggaccctgtgggcctgatgagccgggtggcccagcctgccagcaagaagatcgatcagaacaagctgaaacctgagatggacgagaagggcaacctgaccaccgccggctttgcctgctctcagtgtggccagcccctgttcgtgtacaagctggagcaggtgtctgagaagggcaaggcttacaccaactacttcggacggtgcaatgtggccgagcacgaaaagctgatcctgctggcccagctgaagcccgagaaggatagcgacgaagccgtgacatatagcctgggaaagtttgggcagagggccctggatttctacagcattcatgtgaccaaggagtccacccaccccgtgaagcccctggcccagatcgccggaaacagatacgcctccggacctgtgggaaaggccctgagcgacgcatgtatgggcacaatcgcctccttcctgtctaagtaccaggacatcatcatcgaacaccagaaggtggtgaagggcaaccagaagagactggagagcctgcgggagctggccggcaaggaaaacctggaataccctagcgtgaccctgccacctcagcctcacaccaaggagggcgttgatgcctacaacgaagtgatcgcccgggtgcgaatgtgggtgaacctgaacctgtggcagaagctgaagctaagcagagatgatgccaagcctctgctgagactgaagggattcccttcctttcctctggtcgagagacaggccaacgaagtggactggtgggacatggtgtgtaacgtgaagaagctgatcaacgagaaaaaggaggatggcaaggtgttttggcagaatctggctggctacaagagacaggaagccctgagaccatacctgagcagcgaggaagatcggaagaagggaaagaaattcgctcggtaccagctgggcgacctgctgctgcacctggaaaagaagcacggcgaggactggggaaaggtgtacgacgaggcctgggagcggattgacaagaaagtggaaggcctgagcaagcacatcaagctggaagaggaacggagaagcgaggacgcccagagcaaggccgccctgaccgactggctgcgggctaaggccagcttcgtgatcgagggcctgaaggaggccgacaaggacgagttctgcagatgcgagctgaagctgcagaagtggtacggggacctgcggggaaagcccttcgccatcgaagccgagaacagcatcctggacatcagcggcttcagcaagcagtacaactgtgccttcatctggcagaaggacggcgtgaagaagctgaacctgtacctgatcatcaactacttcaagggcggcaagctgcggttcaagaagatcaaacctgaagccttcgaagccaacagattctacaccgtgatcaacaaaaagagcggcgagatcgtgcccatggaggtgaacttcaacttcgacgaccccaacctgatcatcctgcctctggcctttggcaagagacagggcagagaattcatctggaacgacctgctgtccctggaaaccggcagcctgaagctggccaacggaagagtgatcgagaagacactgtacaacagaagaacccggcaggatgagcctgccctgttcgtggccctgaccttcgagcggcgggaggtcctggactcctccaatatcaaaccaatgaacctgatcggcgtggcaagaggcgaaaacatccccgccgtgatcgccctgaccgaccccgagggctgcccactgagccggtttaaggatagcctgggaaacccaacccacatcctgagaatcggcgagagctataaggagaagcagcggaccatccaggccaagaaggaggtggagcagcggagagccggcggctacagccggaagtacgccagcaaagccaagaatctggcagacgatatggtgagaaacaccgctagagatctgctgtactacgccgtgacccaggatgccatgctgatcttcgccaacctgagccggggcttcggccggcagggcaagcggaccttcatggccgagagacagtacacacggatggaggactggctgaccgccaagctggcctacgagggcctgagcaagacctacctgtccaagacactggcccagtacacctccaagacatgcagcaactgtgggtttaccatcaccagcgccgactacgacagggtgctggagaagctgaagaagacagcaacaggctggatgaccacaattaacggcaaggagctgaaggtggagggccagattacctactacaacagatacaagagacagaacgtagtcaaggacctgtccgtcgagctggatagactgagcgaagaatctgtgaacaacgacatctcctcctggacaaagggcagaagcggagaagctctgagcctcctgaagaaaagattctcccatagacccgtgcaggagaagttcgtgtgcctgaactgcggcttcgagacacacgcagccgagcaagccgccctgaacatcgccagatcctggctgttcctgcggagccaggagtacaagaaataccagacaaacaagacaaccggcaacaccgataagagagccttcgtcgagacctggcagtccttttaccggaagaagcttaaggaggtgtggaaacctgccgtgcggtctggcggatctggcggaggctcctgcccaggcccccctgagcttcgaggacgtggccgtgagcttcagcagggaggagtggaggctgctggtgcccgcccagaaggacctgtacagggacgtgatgctggagaactacaggaacctggtgagcgtgggctaccaggccagcgagcccgacagcctgttccagctggagcacggcggccccctgtgggccgtggagggcgccgcccccaggcccccctgccccggcttcgtgctgcagggatctggctccggcagcggccccaagaaaaagagaaaagtctaagctgccttctgcggggcttgccttctggccatgcccttcttctctcccttgcacctgtacctcttggtctttgaataaagcctgagtaggaaggctagcaaaaaaaaaaaaaaaaaaaaaaaaaaaaaaaaaaaaaaaaaaaaaaaaaaaaaaaaaaaaaaaaaaaaaaaaaaaaaaaa

SEQ ID NO: 15645 - RNA, 9485 nt, synthetic construct
  source 1..9485: mol_type = other RNA
aggaaataagagagaaaagaagagtaagaagaaatataagagccaccatggcccctaagaagaagcgtaaagtgagccggatggaacgcctcgtctacgaggtgcggcagaagtgcagaaacatcgaggacatctgcatctcctgcggatctctgaacgtgaccctggagcacccactgttcatcggcggcatgtgccagaactgtaaaaactgttttctggagtgtgcctatcaatacgacgatgacggctaccagagctactgcaccatctgttgcggcggaagagaggtgctgatgtgtggaaataacaactgctgccggtgcttctgcgtggaatgcgtggacctgctggtgggccccggcgccgcccaggccgctattaaggaagatccttggaactgctacatgtgcggccacaagggcacatacggcctgctgagacggagagaggactggcctagcagactgcagatgttcttcgccaataaccacgaccaggagttcgacccccctaaggtgtaccctcccgtccccgccgagaagagaaagcccatccgggtcctgagcctgttcgatggcatcgccaccggtctgctggtgctgaaggacctgggcatccaggtggataggtacattgcctccgaggtgtgcgaggactccatcaccgtgggaatggtgcgtcatcagggcaagatcatgtacgtgggcgacgtgcggagcgtgacacagaagcatatccaggagtggggccctttcgacctggtgatcggcggcagcccttgcaatgacctgagcatcgtgaacccagcccggaagggcctgtacgagggaaccggcagactgttcttcgagttttacagactgctgcacgacgcccggcctaaggaaggcgacgaccggcccttcttttggctgttcgagaatgtggtggccatgggagtcagcgacaagcgggatattagccggttcctggagagcaaccccgtgatgatcgatgccaaggaagtgagcgccgcccaccgggccagatacttctggggcaatctgcctggcatgaacagacccctggccagcaccgtgaacgacaagctggagctgcaggagtgcctggagcacggccggatcgccaagttcagcaaggtgagaaccatcaccacccgaagcaacagcatcaaacaaggcaaggaccagcactttcctgtgttcatgaacgagaaggaggacatcctgtggtgtaccgagatggagagagtgttcgggttcccagtccactacacagatgtcagcaacatgtctagactggccagacagagactgctgggaagaagctggtccgtccctgtgatcagacacctgttcgcccctctgaaggagtacttcgcctgcgtgagcagcggcaacagcaacgccaacagccggggccccagcttctctagcggcctggtgccactgtccctgagagggagccacatgggccccatggagatctacaaaaccgtgagcgcctggaagcggcagcctgtgcgcgtgctgagcctgtttcggaatatcgataaagtcctgaaaagcctgggattcctggagagcggctctggctccggcggtggcaccctgaagtacgtggaggatgtgacaaacgtggtcagacgggatgtggagaagtggggccccttcgatctggtgtacggcagcacccaacccctgggcagctcttgtgaccggtgccctggctggtacatgtttcagttccaccggatcctgcagtacgccctgccgagacaggagtcccagcggccattcttttggattttcatggacaacttgctgctgaccgaggatgaccaggaaactaccactcggttcctgcagaccgaagccgtgaccctgcaggacgtgagaggccgggactaccagaacgccatgcgggtgtggtccaacatccctggactgaaaagcaagcacgcacctctgacccctaaagaagaggagtacctgcaggcccaggtgcggagcagaagcaagctggacgcccctaaggtggatctgctggtgaagaattgcctcctgcccctgagagagtacttcaagtatttcagccagaatagtctgcccctgggaggcagcggcggcggcgccctggtgacatttgaggacgtcgccgtgcggttcacccaggaggaatgggctctgctggatccttctcagaaaatcctgtaccgggacgtgatgagagagacataccggaatctgacctccgtgggcatcaactgggaatgttgggaccttgaagcctgcttcagaagcctgggaagaaacctgagagtgcaggtggtgaagagaaagtgcgagctgaccaacagcggcccctgcgccgagggcggcccaagcagcggcgcccctcctcccagcggcggcagcccagccggctccccaacctctaccgaggagggcacctctgagtccgccacccccgagagcggccctggcacctccaccgagcccagcgagggcagcgcacccggcagccctgccggcagccccacctccacagaggagggaaccagcaccgagcccagcgaaggcagcgccccaggcaccagcaccgagcctagtgagcaggagattaaacggatcaacaagatcagaagaagacttgtgaaagacagcaacaccaagaaggccggcaagacaggccccatgaaaaccctgctggttagagtgatgacacccgatctgagagagcggctggaaaacctgagaaagaagcctgaaaatatcccccagcccatcagcaatacatctagagccaacctgaataagctgctgaccgattacaccgaaatgaagaaggcgatcctgcatgtgtactgggaagagttccagaaggaccctgtgggcctgatgagccgggtggcccagcctgccagcaagaagatcgatcagaacaagctgaaacctgagatggacgagaagggcaacctgaccaccgccggctttgcctgctctcagtgtggccagcccctgttcgtgtacaagctggagcaggtgtctgagaagggcaaggcttacaccaactacttcggacggtgcaatgtggccgagcacgaaaagctgatcctgctggcccagctgaagcccgagaaggatagcgacgaagccgtgacatatagcctgggaaagtttgggcagagggccctggatttctacagcattcatgtgaccaaggagtccacccaccccgtgaagcccctggcccagatcgccggaaacagatacgcctccggacctgtgggaaaggccctgagcgacgcatgtatgggcacaatcgcctccttcctgtctaagtaccaggacatcatcatcgaacaccagaaggtggtgaagggcaaccagaagagactggagagcctgcgggagctggccggcaaggaaaacctggaataccctagcgtgaccctgccacctcagcctcacaccaaggagggcgttgatgcctacaacgaagtgatcgcccgggtgcgaatgtgggtgaacctgaacctgtggcagaagctgaagctaagcagagatgatgccaagcctctgctgagactgaagggattcccttcctttcctctggtcgagagacaggccaacgaagtggactggtgggacatggtgtgtaacgtgaagaagctgatcaacgagaaaaaggaggatggcaaggtgttttggcagaatctggctggctacaagagacaggaagccctgagaccatacctgagcagcgaggaagatcggaagaagggaaagaaattcgctcggtaccagctgggcgacctgctgctgcacctggaaaagaagcacggcgaggactggggaaaggtgtacgacgaggcctgggagcggattgacaagaaagtggaaggcctgagcaagcacatcaagctggaagaggaacggagaagcgaggacgcccagagcaaggccgccctgaccgactggctgcgggctaaggccagcttcgtgatcgagggcctgaaggaggccgacaaggacgagttctgcagatgcgagctgaagctgcagaagtggtacggggacctgcggggaaagcccttcgccatcgaagccgagaacagcatcctggacatcagcggcttcagcaagcagtacaactgtgccttcatctggcagaaggacggcgtgaagaagctgaacctgtacctgatcatcaactacttcaagggcggcaagctgcggttcaagaagatcaaacctgaagccttcgaagccaacagattctacaccgtgatcaacaaaaagagcggcgagatcgtgcccatggaggtgaacttcaacttcgacgaccccaacctgatcatcctgcctctggcctttggcaagagacagggcagagaattcatctggaacgacctgctgtccctggaaaccggcagcctgaagctggccaacggaagagtgatcgagaagacactgtacaacagaagaacccggcaggatgagcctgccctgttcgtggccctgaccttcgagcggcgggaggtcctggactcctccaatatcaaaccaatgaacctgatcggcgtggcaagaggcgaaaacatccccgccgtgatcgccctgaccgaccccgagggctgcccactgagccggtttaaggatagcctgggaaacccaacccacatcctgagaatcggcgagagctataaggagaagcagcggaccatccaggccaagaaggaggtggagcagcggagagccggcggctacagccggaagtacgccagcaaagccaagaatctggcagacgatatggtgagaaacaccgctagagatctgctgtactacgccgtgacccaggatgccatgctgatcttcgccaacctgagccggggcttcggccggcagggcaagcggaccttcatggccgagagacagtacacacggatggaggactggctgaccgccaagctggcctacgagggcctgagcaagacctacctgtccaagacactggcccagtacacctccaagacatgcagcaactgtgggtttaccatcaccagcgccgactacgacagggtgctggagaagctgaagaagacagcaacaggctggatgaccacaattaacggcaaggagctgaaggtggagggccagattacctactacaacagatacaagagacagaacgtagtcaaggacctgtccgtcgagctggatagactgagcgaagaatctgtgaacaacgacatctcctcctggacaaagggcagaagcggagaagctctgagcctcctgaagaaaagattctcccatagacccgtgcaggagaagttcgtgtgcctgaactgcggcttcgagacacacgcagccgagcaagccgccctgaacatcgccagatcctggctgttcctgcggagccaggagtacaagaaataccagacaaacaagacaaccggcaacaccgataagagagccttcgtcgagacctggcagtccttttaccggaagaagcttaaggaggtgtggaaacctgccgtgcggtctggcggatctggcggaggctccttccagggcagcctgaccttcagcgacgtggccatcggcttcagccagcaggagtgggagtgcctggaccccgtgcagaagagcctgtacagggacgtgatgatggagaactacggcaacctggtgagcctgggctacagcatcagcaagcccgacgtgatcaccctgctggagcagggcaaggagccctggatggtgctgagggaggagaccaagaggtgggacaccgacagcttcctgagcggcggcccaagcagcggcgcccctcctcccagcggcggcagcccagccggctccccaacctctaccgaggagggcacctctgagtccgccacccccgagagcggccctggcacctccaccgagcccagcgagggcagcgcacccggcagccctgccggcagccccacctccacagaggagggaaccagcaccgagcccagcgaaggcagcgccccaggcaccagcaccgagcctagtgagcaggagattaaacggatcaacaagatcagaagaagacttgtgaaagacagcaacaccaagaaggccggcaagacaggccccatgaaaaccctgctggttagagtgatgacacccgatctgagagagcggctggaaaacctgagaaagaagcctgaaaatatcccccagcccatcagcaatacatctagagccaacctgaataagctgctgaccgattacaccgaaatgaagaaggcgatcctgcatgtgtactgggaagagttccagaaggaccctgtgggcctgatgagccgggtggcccagcctgccagcaagaagatcgatcagaacaagctgaaacctgagatggacgagaagggcaacctgaccaccgccggctttgcctgctctcagtgtggccagcccctgttcgtgtacaagctggagcaggtgtctgagaagggcaaggcttacaccaactacttcggacggtgcaatgtggccgagcacgaaaagctgatcctgctggcccagctgaagcccgagaaggatagcgacgaagccgtgacatatagcctgggaaagtttgggcagagggccctggatttctacagcattcatgtgaccaaggagtccacccaccccgtgaagcccctggcccagatcgccggaaacagatacgcctccggacctgtgggaaaggccctgagcgacgcatgtatgggcacaatcgcctccttcctgtctaagtaccaggacatcatcatcgaacaccagaaggtggtgaagggcaaccagaagagactggagagcctgcgggagctggccggcaaggaaaacctggaataccctagcgtgaccctgccacctcagcctcacaccaaggagggcgttgatgcctacaacgaagtgatcgcccgggtgcgaatgtgggtgaacctgaacctgtggcagaagctgaagctaagcagagatgatgccaagcctctgctgagactgaagggattcccttcctttcctctggtcgagagacaggccaacgaagtggactggtgggacatggtgtgtaacgtgaagaagctgatcaacgagaaaaaggaggatggcaaggtgttttggcagaatctggctggctacaagagacaggaagccctgagaccatacctgagcagcgaggaagatcggaagaagggaaagaaattcgctcggtaccagctgggcgacctgctgctgcacctggaaaagaagcacggcgaggactggggaaaggtgtacgacgaggcctgggagcggattgacaagaaagtggaaggcctgagcaagcacatcaagctggaagaggaacggagaagcgaggacgcccagagcaaggccgccctgaccgactggctgcgggctaaggccagcttcgtgatcgagggcctgaaggaggccgacaaggacgagttctgcagatgcgagctgaagctgcagaagtggtacggggacctgcggggaaagcccttcgccatcgaagccgagaacagcatcctggacatcagcggcttcagcaagcagtacaactgtgccttcatctggcagaaggacggcgtgaagaagctgaacctgtacctgatcatcaactacttcaagggcggcaagctgcggttcaagaagatcaaacctgaagccttcgaagccaacagattctacaccgtgatcaacaaaaagagcggcgagatcgtgcccatggaggtgaacttcaacttcgacgaccccaacctgatcatcctgcctctggcctttggcaagagacagggcagagaattcatctggaacgacctgctgtccctggaaaccggcagcctgaagctggccaacggaagagtgatcgagaagacactgtacaacagaagaacccggcaggatgagcctgccctgttcgtggccctgaccttcgagcggcgggaggtcctggactcctccaatatcaaaccaatgaacctgatcggcgtggcaagaggcgaaaacatccccgccgtgatcgccctgaccgaccccgagggctgcccactgagccggtttaaggatagcctgggaaacccaacccacatcctgagaatcggcgagagctataaggagaagcagcggaccatccaggccaagaaggaggtggagcagcggagagccggcggctacagccggaagtacgccagcaaagccaagaatctggcagacgatatggtgagaaacaccgctagagatctgctgtactacgccgtgacccaggatgccatgctgatcttcgccaacctgagccggggcttcggccggcagggcaagcggaccttcatggccgagagacagtacacacggatggaggactggctgaccgccaagctggcctacgagggcctgagcaagacctacctgtccaagacactggcccagtacacctccaagacatgcagcaactgtgggtttaccatcaccagcgccgactacgacagggtgctggagaagctgaagaagacagcaacaggctggatgaccacaattaacggcaaggagctgaaggtggagggccagattacctactacaacagatacaagagacagaacgtagtcaaggacctgtccgtcgagctggatagactgagcgaagaatctgtgaacaacgacatctcctcctggacaaagggcagaagcggagaagctctgagcctcctgaagaaaagattctcccatagacccgtgcaggagaagttcgtgtgcctgaactgcggcttcgagacacacgcagccgagcaagccgccctgaacatcgccagatcctggctgttcctgcggagccaggagtacaagaaataccagacaaacaagacaaccggcaacaccgataagagagccttcgtcgagacctggcagtccttttaccggaagaagcttaaggaggtgtggaaacctgccgtgcggtctggcggatctggcggaggctcctttccagggcagcctgaccttcagcgacgtggccatcggcttcagccagcaggagtgggagtgcctggaccccgtgcagaagagcctgtacagggacgtgatgatggagaactacggcaacctggtgagcctgggctacagcatcagcaagcccgacgtgatcaccctgctggagcagggcaaggagccctggatggtgctgagggaggagaccaagaggtgggacaccgacagcttcctgagcggatctggctccggcagcggccccaagaaaaagagaaaagtctaagctgccttctgcggggcttgccttctggccatgcccttcttctctcccttgcacctgtacctcttggtctttgaataaagcctgagtaggaaggctagcaaaaaaaaaaaaaaaaaaaaaaaaaaaaaaaaaaaaaaaaaaaaaaaaaaaaaaaaaaaaaaaaaaaaaaaaaaaaaaaa

SEQ ID NO: 15646 - RNA, 9485 nt, synthetic construct
  source 1..9485: mol_type = other RNA
aggaaataagagagaaaagaagagtaagaagaaatataagagccaccatggcccctaagaagaagcgtaaagtgagccggatggaacgcctcgtctacgaggtgcggcagaagtgcagaaacatcgaggacatctgcatctcctgcggatctctgaacgtgaccctggagcacccactgttcatcggcggcatgtgccagaactgtaaaaactgttttctggagtgtgcctatcaatacgacgatgacggctaccagagctactgcaccatctgttgcggcggaagagaggtgctgatgtgtggaaataacaactgctgccggtgcttctgcgtggaatgcgtggacctgctggtgggccccggcgccgcccaggccgctattaaggaagatccttggaactgctacatgtgcggccacaagggcacatacggcctgctgagacggagagaggactggcctagcagactgcagatgttcttcgccaataaccacgaccaggagttcgacccccctaaggtgtaccctcccgtccccgccgagaagagaaagcccatccgggtcctgagcctgttcgatggcatcgccaccggtctgctggtgctgaaggacctgggcatccaggtggataggtacattgcctccgaggtgtgcgaggactccatcaccgtgggaatggtgcgtcatcagggcaagatcatgtacgtgggcgacgtgcggagcgtgacacagaagcatatccaggagtggggccctttcgacctggtgatcggcggcagcccttgcaatgacctgagcatcgtgaacccagcccggaagggcctgtacgagggaaccggcagactgttcttcgagttttacagactgctgcacgacgcccggcctaaggaaggcgacgaccggcccttcttttggctgttcgagaatgtggtggccatgggagtcagcgacaagcgggatattagccggttcctggagagcaaccccgtgatgatcgatgccaaggaagtgagcgccgcccaccgggccagatacttctggggcaatctgcctggcatgaacagacccctggccagcaccgtgaacgacaagctggagctgcaggagtgcctggagcacggccggatcgccaagttcagcaaggtgagaaccatcaccacccgaagcaacagcatcaaacaaggcaaggaccagcactttcctgtgttcatgaacgagaaggaggacatcctgtggtgtaccgagatggagagagtgttcgggttcccagtccactacacagatgtcagcaacatgtctagactggccagacagagactgctgggaagaagctggtccgtccctgtgatcagacacctgttcgcccctctgaaggagtacttcgcctgcgtgagcagcggcaacagcaacgccaacagccggggccccagcttctctagcggcctggtgccactgtccctgagagggagccacatgggccccatggagatctacaaaaccgtgagcgcctggaagcggcagcctgtgcgcgtgctgagcctgtttcggaatatcgataaagtcctgaaaagcctgggattcctggagagcggctctggctccggcggtggcaccctgaagtacgtggaggatgtgacaaacgtggtcagacgggatgtggagaagtggggccccttcgatctggtgtacggcagcacccaacccctgggcagctcttgtgaccggtgccctggctggtacatgtttcagttccaccggatcctgcagtacgccctgccgagacaggagtcccagcggccattcttttggattttcatggacaacttgctgctgaccgaggatgaccaggaaactaccactcggttcctgcagaccgaagccgtgaccctgcaggacgtgagaggccgggactaccagaacgccatgcgggtgtggtccaacatccctggactgaaaagcaagcacgcacctctgacccctaaagaagaggagtacctgcaggcccaggtgcggagcagaagcaagctggacgcccctaaggtggatctgctggtgaagaattgcctcctgcccctgagagagtacttcaagtatttcagccagaatagtctgcccctgggaggcagcggcggcggcgccctggtgacatttgaggacgtcgccgtgcggttcacccaggaggaatgggctctgctggatccttctcagaaaatcctgtaccgggacgtgatgagagagacataccggaatctgacctccgtgggcatcaactgggaatgttgggaccttgaagcctgcttcagaagcctgggaagaaacctgagagtgcaggtggtgaagagaaagtgcgagctgaccaacagcggcccctgcgccgagggcggcccaagcagcggcgcccctcctcccagcggcggcagcccagccggctccccaacctctaccgaggagggcacctctgagtccgccacccccgagagcggccctggcacctccaccgagcccagcgagggcagcgcacccggcagccctgccggcagccccacctccacagaggagggaaccagcaccgagcccagcgaaggcagcgccccaggcaccagcaccgagcctagtgagcaggagattaaacggatcaacaagatcagaagaagacttgtgaaagacagcaacaccaagaaggccggcaagacaggccccatgaaaaccctgctggttagagtgatgacacccgatctgagagagcggctggaaaacctgagaaagaagcctgaaaatatcccccagcccatcagcaatacatctagagccaacctgaataagctgctgaccgattacaccgaaatgaagaaggcgatcctgcatgtgtactgggaagagttccagaaggaccctgtgggcctgatgagccgggtggcccagcctgccagcaagaagatcgatcagaacaagctgaaacctgagatggacgagaagggcaacctgaccaccgccggctttgcctgctctcagtgtggccagcccctgttcgtgtacaagctggagcaggtgtctgagaagggcaaggcttacaccaactacttcggacggtgcaatgtggccgagcacgaaaagctgatcctgctggcccagctgaagcccgagaaggatagcgacgaagccgtgacatatagcctgggaaagtttgggcagagggccctggatttctacagcattcatgtgaccaaggagtccacccaccccgtgaagcccctggcccagatcgccggaaacagatacgcctccggacctgtgggaaaggccctgagcgacgcatgtatgggcacaatcgcctccttcctgtctaagtaccaggacatcatcatcgaacaccagaaggtggtgaagggcaaccagaagagactggagagcctgcgggagctggccggcaaggaaaacctggaataccctagcgtgaccctgccacctcagcctcacaccaaggagggcgttgatgcctacaacgaagtgatcgcccgggtgcgaatgtgggtgaacctgaacctgtggcagaagctgaagctaagcagagatgatgccaagcctctgctgagactgaagggattcccttcctttcctctggtcgagagacaggccaacgaagtggactggtgggacatggtgtgtaacgtgaagaagctgatcaacgagaaaaaggaggatggcaaggtgttttggcagaatctggctggctacaagagacaggaagccctgagaccatacctgagcagcgaggaagatcggaagaagggaaagaaattcgctcggtaccagctgggcgacctgctgctgcacctggaaaagaagcacggcgaggactggggaaaggtgtacgacgaggcctgggagcggattgacaagaaagtggaaggcctgagcaagcacatcaagctggaagaggaacggagaagcgaggacgcccagagcaaggccgccctgaccgactggctgcgggctaaggccagcttcgtgatcgagggcctgaaggaggccgacaaggacgagttctgcagatgcgagctgaagctgcagaagtggtacggggacctgcggggaaagcccttcgccatcgaagccgagaacagcatcctggacatcagcggcttcagcaagcagtacaactgtgccttcatctggcagaaggacggcgtgaagaagctgaacctgtacctgatcatcaactacttcaagggcggcaagctgcggttcaagaagatcaaacctgaagccttcgaagccaacagattctacaccgtgatcaacaaaaagagcggcgagatcgtgcccatggaggtgaacttcaacttcgacgaccccaacctgatcatcctgcctctggcctttggcaagagacagggcagagaattcatctggaacgacctgctgtccctggaaaccggcagcctgaagctggccaacggaagagtgatcgagaagacactgtacaacagaagaacccggcaggatgagcctgccctgttcgtggccctgaccttcgagcggcgggaggtcctggactcctccaatatcaaaccaatgaacctgatcggcgtggcaagaggcgaaaacatccccgccgtgatcgccctgaccgaccccgagggctgcccactgagccggtttaaggatagcctgggaaacccaacccacatcctgagaatcggcgagagctataaggagaagcagcggaccatccaggccaagaaggaggtggagcagcggagagccggcggctacagccggaagtacgccagcaaagccaagaatctggcagacgatatggtgagaaacaccgctagagatctgctgtactacgccgtgacccaggatgccatgctgatcttcgccaacctgagccggggcttcggccggcagggcaagcggaccttcatggccgagagacagtacacacggatggaggactggctgaccgccaagctggcctacgagggcctgagcaagacctacctgtccaagacactggcccagtacacctccaagacatgcagcaactgtgggtttaccatcaccagcgccgactacgacagggtgctggagaagctgaagaagacagcaacaggctggatgaccacaattaacggcaaggagctgaaggtggagggccagattacctactacaacagatacaagagacagaacgtagtcaaggacctgtccgtcgagctggatagactgagcgaagaatctgtgaacaacgacatctcctcctggacaaagggcagaagcggagaagctctgagcctcctgaagaaaagattctcccatagacccgtgcaggagaagttcgtgtgcctgaactgcggcttcgagacacacgcagccgagcaagccgccctgaacatcgccagatcctggctgttcctgcggagccaggagtacaagaaataccagacaaacaagacaaccggcaacaccgataagagagccttcgtcgagacctggcagtccttttaccggaagaagcttaaggaggtgtggaaacctgccgtgcggtctggcggatctggcggaggctcccaggacgtggtgaccttcaaggacgtggccatctacttcagccccgaggagtgggtgaggctgagcgccggccagagggagctgtaccaggaggtgatgctggacaactacgagctggtgaccagcctggacagggagagcaagctgctgtacaagatggaccccgaggaggagagctgcgagggcgtgccctacagcagcgccgacagcggcgcccccgacagcagcagcaccagcgcctgcggcggcccaagcagcggcgcccctcctcccagcggcggcagcccagccggctccccaacctctaccgaggagggcacctctgagtccgccacccccgagagcggccctggcacctccaccgagcccagcgagggcagcgcacccggcagccctgccggcagccccacctccacagaggagggaaccagcaccgagcccagcgaaggcagcgccccaggcaccagcaccgagcctagtgagcaggagattaaacggatcaacaagatcagaagaagacttgtgaaagacagcaacaccaagaaggccggcaagacaggccccatgaaaaccctgctggttagagtgatgacacccgatctgagagagcggctggaaaacctgagaaagaagcctgaaaatatcccccagcccatcagcaatacatctagagccaacctgaataagctgctgaccgattacaccgaaatgaagaaggcgatcctgcatgtgtactgggaagagttccagaaggaccctgtgggcctgatgagccgggtggcccagcctgccagcaagaagatcgatcagaacaagctgaaacctgagatggacgagaagggcaacctgaccaccgccggctttgcctgctctcagtgtggccagcccctgttcgtgtacaagctggagcaggtgtctgagaagggcaaggcttacaccaactacttcggacggtgcaatgtggccgagcacgaaaagctgatcctgctggcccagctgaagcccgagaaggatagcgacgaagccgtgacatatagcctgggaaagtttgggcagagggccctggatttctacagcattcatgtgaccaaggagtccacccaccccgtgaagcccctggcccagatcgccggaaacagatacgcctccggacctgtgggaaaggccctgagcgacgcatgtatgggcacaatcgcctccttcctgtctaagtaccaggacatcatcatcgaacaccagaaggtggtgaagggcaaccagaagagactggagagcctgcgggagctggccggcaaggaaaacctggaataccctagcgtgaccctgccacctcagcctcacaccaaggagggcgttgatgcctacaacgaagtgatcgcccgggtgcgaatgtgggtgaacctgaacctgtggcagaagctgaagctaagcagagatgatgccaagcctctgctgagactgaagggattcccttcctttcctctggtcgagagacaggccaacgaagtggactggtgggacatggtgtgtaacgtgaagaagctgatcaacgagaaaaaggaggatggcaaggtgttttggcagaatctggctggctacaagagacaggaagccctgagaccatacctgagcagcgaggaagatcggaagaagggaaagaaattcgctcggtaccagctgggcgacctgctgctgcacctggaaaagaagcacggcgaggactggggaaaggtgtacgacgaggcctgggagcggattgacaagaaagtggaaggcctgagcaagcacatcaagctggaagaggaacggagaagcgaggacgcccagagcaaggccgccctgaccgactggctgcgggctaaggccagcttcgtgatcgagggcctgaaggaggccgacaaggacgagttctgcagatgcgagctgaagctgcagaagtggtacggggacctgcggggaaagcccttcgccatcgaagccgagaacagcatcctggacatcagcggcttcagcaagcagtacaactgtgccttcatctggcagaaggacggcgtgaagaagctgaacctgtacctgatcatcaactacttcaagggcggcaagctgcggttcaagaagatcaaacctgaagccttcgaagccaacagattctacaccgtgatcaacaaaaagagcggcgagatcgtgcccatggaggtgaacttcaacttcgacgaccccaacctgatcatcctgcctctggcctttggcaagagacagggcagagaattcatctggaacgacctgctgtccctggaaaccggcagcctgaagctggccaacggaagagtgatcgagaagacactgtacaacagaagaacccggcaggatgagcctgccctgttcgtggccctgaccttcgagcggcgggaggtcctggactcctccaatatcaaaccaatgaacctgatcggcgtggcaagaggcgaaaacatccccgccgtgatcgccctgaccgaccccgagggctgcccactgagccggtttaaggatagcctgggaaacccaacccacatcctgagaatcggcgagagctataaggagaagcagcggaccatccaggccaagaaggaggtggagcagcggagagccggcggctacagccggaagtacgccagcaaagccaagaatctggcagacgatatggtgagaaacaccgctagagatctgctgtactacgccgtgacccaggatgccatgctgatcttcgccaacctgagccggggcttcggccggcagggcaagcggaccttcatggccgagagacagtacacacggatggaggactggctgaccgccaagctggcctacgagggcctgagcaagacctacctgtccaagacactggcccagtacacctccaagacatgcagcaactgtgggtttaccatcaccagcgccgactacgacagggtgctggagaagctgaagaagacagcaacaggctggatgaccacaattaacggcaaggagctgaaggtggagggccagattacctactacaacagatacaagagacagaacgtagtcaaggacctgtccgtcgagctggatagactgagcgaagaatctgtgaacaacgacatctcctcctggacaaagggcagaagcggagaagctctgagcctcctgaagaaaagattctcccatagacccgtgcaggagaagttcgtgtgcctgaactgcggcttcgagacacacgcagccgagcaagccgccctgaacatcgccagatcctggctgttcctgcggagccaggagtacaagaaataccagacaaacaagacaaccggcaacaccgataagagagccttcgtcgagacctggcagtccttttaccggaagaagcttaaggaggtgtggaaacctgccgtgcggtctggcggatctggcggaggctcctcaggacgtggtgaccttcaaggacgtggccatctacttcagccccgaggagtgggtgaggctgagcgccggccagagggagctgtaccaggaggtgatgctggacaactacgagctggtgaccagcctggacagggagagcaagctgctgtacaagatggaccccgaggaggagagctgcgagggcgtgccctacagcagcgccgacagcggcgcccccgacagcagcagcaccagcgcctgcggatctggctccggcagcggccccaagaaaaagagaaaagtctaagctgccttctgcggggcttgccttctggccatgcccttcttctctcccttgcacctgtacctcttggtctttgaataaagcctgagtaggaaggctagcaaaaaaaaaaaaaaaaaaaaaaaaaaaaaaaaaaaaaaaaaaaaaaaaaaaaaaaaaaaaaaaaaaaaaaaaaaaaaaaa

SEQ ID NO: 15647 - RNA, 9485 nt, synthetic construct
  source 1..9485: mol_type = other RNA
aggaaataagagagaaaagaagagtaagaagaaatataagagccaccatggcccctaagaagaagcgtaaagtgagccggatggaacgcctcgtctacgaggtgcggcagaagtgcagaaacatcgaggacatctgcatctcctgcggatctctgaacgtgaccctggagcacccactgttcatcggcggcatgtgccagaactgtaaaaactgttttctggagtgtgcctatcaatacgacgatgacggctaccagagctactgcaccatctgttgcggcggaagagaggtgctgatgtgtggaaataacaactgctgccggtgcttctgcgtggaatgcgtggacctgctggtgggccccggcgccgcccaggccgctattaaggaagatccttggaactgctacatgtgcggccacaagggcacatacggcctgctgagacggagagaggactggcctagcagactgcagatgttcttcgccaataaccacgaccaggagttcgacccccctaaggtgtaccctcccgtccccgccgagaagagaaagcccatccgggtcctgagcctgttcgatggcatcgccaccggtctgctggtgctgaaggacctgggcatccaggtggataggtacattgcctccgaggtgtgcgaggactccatcaccgtgggaatggtgcgtcatcagggcaagatcatgtacgtgggcgacgtgcggagcgtgacacagaagcatatccaggagtggggccctttcgacctggtgatcggcggcagcccttgcaatgacctgagcatcgtgaacccagcccggaagggcctgtacgagggaaccggcagactgttcttcgagttttacagactgctgcacgacgcccggcctaaggaaggcgacgaccggcccttcttttggctgttcgagaatgtggtggccatgggagtcagcgacaagcgggatattagccggttcctggagagcaaccccgtgatgatcgatgccaaggaagtgagcgccgcccaccgggccagatacttctggggcaatctgcctggcatgaacagacccctggccagcaccgtgaacgacaagctggagctgcaggagtgcctggagcacggccggatcgccaagttcagcaaggtgagaaccatcaccacccgaagcaacagcatcaaacaaggcaaggaccagcactttcctgtgttcatgaacgagaaggaggacatcctgtggtgtaccgagatggagagagtgttcgggttcccagtccactacacagatgtcagcaacatgtctagactggccagacagagactgctgggaagaagctggtccgtccctgtgatcagacacctgttcgcccctctgaaggagtacttcgcctgcgtgagcagcggcaacagcaacgccaacagccggggccccagcttctctagcggcctggtgccactgtccctgagagggagccacatgggccccatggagatctacaaaaccgtgagcgcctggaagcggcagcctgtgcgcgtgctgagcctgtttcggaatatcgataaagtcctgaaaagcctgggattcctggagagcggctctggctccggcggtggcaccctgaagtacgtggaggatgtgacaaacgtggtcagacgggatgtggagaagtggggccccttcgatctggtgtacggcagcacccaacccctgggcagctcttgtgaccggtgccctggctggtacatgtttcagttccaccggatcctgcagtacgccctgccgagacaggagtcccagcggccattcttttggattttcatggacaacttgctgctgaccgaggatgaccaggaaactaccactcggttcctgcagaccgaagccgtgaccctgcaggacgtgagaggccgggactaccagaacgccatgcgggtgtggtccaacatccctggactgaaaagcaagcacgcacctctgacccctaaagaagaggagtacctgcaggcccaggtgcggagcagaagcaagctggacgcccctaaggtggatctgctggtgaagaattgcctcctgcccctgagagagtacttcaagtatttcagccagaatagtctgcccctgggaggcagcggcggcggcgccctggtgacatttgaggacgtcgccgtgcggttcacccaggaggaatgggctctgctggatccttctcagaaaatcctgtaccgggacgtgatgagagagacataccggaatctgacctccgtgggcatcaactgggaatgttgggaccttgaagcctgcttcagaagcctgggaagaaacctgagagtgcaggtggtgaagagaaagtgcgagctgaccaacagcggcccctgcgccgagggcggcccaagcagcggcgcccctcctcccagcggcggcagcccagccggctccccaacctctaccgaggagggcacctctgagtccgccacccccgagagcggccctggcacctccaccgagcccagcgagggcagcgcacccggcagccctgccggcagccccacctccacagaggagggaaccagcaccgagcccagcgaaggcagcgccccaggcaccagcaccgagcctagtgagcaggagattaaacggatcaacaagatcagaagaagacttgtgaaagacagcaacaccaagaaggccggcaagacaggccccatgaaaaccctgctggttagagtgatgacacccgatctgagagagcggctggaaaacctgagaaagaagcctgaaaatatcccccagcccatcagcaatacatctagagccaacctgaataagctgctgaccgattacaccgaaatgaagaaggcgatcctgcatgtgtactgggaagagttccagaaggaccctgtgggcctgatgagccgggtggcccagcctgccagcaagaagatcgatcagaacaagctgaaacctgagatggacgagaagggcaacctgaccaccgccggctttgcctgctctcagtgtggccagcccctgttcgtgtacaagctggagcaggtgtctgagaagggcaaggcttacaccaactacttcggacggtgcaatgtggccgagcacgaaaagctgatcctgctggcccagctgaagcccgagaaggatagcgacgaagccgtgacatatagcctgggaaagtttgggcagagggccctggatttctacagcattcatgtgaccaaggagtccacccaccccgtgaagcccctggcccagatcgccggaaacagatacgcctccggacctgtgggaaaggccctgagcgacgcatgtatgggcacaatcgcctccttcctgtctaagtaccaggacatcatcatcgaacaccagaaggtggtgaagggcaaccagaagagactggagagcctgcgggagctggccggcaaggaaaacctggaataccctagcgtgaccctgccacctcagcctcacaccaaggagggcgttgatgcctacaacgaagtgatcgcccgggtgcgaatgtgggtgaacctgaacctgtggcagaagctgaagctaagcagagatgatgccaagcctctgctgagactgaagggattcccttcctttcctctggtcgagagacaggccaacgaagtggactggtgggacatggtgtgtaacgtgaagaagctgatcaacgagaaaaaggaggatggcaaggtgttttggcagaatctggctggctacaagagacaggaagccctgagaccatacctgagcagcgaggaagatcggaagaagggaaagaaattcgctcggtaccagctgggcgacctgctgctgcacctggaaaagaagcacggcgaggactggggaaaggtgtacgacgaggcctgggagcggattgacaagaaagtggaaggcctgagcaagcacatcaagctggaagaggaacggagaagcgaggacgcccagagcaaggccgccctgaccgactggctgcgggctaaggccagcttcgtgatcgagggcctgaaggaggccgacaaggacgagttctgcagatgcgagctgaagctgcagaagtggtacggggacctgcggggaaagcccttcgccatcgaagccgagaacagcatcctggacatcagcggcttcagcaagcagtacaactgtgccttcatctggcagaaggacggcgtgaagaagctgaacctgtacctgatcatcaactacttcaagggcggcaagctgcggttcaagaagatcaaacctgaagccttcgaagccaacagattctacaccgtgatcaacaaaaagagcggcgagatcgtgcccatggaggtgaacttcaacttcgacgaccccaacctgatcatcctgcctctggcctttggcaagagacagggcagagaattcatctggaacgacctgctgtccctggaaaccggcagcctgaagctggccaacggaagagtgatcgagaagacactgtacaacagaagaacccggcaggatgagcctgccctgttcgtggccctgaccttcgagcggcgggaggtcctggactcctccaatatcaaaccaatgaacctgatcggcgtggcaagaggcgaaaacatccccgccgtgatcgccctgaccgaccccgagggctgcccactgagccggtttaaggatagcctgggaaacccaacccacatcctgagaatcggcgagagctataaggagaagcagcggaccatccaggccaagaaggaggtggagcagcggagagccggcggctacagccggaagtacgccagcaaagccaagaatctggcagacgatatggtgagaaacaccgctagagatctgctgtactacgccgtgacccaggatgccatgctgatcttcgccaacctgagccggggcttcggccggcagggcaagcggaccttcatggccgagagacagtacacacggatggaggactggctgaccgccaagctggcctacgagggcctgagcaagacctacctgtccaagacactggcccagtacacctccaagacatgcagcaactgtgggtttaccatcaccagcgccgactacgacagggtgctggagaagctgaagaagacagcaacaggctggatgaccacaattaacggcaaggagctgaaggtggagggccagattacctactacaacagatacaagagacagaacgtagtcaaggacctgtccgtcgagctggatagactgagcgaagaatctgtgaacaacgacatctcctcctggacaaagggcagaagcggagaagctctgagcctcctgaagaaaagattctcccatagacccgtgcaggagaagttcgtgtgcctgaactgcggcttcgagacacacgcagccgagcaagccgccctgaacatcgccagatcctggctgttcctgcggagccaggagtacaagaaataccagacaaacaagacaaccggcaacaccgataagagagccttcgtcgagacctggcagtccttttaccggaagaagcttaaggaggtgtggaaacctgccgtgcggtctggcggatctggcggaggctccgtggagcccgtgagcttcgaggaggtggccgtgtacttcagcgaggaggagtgggccctgctggaccccggccagagggccctgtactgggacgtgatgcaggagaactacgaggccgtgagctggctggtgaggggcaggggcgtgagcaaggcccacgtgatcagctgggtggagaggggcgaggagctgtggatccccgacaggcagggctgcgaggagggcgagagcatcagcgacatcggcggcccaagcagcggcgcccctcctcccagcggcggcagcccagccggctccccaacctctaccgaggagggcacctctgagtccgccacccccgagagcggccctggcacctccaccgagcccagcgagggcagcgcacccggcagccctgccggcagccccacctccacagaggagggaaccagcaccgagcccagcgaaggcagcgccccaggcaccagcaccgagcctagtgagcaggagattaaacggatcaacaagatcagaagaagacttgtgaaagacagcaacaccaagaaggccggcaagacaggccccatgaaaaccctgctggttagagtgatgacacccgatctgagagagcggctggaaaacctgagaaagaagcctgaaaatatcccccagcccatcagcaatacatctagagccaacctgaataagctgctgaccgattacaccgaaatgaagaaggcgatcctgcatgtgtactgggaagagttccagaaggaccctgtgggcctgatgagccgggtggcccagcctgccagcaagaagatcgatcagaacaagctgaaacctgagatggacgagaagggcaacctgaccaccgccggctttgcctgctctcagtgtggccagcccctgttcgtgtacaagctggagcaggtgtctgagaagggcaaggcttacaccaactacttcggacggtgcaatgtggccgagcacgaaaagctgatcctgctggcccagctgaagcccgagaaggatagcgacgaagccgtgacatatagcctgggaaagtttgggcagagggccctggatttctacagcattcatgtgaccaaggagtccacccaccccgtgaagcccctggcccagatcgccggaaacagatacgcctccggacctgtgggaaaggccctgagcgacgcatgtatgggcacaatcgcctccttcctgtctaagtaccaggacatcatcatcgaacaccagaaggtggtgaagggcaaccagaagagactggagagcctgcgggagctggccggcaaggaaaacctggaataccctagcgtgaccctgccacctcagcctcacaccaaggagggcgttgatgcctacaacgaagtgatcgcccgggtgcgaatgtgggtgaacctgaacctgtggcagaagctgaagctaagcagagatgatgccaagcctctgctgagactgaagggattcccttcctttcctctggtcgagagacaggccaacgaagtggactggtgggacatggtgtgtaacgtgaagaagctgatcaacgagaaaaaggaggatggcaaggtgttttggcagaatctggctggctacaagagacaggaagccctgagaccatacctgagcagcgaggaagatcggaagaagggaaagaaattcgctcggtaccagctgggcgacctgctgctgcacctggaaaagaagcacggcgaggactggggaaaggtgtacgacgaggcctgggagcggattgacaagaaagtggaaggcctgagcaagcacatcaagctggaagaggaacggagaagcgaggacgcccagagcaaggccgccctgaccgactggctgcgggctaaggccagcttcgtgatcgagggcctgaaggaggccgacaaggacgagttctgcagatgcgagctgaagctgcagaagtggtacggggacctgcggggaaagcccttcgccatcgaagccgagaacagcatcctggacatcagcggcttcagcaagcagtacaactgtgccttcatctggcagaaggacggcgtgaagaagctgaacctgtacctgatcatcaactacttcaagggcggcaagctgcggttcaagaagatcaaacctgaagccttcgaagccaacagattctacaccgtgatcaacaaaaagagcggcgagatcgtgcccatggaggtgaacttcaacttcgacgaccccaacctgatcatcctgcctctggcctttggcaagagacagggcagagaattcatctggaacgacctgctgtccctggaaaccggcagcctgaagctggccaacggaagagtgatcgagaagacactgtacaacagaagaacccggcaggatgagcctgccctgttcgtggccctgaccttcgagcggcgggaggtcctggactcctccaatatcaaaccaatgaacctgatcggcgtggcaagaggcgaaaacatccccgccgtgatcgccctgaccgaccccgagggctgcccactgagccggtttaaggatagcctgggaaacccaacccacatcctgagaatcggcgagagctataaggagaagcagcggaccatccaggccaagaaggaggtggagcagcggagagccggcggctacagccggaagtacgccagcaaagccaagaatctggcagacgatatggtgagaaacaccgctagagatctgctgtactacgccgtgacccaggatgccatgctgatcttcgccaacctgagccggggcttcggccggcagggcaagcggaccttcatggccgagagacagtacacacggatggaggactggctgaccgccaagctggcctacgagggcctgagcaagacctacctgtccaagacactggcccagtacacctccaagacatgcagcaactgtgggtttaccatcaccagcgccgactacgacagggtgctggagaagctgaagaagacagcaacaggctggatgaccacaattaacggcaaggagctgaaggtggagggccagattacctactacaacagatacaagagacagaacgtagtcaaggacctgtccgtcgagctggatagactgagcgaagaatctgtgaacaacgacatctcctcctggacaaagggcagaagcggagaagctctgagcctcctgaagaaaagattctcccatagacccgtgcaggagaagttcgtgtgcctgaactgcggcttcgagacacacgcagccgagcaagccgccctgaacatcgccagatcctggctgttcctgcggagccaggagtacaagaaataccagacaaacaagacaaccggcaacaccgataagagagccttcgtcgagacctggcagtccttttaccggaagaagcttaaggaggtgtggaaacctgccgtgcggtctggcggatctggcggaggctcctgtggagcccgtgagcttcgaggaggtggccgtgtacttcagcgaggaggagtgggccctgctggaccccggccagagggccctgtactgggacgtgatgcaggagaactacgaggccgtgagctggctggtgaggggcaggggcgtgagcaaggcccacgtgatcagctgggtggagaggggcgaggagctgtggatccccgacaggcagggctgcgaggagggcgagagcatcagcgacatcggatctggctccggcagcggccccaagaaaaagagaaaagtctaagctgccttctgcggggcttgccttctggccatgcccttcttctctcccttgcacctgtacctcttggtctttgaataaagcctgagtaggaaggctagcaaaaaaaaaaaaaaaaaaaaaaaaaaaaaaaaaaaaaaaaaaaaaaaaaaaaaaaaaaaaaaaaaaaaaaaaaaaaaaaa

SEQ ID NO: 15648 - RNA, 9485 nt, synthetic construct
  source 1..9485: mol_type = other RNA
aggaaataagagagaaaagaagagtaagaagaaatataagagccaccatggcccctaagaagaagcgtaaagtgagccggatggaacgcctcgtctacgaggtgcggcagaagtgcagaaacatcgaggacatctgcatctcctgcggatctctgaacgtgaccctggagcacccactgttcatcggcggcatgtgccagaactgtaaaaactgttttctggagtgtgcctatcaatacgacgatgacggctaccagagctactgcaccatctgttgcggcggaagagaggtgctgatgtgtggaaataacaactgctgccggtgcttctgcgtggaatgcgtggacctgctggtgggccccggcgccgcccaggccgctattaaggaagatccttggaactgctacatgtgcggccacaagggcacatacggcctgctgagacggagagaggactggcctagcagactgcagatgttcttcgccaataaccacgaccaggagttcgacccccctaaggtgtaccctcccgtccccgccgagaagagaaagcccatccgggtcctgagcctgttcgatggcatcgccaccggtctgctggtgctgaaggacctgggcatccaggtggataggtacattgcctccgaggtgtgcgaggactccatcaccgtgggaatggtgcgtcatcagggcaagatcatgtacgtgggcgacgtgcggagcgtgacacagaagcatatccaggagtggggccctttcgacctggtgatcggcggcagcccttgcaatgacctgagcatcgtgaacccagcccggaagggcctgtacgagggaaccggcagactgttcttcgagttttacagactgctgcacgacgcccggcctaaggaaggcgacgaccggcccttcttttggctgttcgagaatgtggtggccatgggagtcagcgacaagcgggatattagccggttcctggagagcaaccccgtgatgatcgatgccaaggaagtgagcgccgcccaccgggccagatacttctggggcaatctgcctggcatgaacagacccctggccagcaccgtgaacgacaagctggagctgcaggagtgcctggagcacggccggatcgccaagttcagcaaggtgagaaccatcaccacccgaagcaacagcatcaaacaaggcaaggaccagcactttcctgtgttcatgaacgagaaggaggacatcctgtggtgtaccgagatggagagagtgttcgggttcccagtccactacacagatgtcagcaacatgtctagactggccagacagagactgctgggaagaagctggtccgtccctgtgatcagacacctgttcgcccctctgaaggagtacttcgcctgcgtgagcagcggcaacagcaacgccaacagccggggccccagcttctctagcggcctggtgccactgtccctgagagggagccacatgggccccatggagatctacaaaaccgtgagcgcctggaagcggcagcctgtgcgcgtgctgagcctgtttcggaatatcgataaagtcctgaaaagcctgggattcctggagagcggctctggctccggcggtggcaccctgaagtacgtggaggatgtgacaaacgtggtcagacgggatgtggagaagtggggccccttcgatctggtgtacggcagcacccaacccctgggcagctcttgtgaccggtgccctggctggtacatgtttcagttccaccggatcctgcagtacgccctgccgagacaggagtcccagcggccattcttttggattttcatggacaacttgctgctgaccgaggatgaccaggaaactaccactcggttcctgcagaccgaagccgtgaccctgcaggacgtgagaggccgggactaccagaacgccatgcgggtgtggtccaacatccctggactgaaaagcaagcacgcacctctgacccctaaagaagaggagtacctgcaggcccaggtgcggagcagaagcaagctggacgcccctaaggtggatctgctggtgaagaattgcctcctgcccctgagagagtacttcaagtatttcagccagaatagtctgcccctgggaggcagcggcggcggcgccctggtgacatttgaggacgtcgccgtgcggttcacccaggaggaatgggctctgctggatccttctcagaaaatcctgtaccgggacgtgatgagagagacataccggaatctgacctccgtgggcatcaactgggaatgttgggaccttgaagcctgcttcagaagcctgggaagaaacctgagagtgcaggtggtgaagagaaagtgcgagctgaccaacagcggcccctgcgccgagggcggcccaagcagcggcgcccctcctcccagcggcggcagcccagccggctccccaacctctaccgaggagggcacctctgagtccgccacccccgagagcggccctggcacctccaccgagcccagcgagggcagcgcacccggcagccctgccggcagccccacctccacagaggagggaaccagcaccgagcccagcgaaggcagcgccccaggcaccagcaccgagcctagtgagcaggagattaaacggatcaacaagatcagaagaagacttgtgaaagacagcaacaccaagaaggccggcaagacaggccccatgaaaaccctgctggttagagtgatgacacccgatctgagagagcggctggaaaacctgagaaagaagcctgaaaatatcccccagcccatcagcaatacatctagagccaacctgaataagctgctgaccgattacaccgaaatgaagaaggcgatcctgcatgtgtactgggaagagttccagaaggaccctgtgggcctgatgagccgggtggcccagcctgccagcaagaagatcgatcagaacaagctgaaacctgagatggacgagaagggcaacctgaccaccgccggctttgcctgctctcagtgtggccagcccctgttcgtgtacaagctggagcaggtgtctgagaagggcaaggcttacaccaactacttcggacggtgcaatgtggccgagcacgaaaagctgatcctgctggcccagctgaagcccgagaaggatagcgacgaagccgtgacatatagcctgggaaagtttgggcagagggccctggatttctacagcattcatgtgaccaaggagtccacccaccccgtgaagcccctggcccagatcgccggaaacagatacgcctccggacctgtgggaaaggccctgagcgacgcatgtatgggcacaatcgcctccttcctgtctaagtaccaggacatcatcatcgaacaccagaaggtggtgaagggcaaccagaagagactggagagcctgcgggagctggccggcaaggaaaacctggaataccctagcgtgaccctgccacctcagcctcacaccaaggagggcgttgatgcctacaacgaagtgatcgcccgggtgcgaatgtgggtgaacctgaacctgtggcagaagctgaagctaagcagagatgatgccaagcctctgctgagactgaagggattcccttcctttcctctggtcgagagacaggccaacgaagtggactggtgggacatggtgtgtaacgtgaagaagctgatcaacgagaaaaaggaggatggcaaggtgttttggcagaatctggctggctacaagagacaggaagccctgagaccatacctgagcagcgaggaagatcggaagaagggaaagaaattcgctcggtaccagctgggcgacctgctgctgcacctggaaaagaagcacggcgaggactggggaaaggtgtacgacgaggcctgggagcggattgacaagaaagtggaaggcctgagcaagcacatcaagctggaagaggaacggagaagcgaggacgcccagagcaaggccgccctgaccgactggctgcgggctaaggccagcttcgtgatcgagggcctgaaggaggccgacaaggacgagttctgcagatgcgagctgaagctgcagaagtggtacggggacctgcggggaaagcccttcgccatcgaagccgagaacagcatcctggacatcagcggcttcagcaagcagtacaactgtgccttcatctggcagaaggacggcgtgaagaagctgaacctgtacctgatcatcaactacttcaagggcggcaagctgcggttcaagaagatcaaacctgaagccttcgaagccaacagattctacaccgtgatcaacaaaaagagcggcgagatcgtgcccatggaggtgaacttcaacttcgacgaccccaacctgatcatcctgcctctggcctttggcaagagacagggcagagaattcatctggaacgacctgctgtccctggaaaccggcagcctgaagctggccaacggaagagtgatcgagaagacactgtacaacagaagaacccggcaggatgagcctgccctgttcgtggccctgaccttcgagcggcgggaggtcctggactcctccaatatcaaaccaatgaacctgatcggcgtggcaagaggcgaaaacatccccgccgtgatcgccctgaccgaccccgagggctgcccactgagccggtttaaggatagcctgggaaacccaacccacatcctgagaatcggcgagagctataaggagaagcagcggaccatccaggccaagaaggaggtggagcagcggagagccggcggctacagccggaagtacgccagcaaagccaagaatctggcagacgatatggtgagaaacaccgctagagatctgctgtactacgccgtgacccaggatgccatgctgatcttcgccaacctgagccggggcttcggccggcagggcaagcggaccttcatggccgagagacagtacacacggatggaggactggctgaccgccaagctggcctacgagggcctgagcaagacctacctgtccaagacactggcccagtacacctccaagacatgcagcaactgtgggtttaccatcaccagcgccgactacgacagggtgctggagaagctgaagaagacagcaacaggctggatgaccacaattaacggcaaggagctgaaggtggagggccagattacctactacaacagatacaagagacagaacgtagtcaaggacctgtccgtcgagctggatagactgagcgaagaatctgtgaacaacgacatctcctcctggacaaagggcagaagcggagaagctctgagcctcctgaagaaaagattctcccatagacccgtgcaggagaagttcgtgtgcctgaactgcggcttcgagacacacgcagccgagcaagccgccctgaacatcgccagatcctggctgttcctgcggagccaggagtacaagaaataccagacaaacaagacaaccggcaacaccgataagagagccttcgtcgagacctggcagtccttttaccggaagaagcttaaggaggtgtggaaacctgccgtgcggtctggcggatctggcggaggctccggcagcgtgagcttcgacgaggtgagcgtgaggttcagcaacgaggagtgggccctgctggaccccggccagagggccctgtacgaggaggtgatggaggagatcagggagatgatgaccagcgtgggcgacgtgagcgagttcctgaccgagggcgagcagagcgagctgagcagggagggcgccgaggagcagaaggagcagaggaagcagagggtgcaggtgggcacctacaggaacgagggcggcccaagcagcggcgcccctcctcccagcggcggcagcccagccggctccccaacctctaccgaggagggcacctctgagtccgccacccccgagagcggccctggcacctccaccgagcccagcgagggcagcgcacccggcagccctgccggcagccccacctccacagaggagggaaccagcaccgagcccagcgaaggcagcgccccaggcaccagcaccgagcctagtgagcaggagattaaacggatcaacaagatcagaagaagacttgtgaaagacagcaacaccaagaaggccggcaagacaggccccatgaaaaccctgctggttagagtgatgacacccgatctgagagagcggctggaaaacctgagaaagaagcctgaaaatatcccccagcccatcagcaatacatctagagccaacctgaataagctgctgaccgattacaccgaaatgaagaaggcgatcctgcatgtgtactgggaagagttccagaaggaccctgtgggcctgatgagccgggtggcccagcctgccagcaagaagatcgatcagaacaagctgaaacctgagatggacgagaagggcaacctgaccaccgccggctttgcctgctctcagtgtggccagcccctgttcgtgtacaagctggagcaggtgtctgagaagggcaaggcttacaccaactacttcggacggtgcaatgtggccgagcacgaaaagctgatcctgctggcccagctgaagcccgagaaggatagcgacgaagccgtgacatatagcctgggaaagtttgggcagagggccctggatttctacagcattcatgtgaccaaggagtccacccaccccgtgaagcccctggcccagatcgccggaaacagatacgcctccggacctgtgggaaaggccctgagcgacgcatgtatgggcacaatcgcctccttcctgtctaagtaccaggacatcatcatcgaacaccagaaggtggtgaagggcaaccagaagagactggagagcctgcgggagctggccggcaaggaaaacctggaataccctagcgtgaccctgccacctcagcctcacaccaaggagggcgttgatgcctacaacgaagtgatcgcccgggtgcgaatgtgggtgaacctgaacctgtggcagaagctgaagctaagcagagatgatgccaagcctctgctgagactgaagggattcccttcctttcctctggtcgagagacaggccaacgaagtggactggtgggacatggtgtgtaacgtgaagaagctgatcaacgagaaaaaggaggatggcaaggtgttttggcagaatctggctggctacaagagacaggaagccctgagaccatacctgagcagcgaggaagatcggaagaagggaaagaaattcgctcggtaccagctgggcgacctgctgctgcacctggaaaagaagcacggcgaggactggggaaaggtgtacgacgaggcctgggagcggattgacaagaaagtggaaggcctgagcaagcacatcaagctggaagaggaacggagaagcgaggacgcccagagcaaggccgccctgaccgactggctgcgggctaaggccagcttcgtgatcgagggcctgaaggaggccgacaaggacgagttctgcagatgcgagctgaagctgcagaagtggtacggggacctgcggggaaagcccttcgccatcgaagccgagaacagcatcctggacatcagcggcttcagcaagcagtacaactgtgccttcatctggcagaaggacggcgtgaagaagctgaacctgtacctgatcatcaactacttcaagggcggcaagctgcggttcaagaagatcaaacctgaagccttcgaagccaacagattctacaccgtgatcaacaaaaagagcggcgagatcgtgcccatggaggtgaacttcaacttcgacgaccccaacctgatcatcctgcctctggcctttggcaagagacagggcagagaattcatctggaacgacctgctgtccctggaaaccggcagcctgaagctggccaacggaagagtgatcgagaagacactgtacaacagaagaacccggcaggatgagcctgccctgttcgtggccctgaccttcgagcggcgggaggtcctggactcctccaatatcaaaccaatgaacctgatcggcgtggcaagaggcgaaaacatccccgccgtgatcgccctgaccgaccccgagggctgcccactgagccggtttaaggatagcctgggaaacccaacccacatcctgagaatcggcgagagctataaggagaagcagcggaccatccaggccaagaaggaggtggagcagcggagagccggcggctacagccggaagtacgccagcaaagccaagaatctggcagacgatatggtgagaaacaccgctagagatctgctgtactacgccgtgacccaggatgccatgctgatcttcgccaacctgagccggggcttcggccggcagggcaagcggaccttcatggccgagagacagtacacacggatggaggactggctgaccgccaagctggcctacgagggcctgagcaagacctacctgtccaagacactggcccagtacacctccaagacatgcagcaactgtgggtttaccatcaccagcgccgactacgacagggtgctggagaagctgaagaagacagcaacaggctggatgaccacaattaacggcaaggagctgaaggtggagggccagattacctactacaacagatacaagagacagaacgtagtcaaggacctgtccgtcgagctggatagactgagcgaagaatctgtgaacaacgacatctcctcctggacaaagggcagaagcggagaagctctgagcctcctgaagaaaagattctcccatagacccgtgcaggagaagttcgtgtgcctgaactgcggcttcgagacacacgcagccgagcaagccgccctgaacatcgccagatcctggctgttcctgcggagccaggagtacaagaaataccagacaaacaagacaaccggcaacaccgataagagagccttcgtcgagacctggcagtccttttaccggaagaagcttaaggaggtgtggaaacctgccgtgcggtctggcggatctggcggaggctcctggcagcgtgagcttcgacgaggtgagcgtgaggttcagcaacgaggagtgggccctgctggaccccggccagagggccctgtacgaggaggtgatggaggagatcagggagatgatgaccagcgtgggcgacgtgagcgagttcctgaccgagggcgagcagagcgagctgagcagggagggcgccgaggagcagaaggagcagaggaagcagagggtgcaggtgggcacctacaggaacgagggatctggctccggcagcggccccaagaaaaagagaaaagtctaagctgccttctgcggggcttgccttctggccatgcccttcttctctcccttgcacctgtacctcttggtctttgaataaagcctgagtaggaaggctagcaaaaaaaaaaaaaaaaaaaaaaaaaaaaaaaaaaaaaaaaaaaaaaaaaaaaaaaaaaaaaaaaaaaaaaaaaaaaaaaa

SEQ ID NO: 15649 - RNA, 9557 nt, synthetic construct
  source 1..9557: mol_type = other RNA
aggaaataagagagaaaagaagagtaagaagaaatataagagccaccatggcccctaagaagaagcgtaaagtgagccggatggaacgcctcgtctacgaggtgcggcagaagtgcagaaacatcgaggacatctgcatctcctgcggatctctgaacgtgaccctggagcacccactgttcatcggcggcatgtgccagaactgtaaaaactgttttctggagtgtgcctatcaatacgacgatgacggctaccagagctactgcaccatctgttgcggcggaagagaggtgctgatgtgtggaaataacaactgctgccggtgcttctgcgtggaatgcgtggacctgctggtgggccccggcgccgcccaggccgctattaaggaagatccttggaactgctacatgtgcggccacaagggcacatacggcctgctgagacggagagaggactggcctagcagactgcagatgttcttcgccaataaccacgaccaggagttcgacccccctaaggtgtaccctcccgtccccgccgagaagagaaagcccatccgggtcctgagcctgttcgatggcatcgccaccggtctgctggtgctgaaggacctgggcatccaggtggataggtacattgcctccgaggtgtgcgaggactccatcaccgtgggaatggtgcgtcatcagggcaagatcatgtacgtgggcgacgtgcggagcgtgacacagaagcatatccaggagtggggccctttcgacctggtgatcggcggcagcccttgcaatgacctgagcatcgtgaacccagcccggaagggcctgtacgagggaaccggcagactgttcttcgagttttacagactgctgcacgacgcccggcctaaggaaggcgacgaccggcccttcttttggctgttcgagaatgtggtggccatgggagtcagcgacaagcgggatattagccggttcctggagagcaaccccgtgatgatcgatgccaaggaagtgagcgccgcccaccgggccagatacttctggggcaatctgcctggcatgaacagacccctggccagcaccgtgaacgacaagctggagctgcaggagtgcctggagcacggccggatcgccaagttcagcaaggtgagaaccatcaccacccgaagcaacagcatcaaacaaggcaaggaccagcactttcctgtgttcatgaacgagaaggaggacatcctgtggtgtaccgagatggagagagtgttcgggttcccagtccactacacagatgtcagcaacatgtctagactggccagacagagactgctgggaagaagctggtccgtccctgtgatcagacacctgttcgcccctctgaaggagtacttcgcctgcgtgagcagcggcaacagcaacgccaacagccggggccccagcttctctagcggcctggtgccactgtccctgagagggagccacatgggccccatggagatctacaaaaccgtgagcgcctggaagcggcagcctgtgcgcgtgctgagcctgtttcggaatatcgataaagtcctgaaaagcctgggattcctggagagcggctctggctccggcggtggcaccctgaagtacgtggaggatgtgacaaacgtggtcagacgggatgtggagaagtggggccccttcgatctggtgtacggcagcacccaacccctgggcagctcttgtgaccggtgccctggctggtacatgtttcagttccaccggatcctgcagtacgccctgccgagacaggagtcccagcggccattcttttggattttcatggacaacttgctgctgaccgaggatgaccaggaaactaccactcggttcctgcagaccgaagccgtgaccctgcaggacgtgagaggccgggactaccagaacgccatgcgggtgtggtccaacatccctggactgaaaagcaagcacgcacctctgacccctaaagaagaggagtacctgcaggcccaggtgcggagcagaagcaagctggacgcccctaaggtggatctgctggtgaagaattgcctcctgcccctgagagagtacttcaagtatttcagccagaatagtctgcccctgggaggcagcggcggcggcgccctggtgacatttgaggacgtcgccgtgcggttcacccaggaggaatgggctctgctggatccttctcagaaaatcctgtaccgggacgtgatgagagagacataccggaatctgacctccgtgggcatcaactgggaatgttgggaccttgaagcctgcttcagaagcctgggaagaaacctgagagtgcaggtggtgaagagaaagtgcgagctgaccaacagcggcccctgcgccgagggcggcccaagcagcggcgcccctcctcccagcggcggcagcccagccggctccccaacctctaccgaggagggcacctctgagtccgccacccccgagagcggccctggcacctccaccgagcccagcgagggcagcgcacccggcagccctgccggcagccccacctccacagaggagggaaccagcaccgagcccagcgaaggcagcgccccaggcaccagcaccgagcctagtgagcaggagattaaacggatcaacaagatcagaagaagacttgtgaaagacagcaacaccaagaaggccggcaagacaggccccatgaaaaccctgctggttagagtgatgacacccgatctgagagagcggctggaaaacctgagaaagaagcctgaaaatatcccccagcccatcagcaatacatctagagccaacctgaataagctgctgaccgattacaccgaaatgaagaaggcgatcctgcatgtgtactgggaagagttccagaaggaccctgtgggcctgatgagccgggtggcccagcctgccagcaagaagatcgatcagaacaagctgaaacctgagatggacgagaagggcaacctgaccaccgccggctttgcctgctctcagtgtggccagcccctgttcgtgtacaagctggagcaggtgtctgagaagggcaaggcttacaccaactacttcggacggtgcaatgtggccgagcacgaaaagctgatcctgctggcccagctgaagcccgagaaggatagcgacgaagccgtgacatatagcctgggaaagtttgggcagagggccctggatttctacagcattcatgtgaccaaggagtccacccaccccgtgaagcccctggcccagatcgccggaaacagatacgcctccggacctgtgggaaaggccctgagcgacgcatgtatgggcacaatcgcctccttcctgtctaagtaccaggacatcatcatcgaacaccagaaggtggtgaagggcaaccagaagagactggagagcctgcgggagctggccggcaaggaaaacctggaataccctagcgtgaccctgccacctcagcctcacaccaaggagggcgttgatgcctacaacgaagtgatcgcccgggtgcgaatgtgggtgaacctgaacctgtggcagaagctgaagctaagcagagatgatgccaagcctctgctgagactgaagggattcccttcctttcctctggtcgagagacaggccaacgaagtggactggtgggacatggtgtgtaacgtgaagaagctgatcaacgagaaaaaggaggatggcaaggtgttttggcagaatctggctggctacaagagacaggaagccctgagaccatacctgagcagcgaggaagatcggaagaagggaaagaaattcgctcggtaccagctgggcgacctgctgctgcacctggaaaagaagcacggcgaggactggggaaaggtgtacgacgaggcctgggagcggattgacaagaaagtggaaggcctgagcaagcacatcaagctggaagaggaacggagaagcgaggacgcccagagcaaggccgccctgaccgactggctgcgggctaaggccagcttcgtgatcgagggcctgaaggaggccgacaaggacgagttctgcagatgcgagctgaagctgcagaagtggtacggggacctgcggggaaagcccttcgccatcgaagccgagaacagcatcctggacatcagcggcttcagcaagcagtacaactgtgccttcatctggcagaaggacggcgtgaagaagctgaacctgtacctgatcatcaactacttcaagggcggcaagctgcggttcaagaagatcaaacctgaagccttcgaagccaacagattctacaccgtgatcaacaaaaagagcggcgagatcgtgcccatggaggtgaacttcaacttcgacgaccccaacctgatcatcctgcctctggcctttggcaagagacagggcagagaattcatctggaacgacctgctgtccctggaaaccggcagcctgaagctggccaacggaagagtgatcgagaagacactgtacaacagaagaacccggcaggatgagcctgccctgttcgtggccctgaccttcgagcggcgggaggtcctggactcctccaatatcaaaccaatgaacctgatcggcgtggcaagaggcgaaaacatccccgccgtgatcgccctgaccgaccccgagggctgcccactgagccggtttaaggatagcctgggaaacccaacccacatcctgagaatcggcgagagctataaggagaagcagcggaccatccaggccaagaaggaggtggagcagcggagagccggcggctacagccggaagtacgccagcaaagccaagaatctggcagacgatatggtgagaaacaccgctagagatctgctgtactacgccgtgacccaggatgccatgctgatcttcgccaacctgagccggggcttcggccggcagggcaagcggaccttcatggccgagagacagtacacacggatggaggactggctgaccgccaagctggcctacgagggcctgagcaagacctacctgtccaagacactggcccagtacacctccaagacatgcagcaactgtgggtttaccatcaccagcgccgactacgacagggtgctggagaagctgaagaagacagcaacaggctggatgaccacaattaacggcaaggagctgaaggtggagggccagattacctactacaacagatacaagagacagaacgtagtcaaggacctgtccgtcgagctggatagactgagcgaagaatctgtgaacaacgacatctcctcctggacaaagggcagaagcggagaagctctgagcctcctgaagaaaagattctcccatagacccgtgcaggagaagttcgtgtgcctgaactgcggcttcgagacacacgcagccgagcaagccgccctgaacatcgccagatcctggctgttcctgcggagccaggagtacaagaaataccagacaaacaagacaaccggcaacaccgataagagagccttcgtcgagacctggcagtccttttaccggaagaagcttaaggaggtgtggaaacctgccgtgcggtctggcggatctggcggaggctccgtgacctacgaggacgtgcacgtgaacttcacccaggaggagtgggccctgctggaccccagccagaagaagctgtacaaggacgtgatgctggagacctacaggaacctgaacgccatcggcttcagctgggaggcccagaacatcgaggagcactgccagagcttcggcaggcacaggaggtgcgagaggagccagagggccgagaagcccagcgagtacacccagcccgacaagggcttcgccctgagggcccacagccacgcccagaggcacgagggcggcccaagcagcggcgcccctcctcccagcggcggcagcccagccggctccccaacctctaccgaggagggcacctctgagtccgccacccccgagagcggccctggcacctccaccgagcccagcgagggcagcgcacccggcagccctgccggcagccccacctccacagaggagggaaccagcaccgagcccagcgaaggcagcgccccaggcaccagcaccgagcctagtgagcaggagattaaacggatcaacaagatcagaagaagacttgtgaaagacagcaacaccaagaaggccggcaagacaggccccatgaaaaccctgctggttagagtgatgacacccgatctgagagagcggctggaaaacctgagaaagaagcctgaaaatatcccccagcccatcagcaatacatctagagccaacctgaataagctgctgaccgattacaccgaaatgaagaaggcgatcctgcatgtgtactgggaagagttccagaaggaccctgtgggcctgatgagccgggtggcccagcctgccagcaagaagatcgatcagaacaagctgaaacctgagatggacgagaagggcaacctgaccaccgccggctttgcctgctctcagtgtggccagcccctgttcgtgtacaagctggagcaggtgtctgagaagggcaaggcttacaccaactacttcggacggtgcaatgtggccgagcacgaaaagctgatcctgctggcccagctgaagcccgagaaggatagcgacgaagccgtgacatatagcctgggaaagtttgggcagagggccctggatttctacagcattcatgtgaccaaggagtccacccaccccgtgaagcccctggcccagatcgccggaaacagatacgcctccggacctgtgggaaaggccctgagcgacgcatgtatgggcacaatcgcctccttcctgtctaagtaccaggacatcatcatcgaacaccagaaggtggtgaagggcaaccagaagagactggagagcctgcgggagctggccggcaaggaaaacctggaataccctagcgtgaccctgccacctcagcctcacaccaaggagggcgttgatgcctacaacgaagtgatcgcccgggtgcgaatgtgggtgaacctgaacctgtggcagaagctgaagctaagcagagatgatgccaagcctctgctgagactgaagggattcccttcctttcctctggtcgagagacaggccaacgaagtggactggtgggacatggtgtgtaacgtgaagaagctgatcaacgagaaaaaggaggatggcaaggtgttttggcagaatctggctggctacaagagacaggaagccctgagaccatacctgagcagcgaggaagatcggaagaagggaaagaaattcgctcggtaccagctgggcgacctgctgctgcacctggaaaagaagcacggcgaggactggggaaaggtgtacgacgaggcctgggagcggattgacaagaaagtggaaggcctgagcaagcacatcaagctggaagaggaacggagaagcgaggacgcccagagcaaggccgccctgaccgactggctgcgggctaaggccagcttcgtgatcgagggcctgaaggaggccgacaaggacgagttctgcagatgcgagctgaagctgcagaagtggtacggggacctgcggggaaagcccttcgccatcgaagccgagaacagcatcctggacatcagcggcttcagcaagcagtacaactgtgccttcatctggcagaaggacggcgtgaagaagctgaacctgtacctgatcatcaactacttcaagggcggcaagctgcggttcaagaagatcaaacctgaagccttcgaagccaacagattctacaccgtgatcaacaaaaagagcggcgagatcgtgcccatggaggtgaacttcaacttcgacgaccccaacctgatcatcctgcctctggcctttggcaagagacagggcagagaattcatctggaacgacctgctgtccctggaaaccggcagcctgaagctggccaacggaagagtgatcgagaagacactgtacaacagaagaacccggcaggatgagcctgccctgttcgtggccctgaccttcgagcggcgggaggtcctggactcctccaatatcaaaccaatgaacctgatcggcgtggcaagaggcgaaaacatccccgccgtgatcgccctgaccgaccccgagggctgcccactgagccggtttaaggatagcctgggaaacccaacccacatcctgagaatcggcgagagctataaggagaagcagcggaccatccaggccaagaaggaggtggagcagcggagagccggcggctacagccggaagtacgccagcaaagccaagaatctggcagacgatatggtgagaaacaccgctagagatctgctgtactacgccgtgacccaggatgccatgctgatcttcgccaacctgagccggggcttcggccggcagggcaagcggaccttcatggccgagagacagtacacacggatggaggactggctgaccgccaagctggcctacgagggcctgagcaagacctacctgtccaagacactggcccagtacacctccaagacatgcagcaactgtgggtttaccatcaccagcgccgactacgacagggtgctggagaagctgaagaagacagcaacaggctggatgaccacaattaacggcaaggagctgaaggtggagggccagattacctactacaacagatacaagagacagaacgtagtcaaggacctgtccgtcgagctggatagactgagcgaagaatctgtgaacaacgacatctcctcctggacaaagggcagaagcggagaagctctgagcctcctgaagaaaagattctcccatagacccgtgcaggagaagttcgtgtgcctgaactgcggcttcgagacacacgcagccgagcaagccgccctgaacatcgccagatcctggctgttcctgcggagccaggagtacaagaaataccagacaaacaagacaaccggcaacaccgataagagagccttcgtcgagacctggcagtccttttaccggaagaagcttaaggaggtgtggaaacctgccgtgcggtctggcggatctggcggaggctcctgtgacctacgaggacgtgcacgtgaacttcacccaggaggagtgggccctgctggaccccagccagaagaagctgtacaaggacgtgatgctggagacctacaggaacctgaacgccatcggcttcagctgggaggcccagaacatcgaggagcactgccagagcttcggcaggcacaggaggtgcgagaggagccagagggccgagaagcccagcgagtacacccagcccgacaagggcttcgccctgagggcccacagccacgcccagaggcacgagggatctggctccggcagcggccccaagaaaaagagaaaagtctaagctgccttctgcggggcttgccttctggccatgcccttcttctctcccttgcacctgtacctcttggtctttgaataaagcctgagtaggaaggctagcaaaaaaaaaaaaaaaaaaaaaaaaaaaaaaaaaaaaaaaaaaaaaaaaaaaaaaaaaaaaaaaaaaaaaaaaaaaaaaaa

SEQ ID NO: 15650 - RNA, 9485 nt, synthetic construct
  source 1..9485: mol_type = other RNA
aggaaataagagagaaaagaagagtaagaagaaatataagagccaccatggcccctaagaagaagcgtaaagtgagccggatggaacgcctcgtctacgaggtgcggcagaagtgcagaaacatcgaggacatctgcatctcctgcggatctctgaacgtgaccctggagcacccactgttcatcggcggcatgtgccagaactgtaaaaactgttttctggagtgtgcctatcaatacgacgatgacggctaccagagctactgcaccatctgttgcggcggaagagaggtgctgatgtgtggaaataacaactgctgccggtgcttctgcgtggaatgcgtggacctgctggtgggccccggcgccgcccaggccgctattaaggaagatccttggaactgctacatgtgcggccacaagggcacatacggcctgctgagacggagagaggactggcctagcagactgcagatgttcttcgccaataaccacgaccaggagttcgacccccctaaggtgtaccctcccgtccccgccgagaagagaaagcccatccgggtcctgagcctgttcgatggcatcgccaccggtctgctggtgctgaaggacctgggcatccaggtggataggtacattgcctccgaggtgtgcgaggactccatcaccgtgggaatggtgcgtcatcagggcaagatcatgtacgtgggcgacgtgcggagcgtgacacagaagcatatccaggagtggggccctttcgacctggtgatcggcggcagcccttgcaatgacctgagcatcgtgaacccagcccggaagggcctgtacgagggaaccggcagactgttcttcgagttttacagactgctgcacgacgcccggcctaaggaaggcgacgaccggcccttcttttggctgttcgagaatgtggtggccatgggagtcagcgacaagcgggatattagccggttcctggagagcaaccccgtgatgatcgatgccaaggaagtgagcgccgcccaccgggccagatacttctggggcaatctgcctggcatgaacagacccctggccagcaccgtgaacgacaagctggagctgcaggagtgcctggagcacggccggatcgccaagttcagcaaggtgagaaccatcaccacccgaagcaacagcatcaaacaaggcaaggaccagcactttcctgtgttcatgaacgagaaggaggacatcctgtggtgtaccgagatggagagagtgttcgggttcccagtccactacacagatgtcagcaacatgtctagactggccagacagagactgctgggaagaagctggtccgtccctgtgatcagacacctgttcgcccctctgaaggagtacttcgcctgcgtgagcagcggcaacagcaacgccaacagccggggccccagcttctctagcggcctggtgccactgtccctgagagggagccacatgggccccatggagatctacaaaaccgtgagcgcctggaagcggcagcctgtgcgcgtgctgagcctgtttcggaatatcgataaagtcctgaaaagcctgggattcctggagagcggctctggctccggcggtggcaccctgaagtacgtggaggatgtgacaaacgtggtcagacgggatgtggagaagtggggccccttcgatctggtgtacggcagcacccaacccctgggcagctcttgtgaccggtgccctggctggtacatgtttcagttccaccggatcctgcagtacgccctgccgagacaggagtcccagcggccattcttttggattttcatggacaacttgctgctgaccgaggatgaccaggaaactaccactcggttcctgcagaccgaagccgtgaccctgcaggacgtgagaggccgggactaccagaacgccatgcgggtgtggtccaacatccctggactgaaaagcaagcacgcacctctgacccctaaagaagaggagtacctgcaggcccaggtgcggagcagaagcaagctggacgcccctaaggtggatctgctggtgaagaattgcctcctgcccctgagagagtacttcaagtatttcagccagaatagtctgcccctgggaggcagcggcggcggcgccctggtgacatttgaggacgtcgccgtgcggttcacccaggaggaatgggctctgctggatccttctcagaaaatcctgtaccgggacgtgatgagagagacataccggaatctgacctccgtgggcatcaactgggaatgttgggaccttgaagcctgcttcagaagcctgggaagaaacctgagagtgcaggtggtgaagagaaagtgcgagctgaccaacagcggcccctgcgccgagggcggcccaagcagcggcgcccctcctcccagcggcggcagcccagccggctccccaacctctaccgaggagggcacctctgagtccgccacccccgagagcggccctggcacctccaccgagcccagcgagggcagcgcacccggcagccctgccggcagccccacctccacagaggagggaaccagcaccgagcccagcgaaggcagcgccccaggcaccagcaccgagcctagtgagcaggagattaaacggatcaacaagatcagaagaagacttgtgaaagacagcaacaccaagaaggccggcaagacaggccccatgaaaaccctgctggttagagtgatgacacccgatctgagagagcggctggaaaacctgagaaagaagcctgaaaatatcccccagcccatcagcaatacatctagagccaacctgaataagctgctgaccgattacaccgaaatgaagaaggcgatcctgcatgtgtactgggaagagttccagaaggaccctgtgggcctgatgagccgggtggcccagcctgccagcaagaagatcgatcagaacaagctgaaacctgagatggacgagaagggcaacctgaccaccgccggctttgcctgctctcagtgtggccagcccctgttcgtgtacaagctggagcaggtgtctgagaagggcaaggcttacaccaactacttcggacggtgcaatgtggccgagcacgaaaagctgatcctgctggcccagctgaagcccgagaaggatagcgacgaagccgtgacatatagcctgggaaagtttgggcagagggccctggatttctacagcattcatgtgaccaaggagtccacccaccccgtgaagcccctggcccagatcgccggaaacagatacgcctccggacctgtgggaaaggccctgagcgacgcatgtatgggcacaatcgcctccttcctgtctaagtaccaggacatcatcatcgaacaccagaaggtggtgaagggcaaccagaagagactggagagcctgcgggagctggccggcaaggaaaacctggaataccctagcgtgaccctgccacctcagcctcacaccaaggagggcgttgatgcctacaacgaagtgatcgcccgggtgcgaatgtgggtgaacctgaacctgtggcagaagctgaagctaagcagagatgatgccaagcctctgctgagactgaagggattcccttcctttcctctggtcgagagacaggccaacgaagtggactggtgggacatggtgtgtaacgtgaagaagctgatcaacgagaaaaaggaggatggcaaggtgttttggcagaatctggctggctacaagagacaggaagccctgagaccatacctgagcagcgaggaagatcggaagaagggaaagaaattcgctcggtaccagctgggcgacctgctgctgcacctggaaaagaagcacggcgaggactggggaaaggtgtacgacgaggcctgggagcggattgacaagaaagtggaaggcctgagcaagcacatcaagctggaagaggaacggagaagcgaggacgcccagagcaaggccgccctgaccgactggctgcgggctaaggccagcttcgtgatcgagggcctgaaggaggccgacaaggacgagttctgcagatgcgagctgaagctgcagaagtggtacggggacctgcggggaaagcccttcgccatcgaagccgagaacagcatcctggacatcagcggcttcagcaagcagtacaactgtgccttcatctggcagaaggacggcgtgaagaagctgaacctgtacctgatcatcaactacttcaagggcggcaagctgcggttcaagaagatcaaacctgaagccttcgaagccaacagattctacaccgtgatcaacaaaaagagcggcgagatcgtgcccatggaggtgaacttcaacttcgacgaccccaacctgatcatcctgcctctggcctttggcaagagacagggcagagaattcatctggaacgacctgctgtccctggaaaccggcagcctgaagctggccaacggaagagtgatcgagaagacactgtacaacagaagaacccggcaggatgagcctgccctgttcgtggccctgaccttcgagcggcgggaggtcctggactcctccaatatcaaaccaatgaacctgatcggcgtggcaagaggcgaaaacatccccgccgtgatcgccctgaccgaccccgagggctgcccactgagccggtttaaggatagcctgggaaacccaacccacatcctgagaatcggcgagagctataaggagaagcagcggaccatccaggccaagaaggaggtggagcagcggagagccggcggctacagccggaagtacgccagcaaagccaagaatctggcagacgatatggtgagaaacaccgctagagatctgctgtactacgccgtgacccaggatgccatgctgatcttcgccaacctgagccggggcttcggccggcagggcaagcggaccttcatggccgagagacagtacacacggatggaggactggctgaccgccaagctggcctacgagggcctgagcaagacctacctgtccaagacactggcccagtacacctccaagacatgcagcaactgtgggtttaccatcaccagcgccgactacgacagggtgctggagaagctgaagaagacagcaacaggctggatgaccacaattaacggcaaggagctgaaggtggagggccagattacctactacaacagatacaagagacagaacgtagtcaaggacctgtccgtcgagctggatagactgagcgaagaatctgtgaacaacgacatctcctcctggacaaagggcagaagcggagaagctctgagcctcctgaagaaaagattctcccatagacccgtgcaggagaagttcgtgtgcctgaactgcggcttcgagacacacgcagccgagcaagccgccctgaacatcgccagatcctggctgttcctgcggagccaggagtacaagaaataccagacaaacaagacaaccggcaacaccgataagagagccttcgtcgagacctggcagtccttttaccggaagaagcttaaggaggtgtggaaacctgccgtgcggtctggcggatctggcggaggctccatggccggcgaggccgaggcccagctggaccccagcctgcagggcctggtgatgttcgaggacgtgaccgtgtacttcagcagggaggagtggggcctgctgaacgtgacccagaagggcctgtacagggacgtgatgctggagaacttcgccctggtgagcagcctgggcctggcccccagcaggagccccgtgttcacccagctggaggacgacgagcagagctgggtgcccaactgggtgggcggcccaagcagcggcgcccctcctcccagcggcggcagcccagccggctccccaacctctaccgaggagggcacctctgagtccgccacccccgagagcggccctggcacctccaccgagcccagcgagggcagcgcacccggcagccctgccggcagccccacctccacagaggagggaaccagcaccgagcccagcgaaggcagcgccccaggcaccagcaccgagcctagtgagcaggagattaaacggatcaacaagatcagaagaagacttgtgaaagacagcaacaccaagaaggccggcaagacaggccccatgaaaaccctgctggttagagtgatgacacccgatctgagagagcggctggaaaacctgagaaagaagcctgaaaatatcccccagcccatcagcaatacatctagagccaacctgaataagctgctgaccgattacaccgaaatgaagaaggcgatcctgcatgtgtactgggaagagttccagaaggaccctgtgggcctgatgagccgggtggcccagcctgccagcaagaagatcgatcagaacaagctgaaacctgagatggacgagaagggcaacctgaccaccgccggctttgcctgctctcagtgtggccagcccctgttcgtgtacaagctggagcaggtgtctgagaagggcaaggcttacaccaactacttcggacggtgcaatgtggccgagcacgaaaagctgatcctgctggcccagctgaagcccgagaaggatagcgacgaagccgtgacatatagcctgggaaagtttgggcagagggccctggatttctacagcattcatgtgaccaaggagtccacccaccccgtgaagcccctggcccagatcgccggaaacagatacgcctccggacctgtgggaaaggccctgagcgacgcatgtatgggcacaatcgcctccttcctgtctaagtaccaggacatcatcatcgaacaccagaaggtggtgaagggcaaccagaagagactggagagcctgcgggagctggccggcaaggaaaacctggaataccctagcgtgaccctgccacctcagcctcacaccaaggagggcgttgatgcctacaacgaagtgatcgcccgggtgcgaatgtgggtgaacctgaacctgtggcagaagctgaagctaagcagagatgatgccaagcctctgctgagactgaagggattcccttcctttcctctggtcgagagacaggccaacgaagtggactggtgggacatggtgtgtaacgtgaagaagctgatcaacgagaaaaaggaggatggcaaggtgttttggcagaatctggctggctacaagagacaggaagccctgagaccatacctgagcagcgaggaagatcggaagaagggaaagaaattcgctcggtaccagctgggcgacctgctgctgcacctggaaaagaagcacggcgaggactggggaaaggtgtacgacgaggcctgggagcggattgacaagaaagtggaaggcctgagcaagcacatcaagctggaagaggaacggagaagcgaggacgcccagagcaaggccgccctgaccgactggctgcgggctaaggccagcttcgtgatcgagggcctgaaggaggccgacaaggacgagttctgcagatgcgagctgaagctgcagaagtggtacggggacctgcggggaaagcccttcgccatcgaagccgagaacagcatcctggacatcagcggcttcagcaagcagtacaactgtgccttcatctggcagaaggacggcgtgaagaagctgaacctgtacctgatcatcaactacttcaagggcggcaagctgcggttcaagaagatcaaacctgaagccttcgaagccaacagattctacaccgtgatcaacaaaaagagcggcgagatcgtgcccatggaggtgaacttcaacttcgacgaccccaacctgatcatcctgcctctggcctttggcaagagacagggcagagaattcatctggaacgacctgctgtccctggaaaccggcagcctgaagctggccaacggaagagtgatcgagaagacactgtacaacagaagaacccggcaggatgagcctgccctgttcgtggccctgaccttcgagcggcgggaggtcctggactcctccaatatcaaaccaatgaacctgatcggcgtggcaagaggcgaaaacatccccgccgtgatcgccctgaccgaccccgagggctgcccactgagccggtttaaggatagcctgggaaacccaacccacatcctgagaatcggcgagagctataaggagaagcagcggaccatccaggccaagaaggaggtggagcagcggagagccggcggctacagccggaagtacgccagcaaagccaagaatctggcagacgatatggtgagaaacaccgctagagatctgctgtactacgccgtgacccaggatgccatgctgatcttcgccaacctgagccggggcttcggccggcagggcaagcggaccttcatggccgagagacagtacacacggatggaggactggctgaccgccaagctggcctacgagggcctgagcaagacctacctgtccaagacactggcccagtacacctccaagacatgcagcaactgtgggtttaccatcaccagcgccgactacgacagggtgctggagaagctgaagaagacagcaacaggctggatgaccacaattaacggcaaggagctgaaggtggagggccagattacctactacaacagatacaagagacagaacgtagtcaaggacctgtccgtcgagctggatagactgagcgaagaatctgtgaacaacgacatctcctcctggacaaagggcagaagcggagaagctctgagcctcctgaagaaaagattctcccatagacccgtgcaggagaagttcgtgtgcctgaactgcggcttcgagacacacgcagccgagcaagccgccctgaacatcgccagatcctggctgttcctgcggagccaggagtacaagaaataccagacaaacaagacaaccggcaacaccgataagagagccttcgtcgagacctggcagtccttttaccggaagaagcttaaggaggtgtggaaacctgccgtgcggtctggcggatctggcggaggctcctatggccggcgaggccgaggcccagctggaccccagcctgcagggcctggtgatgttcgaggacgtgaccgtgtacttcagcagggaggagtggggcctgctgaacgtgacccagaagggcctgtacagggacgtgatgctggagaacttcgccctggtgagcagcctgggcctggcccccagcaggagccccgtgttcacccagctggaggacgacgagcagagctgggtgcccaactgggtgggatctggctccggcagcggccccaagaaaaagagaaaagtctaagctgccttctgcggggcttgccttctggccatgcccttcttctctcccttgcacctgtacctcttggtctttgaataaagcctgagtaggaaggctagcaaaaaaaaaaaaaaaaaaaaaaaaaaaaaaaaaaaaaaaaaaaaaaaaaaaaaaaaaaaaaaaaaaaaaaaaaaaaaaaa

SEQ ID NO: 15651 - RNA, 9485 nt, synthetic construct
  source 1..9485: mol_type = other RNA
aggaaataagagagaaaagaagagtaagaagaaatataagagccaccatggcccctaagaagaagcgtaaagtgagccggatggaacgcctcgtctacgaggtgcggcagaagtgcagaaacatcgaggacatctgcatctcctgcggatctctgaacgtgaccctggagcacccactgttcatcggcggcatgtgccagaactgtaaaaactgttttctggagtgtgcctatcaatacgacgatgacggctaccagagctactgcaccatctgttgcggcggaagagaggtgctgatgtgtggaaataacaactgctgccggtgcttctgcgtggaatgcgtggacctgctggtgggccccggcgccgcccaggccgctattaaggaagatccttggaactgctacatgtgcggccacaagggcacatacggcctgctgagacggagagaggactggcctagcagactgcagatgttcttcgccaataaccacgaccaggagttcgacccccctaaggtgtaccctcccgtccccgccgagaagagaaagcccatccgggtcctgagcctgttcgatggcatcgccaccggtctgctggtgctgaaggacctgggcatccaggtggataggtacattgcctccgaggtgtgcgaggactccatcaccgtgggaatggtgcgtcatcagggcaagatcatgtacgtgggcgacgtgcggagcgtgacacagaagcatatccaggagtggggccctttcgacctggtgatcggcggcagcccttgcaatgacctgagcatcgtgaacccagcccggaagggcctgtacgagggaaccggcagactgttcttcgagttttacagactgctgcacgacgcccggcctaaggaaggcgacgaccggcccttcttttggctgttcgagaatgtggtggccatgggagtcagcgacaagcgggatattagccggttcctggagagcaaccccgtgatgatcgatgccaaggaagtgagcgccgcccaccgggccagatacttctggggcaatctgcctggcatgaacagacccctggccagcaccgtgaacgacaagctggagctgcaggagtgcctggagcacggccggatcgccaagttcagcaaggtgagaaccatcaccacccgaagcaacagcatcaaacaaggcaaggaccagcactttcctgtgttcatgaacgagaaggaggacatcctgtggtgtaccgagatggagagagtgttcgggttcccagtccactacacagatgtcagcaacatgtctagactggccagacagagactgctgggaagaagctggtccgtccctgtgatcagacacctgttcgcccctctgaaggagtacttcgcctgcgtgagcagcggcaacagcaacgccaacagccggggccccagcttctctagcggcctggtgccactgtccctgagagggagccacatgggccccatggagatctacaaaaccgtgagcgcctggaagcggcagcctgtgcgcgtgctgagcctgtttcggaatatcgataaagtcctgaaaagcctgggattcctggagagcggctctggctccggcggtggcaccctgaagtacgtggaggatgtgacaaacgtggtcagacgggatgtggagaagtggggccccttcgatctggtgtacggcagcacccaacccctgggcagctcttgtgaccggtgccctggctggtacatgtttcagttccaccggatcctgcagtacgccctgccgagacaggagtcccagcggccattcttttggattttcatggacaacttgctgctgaccgaggatgaccaggaaactaccactcggttcctgcagaccgaagccgtgaccctgcaggacgtgagaggccgggactaccagaacgccatgcgggtgtggtccaacatccctggactgaaaagcaagcacgcacctctgacccctaaagaagaggagtacctgcaggcccaggtgcggagcagaagcaagctggacgcccctaaggtggatctgctggtgaagaattgcctcctgcccctgagagagtacttcaagtatttcagccagaatagtctgcccctgggaggcagcggcggcggcgccctggtgacatttgaggacgtcgccgtgcggttcacccaggaggaatgggctctgctggatccttctcagaaaatcctgtaccgggacgtgatgagagagacataccggaatctgacctccgtgggcatcaactgggaatgttgggaccttgaagcctgcttcagaagcctgggaagaaacctgagagtgcaggtggtgaagagaaagtgcgagctgaccaacagcggcccctgcgccgagggcggcccaagcagcggcgcccctcctcccagcggcggcagcccagccggctccccaacctctaccgaggagggcacctctgagtccgccacccccgagagcggccctggcacctccaccgagcccagcgagggcagcgcacccggcagccctgccggcagccccacctccacagaggagggaaccagcaccgagcccagcgaaggcagcgccccaggcaccagcaccgagcctagtgagcaggagattaaacggatcaacaagatcagaagaagacttgtgaaagacagcaacaccaagaaggccggcaagacaggccccatgaaaaccctgctggttagagtgatgacacccgatctgagagagcggctggaaaacctgagaaagaagcctgaaaatatcccccagcccatcagcaatacatctagagccaacctgaataagctgctgaccgattacaccgaaatgaagaaggcgatcctgcatgtgtactgggaagagttccagaaggaccctgtgggcctgatgagccgggtggcccagcctgccagcaagaagatcgatcagaacaagctgaaacctgagatggacgagaagggcaacctgaccaccgccggctttgcctgctctcagtgtggccagcccctgttcgtgtacaagctggagcaggtgtctgagaagggcaaggcttacaccaactacttcggacggtgcaatgtggccgagcacgaaaagctgatcctgctggcccagctgaagcccgagaaggatagcgacgaagccgtgacatatagcctgggaaagtttgggcagagggccctggatttctacagcattcatgtgaccaaggagtccacccaccccgtgaagcccctggcccagatcgccggaaacagatacgcctccggacctgtgggaaaggccctgagcgacgcatgtatgggcacaatcgcctccttcctgtctaagtaccaggacatcatcatcgaacaccagaaggtggtgaagggcaaccagaagagactggagagcctgcgggagctggccggcaaggaaaacctggaataccctagcgtgaccctgccacctcagcctcacaccaaggagggcgttgatgcctacaacgaagtgatcgcccgggtgcgaatgtgggtgaacctgaacctgtggcagaagctgaagctaagcagagatgatgccaagcctctgctgagactgaagggattcccttcctttcctctggtcgagagacaggccaacgaagtggactggtgggacatggtgtgtaacgtgaagaagctgatcaacgagaaaaaggaggatggcaaggtgttttggcagaatctggctggctacaagagacaggaagccctgagaccatacctgagcagcgaggaagatcggaagaagggaaagaaattcgctcggtaccagctgggcgacctgctgctgcacctggaaaagaagcacggcgaggactggggaaaggtgtacgacgaggcctgggagcggattgacaagaaagtggaaggcctgagcaagcacatcaagctggaagaggaacggagaagcgaggacgcccagagcaaggccgccctgaccgactggctgcgggctaaggccagcttcgtgatcgagggcctgaaggaggccgacaaggacgagttctgcagatgcgagctgaagctgcagaagtggtacggggacctgcggggaaagcccttcgccatcgaagccgagaacagcatcctggacatcagcggcttcagcaagcagtacaactgtgccttcatctggcagaaggacggcgtgaagaagctgaacctgtacctgatcatcaactacttcaagggcggcaagctgcggttcaagaagatcaaacctgaagccttcgaagccaacagattctacaccgtgatcaacaaaaagagcggcgagatcgtgcccatggaggtgaacttcaacttcgacgaccccaacctgatcatcctgcctctggcctttggcaagagacagggcagagaattcatctggaacgacctgctgtccctggaaaccggcagcctgaagctggccaacggaagagtgatcgagaagacactgtacaacagaagaacccggcaggatgagcctgccctgttcgtggccctgaccttcgagcggcgggaggtcctggactcctccaatatcaaaccaatgaacctgatcggcgtggcaagaggcgaaaacatccccgccgtgatcgccctgaccgaccccgagggctgcccactgagccggtttaaggatagcctgggaaacccaacccacatcctgagaatcggcgagagctataaggagaagcagcggaccatccaggccaagaaggaggtggagcagcggagagccggcggctacagccggaagtacgccagcaaagccaagaatctggcagacgatatggtgagaaacaccgctagagatctgctgtactacgccgtgacccaggatgccatgctgatcttcgccaacctgagccggggcttcggccggcagggcaagcggaccttcatggccgagagacagtacacacggatggaggactggctgaccgccaagctggcctacgagggcctgagcaagacctacctgtccaagacactggcccagtacacctccaagacatgcagcaactgtgggtttaccatcaccagcgccgactacgacagggtgctggagaagctgaagaagacagcaacaggctggatgaccacaattaacggcaaggagctgaaggtggagggccagattacctactacaacagatacaagagacagaacgtagtcaaggacctgtccgtcgagctggatagactgagcgaagaatctgtgaacaacgacatctcctcctggacaaagggcagaagcggagaagctctgagcctcctgaagaaaagattctcccatagacccgtgcaggagaagttcgtgtgcctgaactgcggcttcgagacacacgcagccgagcaagccgccctgaacatcgccagatcctggctgttcctgcggagccaggagtacaagaaataccagacaaacaagacaaccggcaacaccgataagagagccttcgtcgagacctggcagtccttttaccggaagaagcttaaggaggtgtggaaacctgccgtgcggtctggcggatctggcggaggctcccaggagcccgtgaccttcgaggacgtggccgtgtacttcacccagaaccagtgggccaagctggaccccacccagagggccctgtacagggaggtgatgctggagaactacgccaacgtggccagcctgggcgtggccttccccttccccaagcccgacctggtgagccagctggagaggggcgaggtgccctggggccccgacccctgggaggccgaggtgctgaggggcatctgccccggcggcggcccaagcagcggcgcccctcctcccagcggcggcagcccagccggctccccaacctctaccgaggagggcacctctgagtccgccacccccgagagcggccctggcacctccaccgagcccagcgagggcagcgcacccggcagccctgccggcagccccacctccacagaggagggaaccagcaccgagcccagcgaaggcagcgccccaggcaccagcaccgagcctagtgagcaggagattaaacggatcaacaagatcagaagaagacttgtgaaagacagcaacaccaagaaggccggcaagacaggccccatgaaaaccctgctggttagagtgatgacacccgatctgagagagcggctggaaaacctgagaaagaagcctgaaaatatcccccagcccatcagcaatacatctagagccaacctgaataagctgctgaccgattacaccgaaatgaagaaggcgatcctgcatgtgtactgggaagagttccagaaggaccctgtgggcctgatgagccgggtggcccagcctgccagcaagaagatcgatcagaacaagctgaaacctgagatggacgagaagggcaacctgaccaccgccggctttgcctgctctcagtgtggccagcccctgttcgtgtacaagctggagcaggtgtctgagaagggcaaggcttacaccaactacttcggacggtgcaatgtggccgagcacgaaaagctgatcctgctggcccagctgaagcccgagaaggatagcgacgaagccgtgacatatagcctgggaaagtttgggcagagggccctggatttctacagcattcatgtgaccaaggagtccacccaccccgtgaagcccctggcccagatcgccggaaacagatacgcctccggacctgtgggaaaggccctgagcgacgcatgtatgggcacaatcgcctccttcctgtctaagtaccaggacatcatcatcgaacaccagaaggtggtgaagggcaaccagaagagactggagagcctgcgggagctggccggcaaggaaaacctggaataccctagcgtgaccctgccacctcagcctcacaccaaggagggcgttgatgcctacaacgaagtgatcgcccgggtgcgaatgtgggtgaacctgaacctgtggcagaagctgaagctaagcagagatgatgccaagcctctgctgagactgaagggattcccttcctttcctctggtcgagagacaggccaacgaagtggactggtgggacatggtgtgtaacgtgaagaagctgatcaacgagaaaaaggaggatggcaaggtgttttggcagaatctggctggctacaagagacaggaagccctgagaccatacctgagcagcgaggaagatcggaagaagggaaagaaattcgctcggtaccagctgggcgacctgctgctgcacctggaaaagaagcacggcgaggactggggaaaggtgtacgacgaggcctgggagcggattgacaagaaagtggaaggcctgagcaagcacatcaagctggaagaggaacggagaagcgaggacgcccagagcaaggccgccctgaccgactggctgcgggctaaggccagcttcgtgatcgagggcctgaaggaggccgacaaggacgagttctgcagatgcgagctgaagctgcagaagtggtacggggacctgcggggaaagcccttcgccatcgaagccgagaacagcatcctggacatcagcggcttcagcaagcagtacaactgtgccttcatctggcagaaggacggcgtgaagaagctgaacctgtacctgatcatcaactacttcaagggcggcaagctgcggttcaagaagatcaaacctgaagccttcgaagccaacagattctacaccgtgatcaacaaaaagagcggcgagatcgtgcccatggaggtgaacttcaacttcgacgaccccaacctgatcatcctgcctctggcctttggcaagagacagggcagagaattcatctggaacgacctgctgtccctggaaaccggcagcctgaagctggccaacggaagagtgatcgagaagacactgtacaacagaagaacccggcaggatgagcctgccctgttcgtggccctgaccttcgagcggcgggaggtcctggactcctccaatatcaaaccaatgaacctgatcggcgtggcaagaggcgaaaacatccccgccgtgatcgccctgaccgaccccgagggctgcccactgagccggtttaaggatagcctgggaaacccaacccacatcctgagaatcggcgagagctataaggagaagcagcggaccatccaggccaagaaggaggtggagcagcggagagccggcggctacagccggaagtacgccagcaaagccaagaatctggcagacgatatggtgagaaacaccgctagagatctgctgtactacgccgtgacccaggatgccatgctgatcttcgccaacctgagccggggcttcggccggcagggcaagcggaccttcatggccgagagacagtacacacggatggaggactggctgaccgccaagctggcctacgagggcctgagcaagacctacctgtccaagacactggcccagtacacctccaagacatgcagcaactgtgggtttaccatcaccagcgccgactacgacagggtgctggagaagctgaagaagacagcaacaggctggatgaccacaattaacggcaaggagctgaaggtggagggccagattacctactacaacagatacaagagacagaacgtagtcaaggacctgtccgtcgagctggatagactgagcgaagaatctgtgaacaacgacatctcctcctggacaaagggcagaagcggagaagctctgagcctcctgaagaaaagattctcccatagacccgtgcaggagaagttcgtgtgcctgaactgcggcttcgagacacacgcagccgagcaagccgccctgaacatcgccagatcctggctgttcctgcggagccaggagtacaagaaataccagacaaacaagacaaccggcaacaccgataagagagccttcgtcgagacctggcagtccttttaccggaagaagcttaaggaggtgtggaaacctgccgtgcggtctggcggatctggcggaggctcctcaggagcccgtgaccttcgaggacgtggccgtgtacttcacccagaaccagtgggccaagctggaccccacccagagggccctgtacagggaggtgatgctggagaactacgccaacgtggccagcctgggcgtggccttccccttccccaagcccgacctggtgagccagctggagaggggcgaggtgccctggggccccgacccctgggaggccgaggtgctgaggggcatctgccccggcggatctggctccggcagcggccccaagaaaaagagaaaagtctaagctgccttctgcggggcttgccttctggccatgcccttcttctctcccttgcacctgtacctcttggtctttgaataaagcctgagtaggaaggctagcaaaaaaaaaaaaaaaaaaaaaaaaaaaaaaaaaaaaaaaaaaaaaaaaaaaaaaaaaaaaaaaaaaaaaaaaaaaaaaaa

SEQ ID NO: 15652 - RNA, 9485 nt, synthetic construct
  source 1..9485: mol_type = other RNA
aggaaataagagagaaaagaagagtaagaagaaatataagagccaccatggcccctaagaagaagcgtaaagtgagccggatggaacgcctcgtctacgaggtgcggcagaagtgcagaaacatcgaggacatctgcatctcctgcggatctctgaacgtgaccctggagcacccactgttcatcggcggcatgtgccagaactgtaaaaactgttttctggagtgtgcctatcaatacgacgatgacggctaccagagctactgcaccatctgttgcggcggaagagaggtgctgatgtgtggaaataacaactgctgccggtgcttctgcgtggaatgcgtggacctgctggtgggccccggcgccgcccaggccgctattaaggaagatccttggaactgctacatgtgcggccacaagggcacatacggcctgctgagacggagagaggactggcctagcagactgcagatgttcttcgccaataaccacgaccaggagttcgacccccctaaggtgtaccctcccgtccccgccgagaagagaaagcccatccgggtcctgagcctgttcgatggcatcgccaccggtctgctggtgctgaaggacctgggcatccaggtggataggtacattgcctccgaggtgtgcgaggactccatcaccgtgggaatggtgcgtcatcagggcaagatcatgtacgtgggcgacgtgcggagcgtgacacagaagcatatccaggagtggggccctttcgacctggtgatcggcggcagcccttgcaatgacctgagcatcgtgaacccagcccggaagggcctgtacgagggaaccggcagactgttcttcgagttttacagactgctgcacgacgcccggcctaaggaaggcgacgaccggcccttcttttggctgttcgagaatgtggtggccatgggagtcagcgacaagcgggatattagccggttcctggagagcaaccccgtgatgatcgatgccaaggaagtgagcgccgcccaccgggccagatacttctggggcaatctgcctggcatgaacagacccctggccagcaccgtgaacgacaagctggagctgcaggagtgcctggagcacggccggatcgccaagttcagcaaggtgagaaccatcaccacccgaagcaacagcatcaaacaaggcaaggaccagcactttcctgtgttcatgaacgagaaggaggacatcctgtggtgtaccgagatggagagagtgttcgggttcccagtccactacacagatgtcagcaacatgtctagactggccagacagagactgctgggaagaagctggtccgtccctgtgatcagacacctgttcgcccctctgaaggagtacttcgcctgcgtgagcagcggcaacagcaacgccaacagccggggccccagcttctctagcggcctggtgccactgtccctgagagggagccacatgggccccatggagatctacaaaaccgtgagcgcctggaagcggcagcctgtgcgcgtgctgagcctgtttcggaatatcgataaagtcctgaaaagcctgggattcctggagagcggctctggctccggcggtggcaccctgaagtacgtggaggatgtgacaaacgtggtcagacgggatgtggagaagtggggccccttcgatctggtgtacggcagcacccaacccctgggcagctcttgtgaccggtgccctggctggtacatgtttcagttccaccggatcctgcagtacgccctgccgagacaggagtcccagcggccattcttttggattttcatggacaacttgctgctgaccgaggatgaccaggaaactaccactcggttcctgcagaccgaagccgtgaccctgcaggacgtgagaggccgggactaccagaacgccatgcgggtgtggtccaacatccctggactgaaaagcaagcacgcacctctgacccctaaagaagaggagtacctgcaggcccaggtgcggagcagaagcaagctggacgcccctaaggtggatctgctggtgaagaattgcctcctgcccctgagagagtacttcaagtatttcagccagaatagtctgcccctgggaggcagcggcggcggcgccctggtgacatttgaggacgtcgccgtgcggttcacccaggaggaatgggctctgctggatccttctcagaaaatcctgtaccgggacgtgatgagagagacataccggaatctgacctccgtgggcatcaactgggaatgttgggaccttgaagcctgcttcagaagcctgggaagaaacctgagagtgcaggtggtgaagagaaagtgcgagctgaccaacagcggcccctgcgccgagggcggcccaagcagcggcgcccctcctcccagcggcggcagcccagccggctccccaacctctaccgaggagggcacctctgagtccgccacccccgagagcggccctggcacctccaccgagcccagcgagggcagcgcacccggcagccctgccggcagccccacctccacagaggagggaaccagcaccgagcccagcgaaggcagcgccccaggcaccagcaccgagcctagtgagcaggagattaaacggatcaacaagatcagaagaagacttgtgaaagacagcaacaccaagaaggccggcaagacaggccccatgaaaaccctgctggttagagtgatgacacccgatctgagagagcggctggaaaacctgagaaagaagcctgaaaatatcccccagcccatcagcaatacatctagagccaacctgaataagctgctgaccgattacaccgaaatgaagaaggcgatcctgcatgtgtactgggaagagttccagaaggaccctgtgggcctgatgagccgggtggcccagcctgccagcaagaagatcgatcagaacaagctgaaacctgagatggacgagaagggcaacctgaccaccgccggctttgcctgctctcagtgtggccagcccctgttcgtgtacaagctggagcaggtgtctgagaagggcaaggcttacaccaactacttcggacggtgcaatgtggccgagcacgaaaagctgatcctgctggcccagctgaagcccgagaaggatagcgacgaagccgtgacatatagcctgggaaagtttgggcagagggccctggatttctacagcattcatgtgaccaaggagtccacccaccccgtgaagcccctggcccagatcgccggaaacagatacgcctccggacctgtgggaaaggccctgagcgacgcatgtatgggcacaatcgcctccttcctgtctaagtaccaggacatcatcatcgaacaccagaaggtggtgaagggcaaccagaagagactggagagcctgcgggagctggccggcaaggaaaacctggaataccctagcgtgaccctgccacctcagcctcacaccaaggagggcgttgatgcctacaacgaagtgatcgcccgggtgcgaatgtgggtgaacctgaacctgtggcagaagctgaagctaagcagagatgatgccaagcctctgctgagactgaagggattcccttcctttcctctggtcgagagacaggccaacgaagtggactggtgggacatggtgtgtaacgtgaagaagctgatcaacgagaaaaaggaggatggcaaggtgttttggcagaatctggctggctacaagagacaggaagccctgagaccatacctgagcagcgaggaagatcggaagaagggaaagaaattcgctcggtaccagctgggcgacctgctgctgcacctggaaaagaagcacggcgaggactggggaaaggtgtacgacgaggcctgggagcggattgacaagaaagtggaaggcctgagcaagcacatcaagctggaagaggaacggagaagcgaggacgcccagagcaaggccgccctgaccgactggctgcgggctaaggccagcttcgtgatcgagggcctgaaggaggccgacaaggacgagttctgcagatgcgagctgaagctgcagaagtggtacggggacctgcggggaaagcccttcgccatcgaagccgagaacagcatcctggacatcagcggcttcagcaagcagtacaactgtgccttcatctggcagaaggacggcgtgaagaagctgaacctgtacctgatcatcaactacttcaagggcggcaagctgcggttcaagaagatcaaacctgaagccttcgaagccaacagattctacaccgtgatcaacaaaaagagcggcgagatcgtgcccatggaggtgaacttcaacttcgacgaccccaacctgatcatcctgcctctggcctttggcaagagacagggcagagaattcatctggaacgacctgctgtccctggaaaccggcagcctgaagctggccaacggaagagtgatcgagaagacactgtacaacagaagaacccggcaggatgagcctgccctgttcgtggccctgaccttcgagcggcgggaggtcctggactcctccaatatcaaaccaatgaacctgatcggcgtggcaagaggcgaaaacatccccgccgtgatcgccctgaccgaccccgagggctgcccactgagccggtttaaggatagcctgggaaacccaacccacatcctgagaatcggcgagagctataaggagaagcagcggaccatccaggccaagaaggaggtggagcagcggagagccggcggctacagccggaagtacgccagcaaagccaagaatctggcagacgatatggtgagaaacaccgctagagatctgctgtactacgccgtgacccaggatgccatgctgatcttcgccaacctgagccggggcttcggccggcagggcaagcggaccttcatggccgagagacagtacacacggatggaggactggctgaccgccaagctggcctacgagggcctgagcaagacctacctgtccaagacactggcccagtacacctccaagacatgcagcaactgtgggtttaccatcaccagcgccgactacgacagggtgctggagaagctgaagaagacagcaacaggctggatgaccacaattaacggcaaggagctgaaggtggagggccagattacctactacaacagatacaagagacagaacgtagtcaaggacctgtccgtcgagctggatagactgagcgaagaatctgtgaacaacgacatctcctcctggacaaagggcagaagcggagaagctctgagcctcctgaagaaaagattctcccatagacccgtgcaggagaagttcgtgtgcctgaactgcggcttcgagacacacgcagccgagcaagccgccctgaacatcgccagatcctggctgttcctgcggagccaggagtacaagaaataccagacaaacaagacaaccggcaacaccgataagagagccttcgtcgagacctggcagtccttttaccggaagaagcttaaggaggtgtggaaacctgccgtgcggtctggcggatctggcggaggctccatgaccaagttccaggaggccgtgaccttcaaggacgtggccgtggccttcaccgaggaggagctgggcctgctggacagcgcccagaggaagctgtacagggacgtgatgctggagaacttcaggaacctggtgagcgtgggccaccagagcttcaagcccgacgtgatcagccagctggagagggaggagaagctgtggatgaaggagctgcagacccagaggggcaagcacagcgagaccggcggcccaagcagcggcgcccctcctcccagcggcggcagcccagccggctccccaacctctaccgaggagggcacctctgagtccgccacccccgagagcggccctggcacctccaccgagcccagcgagggcagcgcacccggcagccctgccggcagccccacctccacagaggagggaaccagcaccgagcccagcgaaggcagcgccccaggcaccagcaccgagcctagtgagcaggagattaaacggatcaacaagatcagaagaagacttgtgaaagacagcaacaccaagaaggccggcaagacaggccccatgaaaaccctgctggttagagtgatgacacccgatctgagagagcggctggaaaacctgagaaagaagcctgaaaatatcccccagcccatcagcaatacatctagagccaacctgaataagctgctgaccgattacaccgaaatgaagaaggcgatcctgcatgtgtactgggaagagttccagaaggaccctgtgggcctgatgagccgggtggcccagcctgccagcaagaagatcgatcagaacaagctgaaacctgagatggacgagaagggcaacctgaccaccgccggctttgcctgctctcagtgtggccagcccctgttcgtgtacaagctggagcaggtgtctgagaagggcaaggcttacaccaactacttcggacggtgcaatgtggccgagcacgaaaagctgatcctgctggcccagctgaagcccgagaaggatagcgacgaagccgtgacatatagcctgggaaagtttgggcagagggccctggatttctacagcattcatgtgaccaaggagtccacccaccccgtgaagcccctggcccagatcgccggaaacagatacgcctccggacctgtgggaaaggccctgagcgacgcatgtatgggcacaatcgcctccttcctgtctaagtaccaggacatcatcatcgaacaccagaaggtggtgaagggcaaccagaagagactggagagcctgcgggagctggccggcaaggaaaacctggaataccctagcgtgaccctgccacctcagcctcacaccaaggagggcgttgatgcctacaacgaagtgatcgcccgggtgcgaatgtgggtgaacctgaacctgtggcagaagctgaagctaagcagagatgatgccaagcctctgctgagactgaagggattcccttcctttcctctggtcgagagacaggccaacgaagtggactggtgggacatggtgtgtaacgtgaagaagctgatcaacgagaaaaaggaggatggcaaggtgttttggcagaatctggctggctacaagagacaggaagccctgagaccatacctgagcagcgaggaagatcggaagaagggaaagaaattcgctcggtaccagctgggcgacctgctgctgcacctggaaaagaagcacggcgaggactggggaaaggtgtacgacgaggcctgggagcggattgacaagaaagtggaaggcctgagcaagcacatcaagctggaagaggaacggagaagcgaggacgcccagagcaaggccgccctgaccgactggctgcgggctaaggccagcttcgtgatcgagggcctgaaggaggccgacaaggacgagttctgcagatgcgagctgaagctgcagaagtggtacggggacctgcggggaaagcccttcgccatcgaagccgagaacagcatcctggacatcagcggcttcagcaagcagtacaactgtgccttcatctggcagaaggacggcgtgaagaagctgaacctgtacctgatcatcaactacttcaagggcggcaagctgcggttcaagaagatcaaacctgaagccttcgaagccaacagattctacaccgtgatcaacaaaaagagcggcgagatcgtgcccatggaggtgaacttcaacttcgacgaccccaacctgatcatcctgcctctggcctttggcaagagacagggcagagaattcatctggaacgacctgctgtccctggaaaccggcagcctgaagctggccaacggaagagtgatcgagaagacactgtacaacagaagaacccggcaggatgagcctgccctgttcgtggccctgaccttcgagcggcgggaggtcctggactcctccaatatcaaaccaatgaacctgatcggcgtggcaagaggcgaaaacatccccgccgtgatcgccctgaccgaccccgagggctgcccactgagccggtttaaggatagcctgggaaacccaacccacatcctgagaatcggcgagagctataaggagaagcagcggaccatccaggccaagaaggaggtggagcagcggagagccggcggctacagccggaagtacgccagcaaagccaagaatctggcagacgatatggtgagaaacaccgctagagatctgctgtactacgccgtgacccaggatgccatgctgatcttcgccaacctgagccggggcttcggccggcagggcaagcggaccttcatggccgagagacagtacacacggatggaggactggctgaccgccaagctggcctacgagggcctgagcaagacctacctgtccaagacactggcccagtacacctccaagacatgcagcaactgtgggtttaccatcaccagcgccgactacgacagggtgctggagaagctgaagaagacagcaacaggctggatgaccacaattaacggcaaggagctgaaggtggagggccagattacctactacaacagatacaagagacagaacgtagtcaaggacctgtccgtcgagctggatagactgagcgaagaatctgtgaacaacgacatctcctcctggacaaagggcagaagcggagaagctctgagcctcctgaagaaaagattctcccatagacccgtgcaggagaagttcgtgtgcctgaactgcggcttcgagacacacgcagccgagcaagccgccctgaacatcgccagatcctggctgttcctgcggagccaggagtacaagaaataccagacaaacaagacaaccggcaacaccgataagagagccttcgtcgagacctggcagtccttttaccggaagaagcttaaggaggtgtggaaacctgccgtgcggtctggcggatctggcggaggctcctatgaccaagttccaggaggccgtgaccttcaaggacgtggccgtggccttcaccgaggaggagctgggcctgctggacagcgcccagaggaagctgtacagggacgtgatgctggagaacttcaggaacctggtgagcgtgggccaccagagcttcaagcccgacgtgatcagccagctggagagggaggagaagctgtggatgaaggagctgcagacccagaggggcaagcacagcgagaccggatctggctccggcagcggccccaagaaaaagagaaaagtctaagctgccttctgcggggcttgccttctggccatgcccttcttctctcccttgcacctgtacctcttggtctttgaataaagcctgagtaggaaggctagcaaaaaaaaaaaaaaaaaaaaaaaaaaaaaaaaaaaaaaaaaaaaaaaaaaaaaaaaaaaaaaaaaaaaaaaaaaaaaaaa

SEQ ID NO: 15653 - RNA, 9485 nt, synthetic construct
  source 1..9485: mol_type = other RNA
aggaaataagagagaaaagaagagtaagaagaaatataagagccaccatggcccctaagaagaagcgtaaagtgagccggatggaacgcctcgtctacgaggtgcggcagaagtgcagaaacatcgaggacatctgcatctcctgcggatctctgaacgtgaccctggagcacccactgttcatcggcggcatgtgccagaactgtaaaaactgttttctggagtgtgcctatcaatacgacgatgacggctaccagagctactgcaccatctgttgcggcggaagagaggtgctgatgtgtggaaataacaactgctgccggtgcttctgcgtggaatgcgtggacctgctggtgggccccggcgccgcccaggccgctattaaggaagatccttggaactgctacatgtgcggccacaagggcacatacggcctgctgagacggagagaggactggcctagcagactgcagatgttcttcgccaataaccacgaccaggagttcgacccccctaaggtgtaccctcccgtccccgccgagaagagaaagcccatccgggtcctgagcctgttcgatggcatcgccaccggtctgctggtgctgaaggacctgggcatccaggtggataggtacattgcctccgaggtgtgcgaggactccatcaccgtgggaatggtgcgtcatcagggcaagatcatgtacgtgggcgacgtgcggagcgtgacacagaagcatatccaggagtggggccctttcgacctggtgatcggcggcagcccttgcaatgacctgagcatcgtgaacccagcccggaagggcctgtacgagggaaccggcagactgttcttcgagttttacagactgctgcacgacgcccggcctaaggaaggcgacgaccggcccttcttttggctgttcgagaatgtggtggccatgggagtcagcgacaagcgggatattagccggttcctggagagcaaccccgtgatgatcgatgccaaggaagtgagcgccgcccaccgggccagatacttctggggcaatctgcctggcatgaacagacccctggccagcaccgtgaacgacaagctggagctgcaggagtgcctggagcacggccggatcgccaagttcagcaaggtgagaaccatcaccacccgaagcaacagcatcaaacaaggcaaggaccagcactttcctgtgttcatgaacgagaaggaggacatcctgtggtgtaccgagatggagagagtgttcgggttcccagtccactacacagatgtcagcaacatgtctagactggccagacagagactgctgggaagaagctggtccgtccctgtgatcagacacctgttcgcccctctgaaggagtacttcgcctgcgtgagcagcggcaacagcaacgccaacagccggggccccagcttctctagcggcctggtgccactgtccctgagagggagccacatgggccccatggagatctacaaaaccgtgagcgcctggaagcggcagcctgtgcgcgtgctgagcctgtttcggaatatcgataaagtcctgaaaagcctgggattcctggagagcggctctggctccggcggtggcaccctgaagtacgtggaggatgtgacaaacgtggtcagacgggatgtggagaagtggggccccttcgatctggtgtacggcagcacccaacccctgggcagctcttgtgaccggtgccctggctggtacatgtttcagttccaccggatcctgcagtacgccctgccgagacaggagtcccagcggccattcttttggattttcatggacaacttgctgctgaccgaggatgaccaggaaactaccactcggttcctgcagaccgaagccgtgaccctgcaggacgtgagaggccgggactaccagaacgccatgcgggtgtggtccaacatccctggactgaaaagcaagcacgcacctctgacccctaaagaagaggagtacctgcaggcccaggtgcggagcagaagcaagctggacgcccctaaggtggatctgctggtgaagaattgcctcctgcccctgagagagtacttcaagtatttcagccagaatagtctgcccctgggaggcagcggcggcggcgccctggtgacatttgaggacgtcgccgtgcggttcacccaggaggaatgggctctgctggatccttctcagaaaatcctgtaccgggacgtgatgagagagacataccggaatctgacctccgtgggcatcaactgggaatgttgggaccttgaagcctgcttcagaagcctgggaagaaacctgagagtgcaggtggtgaagagaaagtgcgagctgaccaacagcggcccctgcgccgagggcggcccaagcagcggcgcccctcctcccagcggcggcagcccagccggctccccaacctctaccgaggagggcacctctgagtccgccacccccgagagcggccctggcacctccaccgagcccagcgagggcagcgcacccggcagccctgccggcagccccacctccacagaggagggaaccagcaccgagcccagcgaaggcagcgccccaggcaccagcaccgagcctagtgagcaggagattaaacggatcaacaagatcagaagaagacttgtgaaagacagcaacaccaagaaggccggcaagacaggccccatgaaaaccctgctggttagagtgatgacacccgatctgagagagcggctggaaaacctgagaaagaagcctgaaaatatcccccagcccatcagcaatacatctagagccaacctgaataagctgctgaccgattacaccgaaatgaagaaggcgatcctgcatgtgtactgggaagagttccagaaggaccctgtgggcctgatgagccgggtggcccagcctgccagcaagaagatcgatcagaacaagctgaaacctgagatggacgagaagggcaacctgaccaccgccggctttgcctgctctcagtgtggccagcccctgttcgtgtacaagctggagcaggtgtctgagaagggcaaggcttacaccaactacttcggacggtgcaatgtggccgagcacgaaaagctgatcctgctggcccagctgaagcccgagaaggatagcgacgaagccgtgacatatagcctgggaaagtttgggcagagggccctggatttctacagcattcatgtgaccaaggagtccacccaccccgtgaagcccctggcccagatcgccggaaacagatacgcctccggacctgtgggaaaggccctgagcgacgcatgtatgggcacaatcgcctccttcctgtctaagtaccaggacatcatcatcgaacaccagaaggtggtgaagggcaaccagaagagactggagagcctgcgggagctggccggcaaggaaaacctggaataccctagcgtgaccctgccacctcagcctcacaccaaggagggcgttgatgcctacaacgaagtgatcgcccgggtgcgaatgtgggtgaacctgaacctgtggcagaagctgaagctaagcagagatgatgccaagcctctgctgagactgaagggattcccttcctttcctctggtcgagagacaggccaacgaagtggactggtgggacatggtgtgtaacgtgaagaagctgatcaacgagaaaaaggaggatggcaaggtgttttggcagaatctggctggctacaagagacaggaagccctgagaccatacctgagcagcgaggaagatcggaagaagggaaagaaattcgctcggtaccagctgggcgacctgctgctgcacctggaaaagaagcacggcgaggactggggaaaggtgtacgacgaggcctgggagcggattgacaagaaagtggaaggcctgagcaagcacatcaagctggaagaggaacggagaagcgaggacgcccagagcaaggccgccctgaccgactggctgcgggctaaggccagcttcgtgatcgagggcctgaaggaggccgacaaggacgagttctgcagatgcgagctgaagctgcagaagtggtacggggacctgcggggaaagcccttcgccatcgaagccgagaacagcatcctggacatcagcggcttcagcaagcagtacaactgtgccttcatctggcagaaggacggcgtgaagaagctgaacctgtacctgatcatcaactacttcaagggcggcaagctgcggttcaagaagatcaaacctgaagccttcgaagccaacagattctacaccgtgatcaacaaaaagagcggcgagatcgtgcccatggaggtgaacttcaacttcgacgaccccaacctgatcatcctgcctctggcctttggcaagagacagggcagagaattcatctggaacgacctgctgtccctggaaaccggcagcctgaagctggccaacggaagagtgatcgagaagacactgtacaacagaagaacccggcaggatgagcctgccctgttcgtggccctgaccttcgagcggcgggaggtcctggactcctccaatatcaaaccaatgaacctgatcggcgtggcaagaggcgaaaacatccccgccgtgatcgccctgaccgaccccgagggctgcccactgagccggtttaaggatagcctgggaaacccaacccacatcctgagaatcggcgagagctataaggagaagcagcggaccatccaggccaagaaggaggtggagcagcggagagccggcggctacagccggaagtacgccagcaaagccaagaatctggcagacgatatggtgagaaacaccgctagagatctgctgtactacgccgtgacccaggatgccatgctgatcttcgccaacctgagccggggcttcggccggcagggcaagcggaccttcatggccgagagacagtacacacggatggaggactggctgaccgccaagctggcctacgagggcctgagcaagacctacctgtccaagacactggcccagtacacctccaagacatgcagcaactgtgggtttaccatcaccagcgccgactacgacagggtgctggagaagctgaagaagacagcaacaggctggatgaccacaattaacggcaaggagctgaaggtggagggccagattacctactacaacagatacaagagacagaacgtagtcaaggacctgtccgtcgagctggatagactgagcgaagaatctgtgaacaacgacatctcctcctggacaaagggcagaagcggagaagctctgagcctcctgaagaaaagattctcccatagacccgtgcaggagaagttcgtgtgcctgaactgcggcttcgagacacacgcagccgagcaagccgccctgaacatcgccagatcctggctgttcctgcggagccaggagtacaagaaataccagacaaacaagacaaccggcaacaccgataagagagccttcgtcgagacctggcagtccttttaccggaagaagcttaaggaggtgtggaaacctgccgtgcggtctggcggatctggcggaggctccatgaacgccgtgacctacgaggacgtgcacgtgaacttcacccaggaggagtgggccctgctggaccccagccagaagaagctgtacaaggacgtgatgctggagacctacaggaacctgaacgccatcggcttcaactgggacagcaagatcttcaagaacatcgtgcaggtgctggaggacaccgagggcatgaaggaggtgagggtgcagaggaagaggctgaacatcctgaacgtgatcggcggcccaagcagcggcgcccctcctcccagcggcggcagcccagccggctccccaacctctaccgaggagggcacctctgagtccgccacccccgagagcggccctggcacctccaccgagcccagcgagggcagcgcacccggcagccctgccggcagccccacctccacagaggagggaaccagcaccgagcccagcgaaggcagcgccccaggcaccagcaccgagcctagtgagcaggagattaaacggatcaacaagatcagaagaagacttgtgaaagacagcaacaccaagaaggccggcaagacaggccccatgaaaaccctgctggttagagtgatgacacccgatctgagagagcggctggaaaacctgagaaagaagcctgaaaatatcccccagcccatcagcaatacatctagagccaacctgaataagctgctgaccgattacaccgaaatgaagaaggcgatcctgcatgtgtactgggaagagttccagaaggaccctgtgggcctgatgagccgggtggcccagcctgccagcaagaagatcgatcagaacaagctgaaacctgagatggacgagaagggcaacctgaccaccgccggctttgcctgctctcagtgtggccagcccctgttcgtgtacaagctggagcaggtgtctgagaagggcaaggcttacaccaactacttcggacggtgcaatgtggccgagcacgaaaagctgatcctgctggcccagctgaagcccgagaaggatagcgacgaagccgtgacatatagcctgggaaagtttgggcagagggccctggatttctacagcattcatgtgaccaaggagtccacccaccccgtgaagcccctggcccagatcgccggaaacagatacgcctccggacctgtgggaaaggccctgagcgacgcatgtatgggcacaatcgcctccttcctgtctaagtaccaggacatcatcatcgaacaccagaaggtggtgaagggcaaccagaagagactggagagcctgcgggagctggccggcaaggaaaacctggaataccctagcgtgaccctgccacctcagcctcacaccaaggagggcgttgatgcctacaacgaagtgatcgcccgggtgcgaatgtgggtgaacctgaacctgtggcagaagctgaagctaagcagagatgatgccaagcctctgctgagactgaagggattcccttcctttcctctggtcgagagacaggccaacgaagtggactggtgggacatggtgtgtaacgtgaagaagctgatcaacgagaaaaaggaggatggcaaggtgttttggcagaatctggctggctacaagagacaggaagccctgagaccatacctgagcagcgaggaagatcggaagaagggaaagaaattcgctcggtaccagctgggcgacctgctgctgcacctggaaaagaagcacggcgaggactggggaaaggtgtacgacgaggcctgggagcggattgacaagaaagtggaaggcctgagcaagcacatcaagctggaagaggaacggagaagcgaggacgcccagagcaaggccgccctgaccgactggctgcgggctaaggccagcttcgtgatcgagggcctgaaggaggccgacaaggacgagttctgcagatgcgagctgaagctgcagaagtggtacggggacctgcggggaaagcccttcgccatcgaagccgagaacagcatcctggacatcagcggcttcagcaagcagtacaactgtgccttcatctggcagaaggacggcgtgaagaagctgaacctgtacctgatcatcaactacttcaagggcggcaagctgcggttcaagaagatcaaacctgaagccttcgaagccaacagattctacaccgtgatcaacaaaaagagcggcgagatcgtgcccatggaggtgaacttcaacttcgacgaccccaacctgatcatcctgcctctggcctttggcaagagacagggcagagaattcatctggaacgacctgctgtccctggaaaccggcagcctgaagctggccaacggaagagtgatcgagaagacactgtacaacagaagaacccggcaggatgagcctgccctgttcgtggccctgaccttcgagcggcgggaggtcctggactcctccaatatcaaaccaatgaacctgatcggcgtggcaagaggcgaaaacatccccgccgtgatcgccctgaccgaccccgagggctgcccactgagccggtttaaggatagcctgggaaacccaacccacatcctgagaatcggcgagagctataaggagaagcagcggaccatccaggccaagaaggaggtggagcagcggagagccggcggctacagccggaagtacgccagcaaagccaagaatctggcagacgatatggtgagaaacaccgctagagatctgctgtactacgccgtgacccaggatgccatgctgatcttcgccaacctgagccggggcttcggccggcagggcaagcggaccttcatggccgagagacagtacacacggatggaggactggctgaccgccaagctggcctacgagggcctgagcaagacctacctgtccaagacactggcccagtacacctccaagacatgcagcaactgtgggtttaccatcaccagcgccgactacgacagggtgctggagaagctgaagaagacagcaacaggctggatgaccacaattaacggcaaggagctgaaggtggagggccagattacctactacaacagatacaagagacagaacgtagtcaaggacctgtccgtcgagctggatagactgagcgaagaatctgtgaacaacgacatctcctcctggacaaagggcagaagcggagaagctctgagcctcctgaagaaaagattctcccatagacccgtgcaggagaagttcgtgtgcctgaactgcggcttcgagacacacgcagccgagcaagccgccctgaacatcgccagatcctggctgttcctgcggagccaggagtacaagaaataccagacaaacaagacaaccggcaacaccgataagagagccttcgtcgagacctggcagtccttttaccggaagaagcttaaggaggtgtggaaacctgccgtgcggtctggcggatctggcggaggctcctatgaacgccgtgacctacgaggacgtgcacgtgaacttcacccaggaggagtgggccctgctggaccccagccagaagaagctgtacaaggacgtgatgctggagacctacaggaacctgaacgccatcggcttcaactgggacagcaagatcttcaagaacatcgtgcaggtgctggaggacaccgagggcatgaaggaggtgagggtgcagaggaagaggctgaacatcctgaacgtgatcggatctggctccggcagcggccccaagaaaaagagaaaagtctaagctgccttctgcggggcttgccttctggccatgcccttcttctctcccttgcacctgtacctcttggtctttgaataaagcctgagtaggaaggctagcaaaaaaaaaaaaaaaaaaaaaaaaaaaaaaaaaaaaaaaaaaaaaaaaaaaaaaaaaaaaaaaaaaaaaaaaaaaaaaaa

SEQ ID NO: 15654 - RNA, 9485 nt, synthetic construct
  source 1..9485: mol_type = other RNA
aggaaataagagagaaaagaagagtaagaagaaatataagagccaccatggcccctaagaagaagcgtaaagtgagccggatggaacgcctcgtctacgaggtgcggcagaagtgcagaaacatcgaggacatctgcatctcctgcggatctctgaacgtgaccctggagcacccactgttcatcggcggcatgtgccagaactgtaaaaactgttttctggagtgtgcctatcaatacgacgatgacggctaccagagctactgcaccatctgttgcggcggaagagaggtgctgatgtgtggaaataacaactgctgccggtgcttctgcgtggaatgcgtggacctgctggtgggccccggcgccgcccaggccgctattaaggaagatccttggaactgctacatgtgcggccacaagggcacatacggcctgctgagacggagagaggactggcctagcagactgcagatgttcttcgccaataaccacgaccaggagttcgacccccctaaggtgtaccctcccgtccccgccgagaagagaaagcccatccgggtcctgagcctgttcgatggcatcgccaccggtctgctggtgctgaaggacctgggcatccaggtggataggtacattgcctccgaggtgtgcgaggactccatcaccgtgggaatggtgcgtcatcagggcaagatcatgtacgtgggcgacgtgcggagcgtgacacagaagcatatccaggagtggggccctttcgacctggtgatcggcggcagcccttgcaatgacctgagcatcgtgaacccagcccggaagggcctgtacgagggaaccggcagactgttcttcgagttttacagactgctgcacgacgcccggcctaaggaaggcgacgaccggcccttcttttggctgttcgagaatgtggtggccatgggagtcagcgacaagcgggatattagccggttcctggagagcaaccccgtgatgatcgatgccaaggaagtgagcgccgcccaccgggccagatacttctggggcaatctgcctggcatgaacagacccctggccagcaccgtgaacgacaagctggagctgcaggagtgcctggagcacggccggatcgccaagttcagcaaggtgagaaccatcaccacccgaagcaacagcatcaaacaaggcaaggaccagcactttcctgtgttcatgaacgagaaggaggacatcctgtggtgtaccgagatggagagagtgttcgggttcccagtccactacacagatgtcagcaacatgtctagactggccagacagagactgctgggaagaagctggtccgtccctgtgatcagacacctgttcgcccctctgaaggagtacttcgcctgcgtgagcagcggcaacagcaacgccaacagccggggccccagcttctctagcggcctggtgccactgtccctgagagggagccacatgggccccatggagatctacaaaaccgtgagcgcctggaagcggcagcctgtgcgcgtgctgagcctgtttcggaatatcgataaagtcctgaaaagcctgggattcctggagagcggctctggctccggcggtggcaccctgaagtacgtggaggatgtgacaaacgtggtcagacgggatgtggagaagtggggccccttcgatctggtgtacggcagcacccaacccctgggcagctcttgtgaccggtgccctggctggtacatgtttcagttccaccggatcctgcagtacgccctgccgagacaggagtcccagcggccattcttttggattttcatggacaacttgctgctgaccgaggatgaccaggaaactaccactcggttcctgcagaccgaagccgtgaccctgcaggacgtgagaggccgggactaccagaacgccatgcgggtgtggtccaacatccctggactgaaaagcaagcacgcacctctgacccctaaagaagaggagtacctgcaggcccaggtgcggagcagaagcaagctggacgcccctaaggtggatctgctggtgaagaattgcctcctgcccctgagagagtacttcaagtatttcagccagaatagtctgcccctgggaggcagcggcggcggcgccctggtgacatttgaggacgtcgccgtgcggttcacccaggaggaatgggctctgctggatccttctcagaaaatcctgtaccgggacgtgatgagagagacataccggaatctgacctccgtgggcatcaactgggaatgttgggaccttgaagcctgcttcagaagcctgggaagaaacctgagagtgcaggtggtgaagagaaagtgcgagctgaccaacagcggcccctgcgccgagggcggcccaagcagcggcgcccctcctcccagcggcggcagcccagccggctccccaacctctaccgaggagggcacctctgagtccgccacccccgagagcggccctggcacctccaccgagcccagcgagggcagcgcacccggcagccctgccggcagccccacctccacagaggagggaaccagcaccgagcccagcgaaggcagcgccccaggcaccagcaccgagcctagtgagcaggagattaaacggatcaacaagatcagaagaagacttgtgaaagacagcaacaccaagaaggccggcaagacaggccccatgaaaaccctgctggttagagtgatgacacccgatctgagagagcggctggaaaacctgagaaagaagcctgaaaatatcccccagcccatcagcaatacatctagagccaacctgaataagctgctgaccgattacaccgaaatgaagaaggcgatcctgcatgtgtactgggaagagttccagaaggaccctgtgggcctgatgagccgggtggcccagcctgccagcaagaagatcgatcagaacaagctgaaacctgagatggacgagaagggcaacctgaccaccgccggctttgcctgctctcagtgtggccagcccctgttcgtgtacaagctggagcaggtgtctgagaagggcaaggcttacaccaactacttcggacggtgcaatgtggccgagcacgaaaagctgatcctgctggcccagctgaagcccgagaaggatagcgacgaagccgtgacatatagcctgggaaagtttgggcagagggccctggatttctacagcattcatgtgaccaaggagtccacccaccccgtgaagcccctggcccagatcgccggaaacagatacgcctccggacctgtgggaaaggccctgagcgacgcatgtatgggcacaatcgcctccttcctgtctaagtaccaggacatcatcatcgaacaccagaaggtggtgaagggcaaccagaagagactggagagcctgcgggagctggccggcaaggaaaacctggaataccctagcgtgaccctgccacctcagcctcacaccaaggagggcgttgatgcctacaacgaagtgatcgcccgggtgcgaatgtgggtgaacctgaacctgtggcagaagctgaagctaagcagagatgatgccaagcctctgctgagactgaagggattcccttcctttcctctggtcgagagacaggccaacgaagtggactggtgggacatggtgtgtaacgtgaagaagctgatcaacgagaaaaaggaggatggcaaggtgttttggcagaatctggctggctacaagagacaggaagccctgagaccatacctgagcagcgaggaagatcggaagaagggaaagaaattcgctcggtaccagctgggcgacctgctgctgcacctggaaaagaagcacggcgaggactggggaaaggtgtacgacgaggcctgggagcggattgacaagaaagtggaaggcctgagcaagcacatcaagctggaagaggaacggagaagcgaggacgcccagagcaaggccgccctgaccgactggctgcgggctaaggccagcttcgtgatcgagggcctgaaggaggccgacaaggacgagttctgcagatgcgagctgaagctgcagaagtggtacggggacctgcggggaaagcccttcgccatcgaagccgagaacagcatcctggacatcagcggcttcagcaagcagtacaactgtgccttcatctggcagaaggacggcgtgaagaagctgaacctgtacctgatcatcaactacttcaagggcggcaagctgcggttcaagaagatcaaacctgaagccttcgaagccaacagattctacaccgtgatcaacaaaaagagcggcgagatcgtgcccatggaggtgaacttcaacttcgacgaccccaacctgatcatcctgcctctggcctttggcaagagacagggcagagaattcatctggaacgacctgctgtccctggaaaccggcagcctgaagctggccaacggaagagtgatcgagaagacactgtacaacagaagaacccggcaggatgagcctgccctgttcgtggccctgaccttcgagcggcgggaggtcctggactcctccaatatcaaaccaatgaacctgatcggcgtggcaagaggcgaaaacatccccgccgtgatcgccctgaccgaccccgagggctgcccactgagccggtttaaggatagcctgggaaacccaacccacatcctgagaatcggcgagagctataaggagaagcagcggaccatccaggccaagaaggaggtggagcagcggagagccggcggctacagccggaagtacgccagcaaagccaagaatctggcagacgatatggtgagaaacaccgctagagatctgctgtactacgccgtgacccaggatgccatgctgatcttcgccaacctgagccggggcttcggccggcagggcaagcggaccttcatggccgagagacagtacacacggatggaggactggctgaccgccaagctggcctacgagggcctgagcaagacctacctgtccaagacactggcccagtacacctccaagacatgcagcaactgtgggtttaccatcaccagcgccgactacgacagggtgctggagaagctgaagaagacagcaacaggctggatgaccacaattaacggcaaggagctgaaggtggagggccagattacctactacaacagatacaagagacagaacgtagtcaaggacctgtccgtcgagctggatagactgagcgaagaatctgtgaacaacgacatctcctcctggacaaagggcagaagcggagaagctctgagcctcctgaagaaaagattctcccatagacccgtgcaggagaagttcgtgtgcctgaactgcggcttcgagacacacgcagccgagcaagccgccctgaacatcgccagatcctggctgttcctgcggagccaggagtacaagaaataccagacaaacaagacaaccggcaacaccgataagagagccttcgtcgagacctggcagtccttttaccggaagaagcttaaggaggtgtggaaacctgccgtgcggtctggcggatctggcggaggctccatggtgaccttcgaggacgtggccgtgcacttcaccaagaccgagtggaccggcctgagccccgcccagagggccctgtacaggagcgtgatgctggagaacttcggcaacctgaccgccctgggctaccccgtgcccaagcccgccctgatcagcctgctggagggcggcgacatggcctggggcctggaggcccaggacgacccccccgccgagaccaccaagaacgtgaggaaggacgtgggcggcccaagcagcggcgcccctcctcccagcggcggcagcccagccggctccccaacctctaccgaggagggcacctctgagtccgccacccccgagagcggccctggcacctccaccgagcccagcgagggcagcgcacccggcagccctgccggcagccccacctccacagaggagggaaccagcaccgagcccagcgaaggcagcgccccaggcaccagcaccgagcctagtgagcaggagattaaacggatcaacaagatcagaagaagacttgtgaaagacagcaacaccaagaaggccggcaagacaggccccatgaaaaccctgctggttagagtgatgacacccgatctgagagagcggctggaaaacctgagaaagaagcctgaaaatatcccccagcccatcagcaatacatctagagccaacctgaataagctgctgaccgattacaccgaaatgaagaaggcgatcctgcatgtgtactgggaagagttccagaaggaccctgtgggcctgatgagccgggtggcccagcctgccagcaagaagatcgatcagaacaagctgaaacctgagatggacgagaagggcaacctgaccaccgccggctttgcctgctctcagtgtggccagcccctgttcgtgtacaagctggagcaggtgtctgagaagggcaaggcttacaccaactacttcggacggtgcaatgtggccgagcacgaaaagctgatcctgctggcccagctgaagcccgagaaggatagcgacgaagccgtgacatatagcctgggaaagtttgggcagagggccctggatttctacagcattcatgtgaccaaggagtccacccaccccgtgaagcccctggcccagatcgccggaaacagatacgcctccggacctgtgggaaaggccctgagcgacgcatgtatgggcacaatcgcctccttcctgtctaagtaccaggacatcatcatcgaacaccagaaggtggtgaagggcaaccagaagagactggagagcctgcgggagctggccggcaaggaaaacctggaataccctagcgtgaccctgccacctcagcctcacaccaaggagggcgttgatgcctacaacgaagtgatcgcccgggtgcgaatgtgggtgaacctgaacctgtggcagaagctgaagctaagcagagatgatgccaagcctctgctgagactgaagggattcccttcctttcctctggtcgagagacaggccaacgaagtggactggtgggacatggtgtgtaacgtgaagaagctgatcaacgagaaaaaggaggatggcaaggtgttttggcagaatctggctggctacaagagacaggaagccctgagaccatacctgagcagcgaggaagatcggaagaagggaaagaaattcgctcggtaccagctgggcgacctgctgctgcacctggaaaagaagcacggcgaggactggggaaaggtgtacgacgaggcctgggagcggattgacaagaaagtggaaggcctgagcaagcacatcaagctggaagaggaacggagaagcgaggacgcccagagcaaggccgccctgaccgactggctgcgggctaaggccagcttcgtgatcgagggcctgaaggaggccgacaaggacgagttctgcagatgcgagctgaagctgcagaagtggtacggggacctgcggggaaagcccttcgccatcgaagccgagaacagcatcctggacatcagcggcttcagcaagcagtacaactgtgccttcatctggcagaaggacggcgtgaagaagctgaacctgtacctgatcatcaactacttcaagggcggcaagctgcggttcaagaagatcaaacctgaagccttcgaagccaacagattctacaccgtgatcaacaaaaagagcggcgagatcgtgcccatggaggtgaacttcaacttcgacgaccccaacctgatcatcctgcctctggcctttggcaagagacagggcagagaattcatctggaacgacctgctgtccctggaaaccggcagcctgaagctggccaacggaagagtgatcgagaagacactgtacaacagaagaacccggcaggatgagcctgccctgttcgtggccctgaccttcgagcggcgggaggtcctggactcctccaatatcaaaccaatgaacctgatcggcgtggcaagaggcgaaaacatccccgccgtgatcgccctgaccgaccccgagggctgcccactgagccggtttaaggatagcctgggaaacccaacccacatcctgagaatcggcgagagctataaggagaagcagcggaccatccaggccaagaaggaggtggagcagcggagagccggcggctacagccggaagtacgccagcaaagccaagaatctggcagacgatatggtgagaaacaccgctagagatctgctgtactacgccgtgacccaggatgccatgctgatcttcgccaacctgagccggggcttcggccggcagggcaagcggaccttcatggccgagagacagtacacacggatggaggactggctgaccgccaagctggcctacgagggcctgagcaagacctacctgtccaagacactggcccagtacacctccaagacatgcagcaactgtgggtttaccatcaccagcgccgactacgacagggtgctggagaagctgaagaagacagcaacaggctggatgaccacaattaacggcaaggagctgaaggtggagggccagattacctactacaacagatacaagagacagaacgtagtcaaggacctgtccgtcgagctggatagactgagcgaagaatctgtgaacaacgacatctcctcctggacaaagggcagaagcggagaagctctgagcctcctgaagaaaagattctcccatagacccgtgcaggagaagttcgtgtgcctgaactgcggcttcgagacacacgcagccgagcaagccgccctgaacatcgccagatcctggctgttcctgcggagccaggagtacaagaaataccagacaaacaagacaaccggcaacaccgataagagagccttcgtcgagacctggcagtccttttaccggaagaagcttaaggaggtgtggaaacctgccgtgcggtctggcggatctggcggaggctcctatggtgaccttcgaggacgtggccgtgcacttcaccaagaccgagtggaccggcctgagccccgcccagagggccctgtacaggagcgtgatgctggagaacttcggcaacctgaccgccctgggctaccccgtgcccaagcccgccctgatcagcctgctggagggcggcgacatggcctggggcctggaggcccaggacgacccccccgccgagaccaccaagaacgtgaggaaggacgtgggatctggctccggcagcggccccaagaaaaagagaaaagtctaagctgccttctgcggggcttgccttctggccatgcccttcttctctcccttgcacctgtacctcttggtctttgaataaagcctgagtaggaaggctagcaaaaaaaaaaaaaaaaaaaaaaaaaaaaaaaaaaaaaaaaaaaaaaaaaaaaaaaaaaaaaaaaaaaaaaaaaaaaaaaa

SEQ ID NO: 15655 - RNA, 9485 nt, synthetic construct
  source 1..9485: mol_type = other RNA
aggaaataagagagaaaagaagagtaagaagaaatataagagccaccatggcccctaagaagaagcgtaaagtgagccggatggaacgcctcgtctacgaggtgcggcagaagtgcagaaacatcgaggacatctgcatctcctgcggatctctgaacgtgaccctggagcacccactgttcatcggcggcatgtgccagaactgtaaaaactgttttctggagtgtgcctatcaatacgacgatgacggctaccagagctactgcaccatctgttgcggcggaagagaggtgctgatgtgtggaaataacaactgctgccggtgcttctgcgtggaatgcgtggacctgctggtgggccccggcgccgcccaggccgctattaaggaagatccttggaactgctacatgtgcggccacaagggcacatacggcctgctgagacggagagaggactggcctagcagactgcagatgttcttcgccaataaccacgaccaggagttcgacccccctaaggtgtaccctcccgtccccgccgagaagagaaagcccatccgggtcctgagcctgttcgatggcatcgccaccggtctgctggtgctgaaggacctgggcatccaggtggataggtacattgcctccgaggtgtgcgaggactccatcaccgtgggaatggtgcgtcatcagggcaagatcatgtacgtgggcgacgtgcggagcgtgacacagaagcatatccaggagtggggccctttcgacctggtgatcggcggcagcccttgcaatgacctgagcatcgtgaacccagcccggaagggcctgtacgagggaaccggcagactgttcttcgagttttacagactgctgcacgacgcccggcctaaggaaggcgacgaccggcccttcttttggctgttcgagaatgtggtggccatgggagtcagcgacaagcgggatattagccggttcctggagagcaaccccgtgatgatcgatgccaaggaagtgagcgccgcccaccgggccagatacttctggggcaatctgcctggcatgaacagacccctggccagcaccgtgaacgacaagctggagctgcaggagtgcctggagcacggccggatcgccaagttcagcaaggtgagaaccatcaccacccgaagcaacagcatcaaacaaggcaaggaccagcactttcctgtgttcatgaacgagaaggaggacatcctgtggtgtaccgagatggagagagtgttcgggttcccagtccactacacagatgtcagcaacatgtctagactggccagacagagactgctgggaagaagctggtccgtccctgtgatcagacacctgttcgcccctctgaaggagtacttcgcctgcgtgagcagcggcaacagcaacgccaacagccggggccccagcttctctagcggcctggtgccactgtccctgagagggagccacatgggccccatggagatctacaaaaccgtgagcgcctggaagcggcagcctgtgcgcgtgctgagcctgtttcggaatatcgataaagtcctgaaaagcctgggattcctggagagcggctctggctccggcggtggcaccctgaagtacgtggaggatgtgacaaacgtggtcagacgggatgtggagaagtggggccccttcgatctggtgtacggcagcacccaacccctgggcagctcttgtgaccggtgccctggctggtacatgtttcagttccaccggatcctgcagtacgccctgccgagacaggagtcccagcggccattcttttggattttcatggacaacttgctgctgaccgaggatgaccaggaaactaccactcggttcctgcagaccgaagccgtgaccctgcaggacgtgagaggccgggactaccagaacgccatgcgggtgtggtccaacatccctggactgaaaagcaagcacgcacctctgacccctaaagaagaggagtacctgcaggcccaggtgcggagcagaagcaagctggacgcccctaaggtggatctgctggtgaagaattgcctcctgcccctgagagagtacttcaagtatttcagccagaatagtctgcccctgggaggcagcggcggcggcgccctggtgacatttgaggacgtcgccgtgcggttcacccaggaggaatgggctctgctggatccttctcagaaaatcctgtaccgggacgtgatgagagagacataccggaatctgacctccgtgggcatcaactgggaatgttgggaccttgaagcctgcttcagaagcctgggaagaaacctgagagtgcaggtggtgaagagaaagtgcgagctgaccaacagcggcccctgcgccgagggcggcccaagcagcggcgcccctcctcccagcggcggcagcccagccggctccccaacctctaccgaggagggcacctctgagtccgccacccccgagagcggccctggcacctccaccgagcccagcgagggcagcgcacccggcagccctgccggcagccccacctccacagaggagggaaccagcaccgagcccagcgaaggcagcgccccaggcaccagcaccgagcctagtgagcaggagattaaacggatcaacaagatcagaagaagacttgtgaaagacagcaacaccaagaaggccggcaagacaggccccatgaaaaccctgctggttagagtgatgacacccgatctgagagagcggctggaaaacctgagaaagaagcctgaaaatatcccccagcccatcagcaatacatctagagccaacctgaataagctgctgaccgattacaccgaaatgaagaaggcgatcctgcatgtgtactgggaagagttccagaaggaccctgtgggcctgatgagccgggtggcccagcctgccagcaagaagatcgatcagaacaagctgaaacctgagatggacgagaagggcaacctgaccaccgccggctttgcctgctctcagtgtggccagcccctgttcgtgtacaagctggagcaggtgtctgagaagggcaaggcttacaccaactacttcggacggtgcaatgtggccgagcacgaaaagctgatcctgctggcccagctgaagcccgagaaggatagcgacgaagccgtgacatatagcctgggaaagtttgggcagagggccctggatttctacagcattcatgtgaccaaggagtccacccaccccgtgaagcccctggcccagatcgccggaaacagatacgcctccggacctgtgggaaaggccctgagcgacgcatgtatgggcacaatcgcctccttcctgtctaagtaccaggacatcatcatcgaacaccagaaggtggtgaagggcaaccagaagagactggagagcctgcgggagctggccggcaaggaaaacctggaataccctagcgtgaccctgccacctcagcctcacaccaaggagggcgttgatgcctacaacgaagtgatcgcccgggtgcgaatgtgggtgaacctgaacctgtggcagaagctgaagctaagcagagatgatgccaagcctctgctgagactgaagggattcccttcctttcctctggtcgagagacaggccaacgaagtggactggtgggacatggtgtgtaacgtgaagaagctgatcaacgagaaaaaggaggatggcaaggtgttttggcagaatctggctggctacaagagacaggaagccctgagaccatacctgagcagcgaggaagatcggaagaagggaaagaaattcgctcggtaccagctgggcgacctgctgctgcacctggaaaagaagcacggcgaggactggggaaaggtgtacgacgaggcctgggagcggattgacaagaaagtggaaggcctgagcaagcacatcaagctggaagaggaacggagaagcgaggacgcccagagcaaggccgccctgaccgactggctgcgggctaaggccagcttcgtgatcgagggcctgaaggaggccgacaaggacgagttctgcagatgcgagctgaagctgcagaagtggtacggggacctgcggggaaagcccttcgccatcgaagccgagaacagcatcctggacatcagcggcttcagcaagcagtacaactgtgccttcatctggcagaaggacggcgtgaagaagctgaacctgtacctgatcatcaactacttcaagggcggcaagctgcggttcaagaagatcaaacctgaagccttcgaagccaacagattctacaccgtgatcaacaaaaagagcggcgagatcgtgcccatggaggtgaacttcaacttcgacgaccccaacctgatcatcctgcctctggcctttggcaagagacagggcagagaattcatctggaacgacctgctgtccctggaaaccggcagcctgaagctggccaacggaagagtgatcgagaagacactgtacaacagaagaacccggcaggatgagcctgccctgttcgtggccctgaccttcgagcggcgggaggtcctggactcctccaatatcaaaccaatgaacctgatcggcgtggcaagaggcgaaaacatccccgccgtgatcgccctgaccgaccccgagggctgcccactgagccggtttaaggatagcctgggaaacccaacccacatcctgagaatcggcgagagctataaggagaagcagcggaccatccaggccaagaaggaggtggagcagcggagagccggcggctacagccggaagtacgccagcaaagccaagaatctggcagacgatatggtgagaaacaccgctagagatctgctgtactacgccgtgacccaggatgccatgctgatcttcgccaacctgagccggggcttcggccggcagggcaagcggaccttcatggccgagagacagtacacacggatggaggactggctgaccgccaagctggcctacgagggcctgagcaagacctacctgtccaagacactggcccagtacacctccaagacatgcagcaactgtgggtttaccatcaccagcgccgactacgacagggtgctggagaagctgaagaagacagcaacaggctggatgaccacaattaacggcaaggagctgaaggtggagggccagattacctactacaacagatacaagagacagaacgtagtcaaggacctgtccgtcgagctggatagactgagcgaagaatctgtgaacaacgacatctcctcctggacaaagggcagaagcggagaagctctgagcctcctgaagaaaagattctcccatagacccgtgcaggagaagttcgtgtgcctgaactgcggcttcgagacacacgcagccgagcaagccgccctgaacatcgccagatcctggctgttcctgcggagccaggagtacaagaaataccagacaaacaagacaaccggcaacaccgataagagagccttcgtcgagacctggcagtccttttaccggaagaagcttaaggaggtgtggaaacctgccgtgcggtctggcggatctggcggaggctccgtgcaggtgcccgtgaccttcgaggacgtggccgtgtacttcagcgaggacgagtggggcatgctggccggctggcagaaggagctgtacaaggagaccatgaaggagaactacgagaccctgaccctgctgggctgcctgagcgagaagcccagcctgatcagcaagatcgagagggaggaggacccctgcgtgagggaccagcaggaccccagggacaggaggaagctgaggagcagctggggcggcccaagcagcggcgcccctcctcccagcggcggcagcccagccggctccccaacctctaccgaggagggcacctctgagtccgccacccccgagagcggccctggcacctccaccgagcccagcgagggcagcgcacccggcagccctgccggcagccccacctccacagaggagggaaccagcaccgagcccagcgaaggcagcgccccaggcaccagcaccgagcctagtgagcaggagattaaacggatcaacaagatcagaagaagacttgtgaaagacagcaacaccaagaaggccggcaagacaggccccatgaaaaccctgctggttagagtgatgacacccgatctgagagagcggctggaaaacctgagaaagaagcctgaaaatatcccccagcccatcagcaatacatctagagccaacctgaataagctgctgaccgattacaccgaaatgaagaaggcgatcctgcatgtgtactgggaagagttccagaaggaccctgtgggcctgatgagccgggtggcccagcctgccagcaagaagatcgatcagaacaagctgaaacctgagatggacgagaagggcaacctgaccaccgccggctttgcctgctctcagtgtggccagcccctgttcgtgtacaagctggagcaggtgtctgagaagggcaaggcttacaccaactacttcggacggtgcaatgtggccgagcacgaaaagctgatcctgctggcccagctgaagcccgagaaggatagcgacgaagccgtgacatatagcctgggaaagtttgggcagagggccctggatttctacagcattcatgtgaccaaggagtccacccaccccgtgaagcccctggcccagatcgccggaaacagatacgcctccggacctgtgggaaaggccctgagcgacgcatgtatgggcacaatcgcctccttcctgtctaagtaccaggacatcatcatcgaacaccagaaggtggtgaagggcaaccagaagagactggagagcctgcgggagctggccggcaaggaaaacctggaataccctagcgtgaccctgccacctcagcctcacaccaaggagggcgttgatgcctacaacgaagtgatcgcccgggtgcgaatgtgggtgaacctgaacctgtggcagaagctgaagctaagcagagatgatgccaagcctctgctgagactgaagggattcccttcctttcctctggtcgagagacaggccaacgaagtggactggtgggacatggtgtgtaacgtgaagaagctgatcaacgagaaaaaggaggatggcaaggtgttttggcagaatctggctggctacaagagacaggaagccctgagaccatacctgagcagcgaggaagatcggaagaagggaaagaaattcgctcggtaccagctgggcgacctgctgctgcacctggaaaagaagcacggcgaggactggggaaaggtgtacgacgaggcctgggagcggattgacaagaaagtggaaggcctgagcaagcacatcaagctggaagaggaacggagaagcgaggacgcccagagcaaggccgccctgaccgactggctgcgggctaaggccagcttcgtgatcgagggcctgaaggaggccgacaaggacgagttctgcagatgcgagctgaagctgcagaagtggtacggggacctgcggggaaagcccttcgccatcgaagccgagaacagcatcctggacatcagcggcttcagcaagcagtacaactgtgccttcatctggcagaaggacggcgtgaagaagctgaacctgtacctgatcatcaactacttcaagggcggcaagctgcggttcaagaagatcaaacctgaagccttcgaagccaacagattctacaccgtgatcaacaaaaagagcggcgagatcgtgcccatggaggtgaacttcaacttcgacgaccccaacctgatcatcctgcctctggcctttggcaagagacagggcagagaattcatctggaacgacctgctgtccctggaaaccggcagcctgaagctggccaacggaagagtgatcgagaagacactgtacaacagaagaacccggcaggatgagcctgccctgttcgtggccctgaccttcgagcggcgggaggtcctggactcctccaatatcaaaccaatgaacctgatcggcgtggcaagaggcgaaaacatccccgccgtgatcgccctgaccgaccccgagggctgcccactgagccggtttaaggatagcctgggaaacccaacccacatcctgagaatcggcgagagctataaggagaagcagcggaccatccaggccaagaaggaggtggagcagcggagagccggcggctacagccggaagtacgccagcaaagccaagaatctggcagacgatatggtgagaaacaccgctagagatctgctgtactacgccgtgacccaggatgccatgctgatcttcgccaacctgagccggggcttcggccggcagggcaagcggaccttcatggccgagagacagtacacacggatggaggactggctgaccgccaagctggcctacgagggcctgagcaagacctacctgtccaagacactggcccagtacacctccaagacatgcagcaactgtgggtttaccatcaccagcgccgactacgacagggtgctggagaagctgaagaagacagcaacaggctggatgaccacaattaacggcaaggagctgaaggtggagggccagattacctactacaacagatacaagagacagaacgtagtcaaggacctgtccgtcgagctggatagactgagcgaagaatctgtgaacaacgacatctcctcctggacaaagggcagaagcggagaagctctgagcctcctgaagaaaagattctcccatagacccgtgcaggagaagttcgtgtgcctgaactgcggcttcgagacacacgcagccgagcaagccgccctgaacatcgccagatcctggctgttcctgcggagccaggagtacaagaaataccagacaaacaagacaaccggcaacaccgataagagagccttcgtcgagacctggcagtccttttaccggaagaagcttaaggaggtgtggaaacctgccgtgcggtctggcggatctggcggaggctcctgtgcaggtgcccgtgaccttcgaggacgtggccgtgtacttcagcgaggacgagtggggcatgctggccggctggcagaaggagctgtacaaggagaccatgaaggagaactacgagaccctgaccctgctgggctgcctgagcgagaagcccagcctgatcagcaagatcgagagggaggaggacccctgcgtgagggaccagcaggaccccagggacaggaggaagctgaggagcagctggggatctggctccggcagcggccccaagaaaaagagaaaagtctaagctgccttctgcggggcttgccttctggccatgcccttcttctctcccttgcacctgtacctcttggtctttgaataaagcctgagtaggaaggctagcaaaaaaaaaaaaaaaaaaaaaaaaaaaaaaaaaaaaaaaaaaaaaaaaaaaaaaaaaaaaaaaaaaaaaaaaaaaaaaaa

SEQ ID NO: 15656 - RNA, 9485 nt, synthetic construct
  source 1..9485: mol_type = other RNA
aggaaataagagagaaaagaagagtaagaagaaatataagagccaccatggcccctaagaagaagcgtaaagtgagccggatggaacgcctcgtctacgaggtgcggcagaagtgcagaaacatcgaggacatctgcatctcctgcggatctctgaacgtgaccctggagcacccactgttcatcggcggcatgtgccagaactgtaaaaactgttttctggagtgtgcctatcaatacgacgatgacggctaccagagctactgcaccatctgttgcggcggaagagaggtgctgatgtgtggaaataacaactgctgccggtgcttctgcgtggaatgcgtggacctgctggtgggccccggcgccgcccaggccgctattaaggaagatccttggaactgctacatgtgcggccacaagggcacatacggcctgctgagacggagagaggactggcctagcagactgcagatgttcttcgccaataaccacgaccaggagttcgacccccctaaggtgtaccctcccgtccccgccgagaagagaaagcccatccgggtcctgagcctgttcgatggcatcgccaccggtctgctggtgctgaaggacctgggcatccaggtggataggtacattgcctccgaggtgtgcgaggactccatcaccgtgggaatggtgcgtcatcagggcaagatcatgtacgtgggcgacgtgcggagcgtgacacagaagcatatccaggagtggggccctttcgacctggtgatcggcggcagcccttgcaatgacctgagcatcgtgaacccagcccggaagggcctgtacgagggaaccggcagactgttcttcgagttttacagactgctgcacgacgcccggcctaaggaaggcgacgaccggcccttcttttggctgttcgagaatgtggtggccatgggagtcagcgacaagcgggatattagccggttcctggagagcaaccccgtgatgatcgatgccaaggaagtgagcgccgcccaccgggccagatacttctggggcaatctgcctggcatgaacagacccctggccagcaccgtgaacgacaagctggagctgcaggagtgcctggagcacggccggatcgccaagttcagcaaggtgagaaccatcaccacccgaagcaacagcatcaaacaaggcaaggaccagcactttcctgtgttcatgaacgagaaggaggacatcctgtggtgtaccgagatggagagagtgttcgggttcccagtccactacacagatgtcagcaacatgtctagactggccagacagagactgctgggaagaagctggtccgtccctgtgatcagacacctgttcgcccctctgaaggagtacttcgcctgcgtgagcagcggcaacagcaacgccaacagccggggccccagcttctctagcggcctggtgccactgtccctgagagggagccacatgggccccatggagatctacaaaaccgtgagcgcctggaagcggcagcctgtgcgcgtgctgagcctgtttcggaatatcgataaagtcctgaaaagcctgggattcctggagagcggctctggctccggcggtggcaccctgaagtacgtggaggatgtgacaaacgtggtcagacgggatgtggagaagtggggccccttcgatctggtgtacggcagcacccaacccctgggcagctcttgtgaccggtgccctggctggtacatgtttcagttccaccggatcctgcagtacgccctgccgagacaggagtcccagcggccattcttttggattttcatggacaacttgctgctgaccgaggatgaccaggaaactaccactcggttcctgcagaccgaagccgtgaccctgcaggacgtgagaggccgggactaccagaacgccatgcgggtgtggtccaacatccctggactgaaaagcaagcacgcacctctgacccctaaagaagaggagtacctgcaggcccaggtgcggagcagaagcaagctggacgcccctaaggtggatctgctggtgaagaattgcctcctgcccctgagagagtacttcaagtatttcagccagaatagtctgcccctgggaggcagcggcggcggcgccctggtgacatttgaggacgtcgccgtgcggttcacccaggaggaatgggctctgctggatccttctcagaaaatcctgtaccgggacgtgatgagagagacataccggaatctgacctccgtgggcatcaactgggaatgttgggaccttgaagcctgcttcagaagcctgggaagaaacctgagagtgcaggtggtgaagagaaagtgcgagctgaccaacagcggcccctgcgccgagggcggcccaagcagcggcgcccctcctcccagcggcggcagcccagccggctccccaacctctaccgaggagggcacctctgagtccgccacccccgagagcggccctggcacctccaccgagcccagcgagggcagcgcacccggcagccctgccggcagccccacctccacagaggagggaaccagcaccgagcccagcgaaggcagcgccccaggcaccagcaccgagcctagtgagcaggagattaaacggatcaacaagatcagaagaagacttgtgaaagacagcaacaccaagaaggccggcaagacaggccccatgaaaaccctgctggttagagtgatgacacccgatctgagagagcggctggaaaacctgagaaagaagcctgaaaatatcccccagcccatcagcaatacatctagagccaacctgaataagctgctgaccgattacaccgaaatgaagaaggcgatcctgcatgtgtactgggaagagttccagaaggaccctgtgggcctgatgagccgggtggcccagcctgccagcaagaagatcgatcagaacaagctgaaacctgagatggacgagaagggcaacctgaccaccgccggctttgcctgctctcagtgtggccagcccctgttcgtgtacaagctggagcaggtgtctgagaagggcaaggcttacaccaactacttcggacggtgcaatgtggccgagcacgaaaagctgatcctgctggcccagctgaagcccgagaaggatagcgacgaagccgtgacatatagcctgggaaagtttgggcagagggccctggatttctacagcattcatgtgaccaaggagtccacccaccccgtgaagcccctggcccagatcgccggaaacagatacgcctccggacctgtgggaaaggccctgagcgacgcatgtatgggcacaatcgcctccttcctgtctaagtaccaggacatcatcatcgaacaccagaaggtggtgaagggcaaccagaagagactggagagcctgcgggagctggccggcaaggaaaacctggaataccctagcgtgaccctgccacctcagcctcacaccaaggagggcgttgatgcctacaacgaagtgatcgcccgggtgcgaatgtgggtgaacctgaacctgtggcagaagctgaagctaagcagagatgatgccaagcctctgctgagactgaagggattcccttcctttcctctggtcgagagacaggccaacgaagtggactggtgggacatggtgtgtaacgtgaagaagctgatcaacgagaaaaaggaggatggcaaggtgttttggcagaatctggctggctacaagagacaggaagccctgagaccatacctgagcagcgaggaagatcggaagaagggaaagaaattcgctcggtaccagctgggcgacctgctgctgcacctggaaaagaagcacggcgaggactggggaaaggtgtacgacgaggcctgggagcggattgacaagaaagtggaaggcctgagcaagcacatcaagctggaagaggaacggagaagcgaggacgcccagagcaaggccgccctgaccgactggctgcgggctaaggccagcttcgtgatcgagggcctgaaggaggccgacaaggacgagttctgcagatgcgagctgaagctgcagaagtggtacggggacctgcggggaaagcccttcgccatcgaagccgagaacagcatcctggacatcagcggcttcagcaagcagtacaactgtgccttcatctggcagaaggacggcgtgaagaagctgaacctgtacctgatcatcaactacttcaagggcggcaagctgcggttcaagaagatcaaacctgaagccttcgaagccaacagattctacaccgtgatcaacaaaaagagcggcgagatcgtgcccatggaggtgaacttcaacttcgacgaccccaacctgatcatcctgcctctggcctttggcaagagacagggcagagaattcatctggaacgacctgctgtccctggaaaccggcagcctgaagctggccaacggaagagtgatcgagaagacactgtacaacagaagaacccggcaggatgagcctgccctgttcgtggccctgaccttcgagcggcgggaggtcctggactcctccaatatcaaaccaatgaacctgatcggcgtggcaagaggcgaaaacatccccgccgtgatcgccctgaccgaccccgagggctgcccactgagccggtttaaggatagcctgggaaacccaacccacatcctgagaatcggcgagagctataaggagaagcagcggaccatccaggccaagaaggaggtggagcagcggagagccggcggctacagccggaagtacgccagcaaagccaagaatctggcagacgatatggtgagaaacaccgctagagatctgctgtactacgccgtgacccaggatgccatgctgatcttcgccaacctgagccggggcttcggccggcagggcaagcggaccttcatggccgagagacagtacacacggatggaggactggctgaccgccaagctggcctacgagggcctgagcaagacctacctgtccaagacactggcccagtacacctccaagacatgcagcaactgtgggtttaccatcaccagcgccgactacgacagggtgctggagaagctgaagaagacagcaacaggctggatgaccacaattaacggcaaggagctgaaggtggagggccagattacctactacaacagatacaagagacagaacgtagtcaaggacctgtccgtcgagctggatagactgagcgaagaatctgtgaacaacgacatctcctcctggacaaagggcagaagcggagaagctctgagcctcctgaagaaaagattctcccatagacccgtgcaggagaagttcgtgtgcctgaactgcggcttcgagacacacgcagccgagcaagccgccctgaacatcgccagatcctggctgttcctgcggagccaggagtacaagaaataccagacaaacaagacaaccggcaacaccgataagagagccttcgtcgagacctggcagtccttttaccggaagaagcttaaggaggtgtggaaacctgccgtgcggtctggcggatctggcggaggctccgacagcgtggccttcgaggacgtggccgtgaacttcacccaggaggagtgggccctgctggaccccagccagaagaacctgtacagggaggtgatgcaggagaccctgaggaacctgaccagcatcggcaagaagtggaacaaccagtacatcgaggacgagcaccagaaccccaagaggaacctgaggaggctgatcggcgagaggctgagcgagagcaaggagagccaccagcacggcgagggcggcccaagcagcggcgcccctcctcccagcggcggcagcccagccggctccccaacctctaccgaggagggcacctctgagtccgccacccccgagagcggccctggcacctccaccgagcccagcgagggcagcgcacccggcagccctgccggcagccccacctccacagaggagggaaccagcaccgagcccagcgaaggcagcgccccaggcaccagcaccgagcctagtgagcaggagattaaacggatcaacaagatcagaagaagacttgtgaaagacagcaacaccaagaaggccggcaagacaggccccatgaaaaccctgctggttagagtgatgacacccgatctgagagagcggctggaaaacctgagaaagaagcctgaaaatatcccccagcccatcagcaatacatctagagccaacctgaataagctgctgaccgattacaccgaaatgaagaaggcgatcctgcatgtgtactgggaagagttccagaaggaccctgtgggcctgatgagccgggtggcccagcctgccagcaagaagatcgatcagaacaagctgaaacctgagatggacgagaagggcaacctgaccaccgccggctttgcctgctctcagtgtggccagcccctgttcgtgtacaagctggagcaggtgtctgagaagggcaaggcttacaccaactacttcggacggtgcaatgtggccgagcacgaaaagctgatcctgctggcccagctgaagcccgagaaggatagcgacgaagccgtgacatatagcctgggaaagtttgggcagagggccctggatttctacagcattcatgtgaccaaggagtccacccaccccgtgaagcccctggcccagatcgccggaaacagatacgcctccggacctgtgggaaaggccctgagcgacgcatgtatgggcacaatcgcctccttcctgtctaagtaccaggacatcatcatcgaacaccagaaggtggtgaagggcaaccagaagagactggagagcctgcgggagctggccggcaaggaaaacctggaataccctagcgtgaccctgccacctcagcctcacaccaaggagggcgttgatgcctacaacgaagtgatcgcccgggtgcgaatgtgggtgaacctgaacctgtggcagaagctgaagctaagcagagatgatgccaagcctctgctgagactgaagggattcccttcctttcctctggtcgagagacaggccaacgaagtggactggtgggacatggtgtgtaacgtgaagaagctgatcaacgagaaaaaggaggatggcaaggtgttttggcagaatctggctggctacaagagacaggaagccctgagaccatacctgagcagcgaggaagatcggaagaagggaaagaaattcgctcggtaccagctgggcgacctgctgctgcacctggaaaagaagcacggcgaggactggggaaaggtgtacgacgaggcctgggagcggattgacaagaaagtggaaggcctgagcaagcacatcaagctggaagaggaacggagaagcgaggacgcccagagcaaggccgccctgaccgactggctgcgggctaaggccagcttcgtgatcgagggcctgaaggaggccgacaaggacgagttctgcagatgcgagctgaagctgcagaagtggtacggggacctgcggggaaagcccttcgccatcgaagccgagaacagcatcctggacatcagcggcttcagcaagcagtacaactgtgccttcatctggcagaaggacggcgtgaagaagctgaacctgtacctgatcatcaactacttcaagggcggcaagctgcggttcaagaagatcaaacctgaagccttcgaagccaacagattctacaccgtgatcaacaaaaagagcggcgagatcgtgcccatggaggtgaacttcaacttcgacgaccccaacctgatcatcctgcctctggcctttggcaagagacagggcagagaattcatctggaacgacctgctgtccctggaaaccggcagcctgaagctggccaacggaagagtgatcgagaagacactgtacaacagaagaacccggcaggatgagcctgccctgttcgtggccctgaccttcgagcggcgggaggtcctggactcctccaatatcaaaccaatgaacctgatcggcgtggcaagaggcgaaaacatccccgccgtgatcgccctgaccgaccccgagggctgcccactgagccggtttaaggatagcctgggaaacccaacccacatcctgagaatcggcgagagctataaggagaagcagcggaccatccaggccaagaaggaggtggagcagcggagagccggcggctacagccggaagtacgccagcaaagccaagaatctggcagacgatatggtgagaaacaccgctagagatctgctgtactacgccgtgacccaggatgccatgctgatcttcgccaacctgagccggggcttcggccggcagggcaagcggaccttcatggccgagagacagtacacacggatggaggactggctgaccgccaagctggcctacgagggcctgagcaagacctacctgtccaagacactggcccagtacacctccaagacatgcagcaactgtgggtttaccatcaccagcgccgactacgacagggtgctggagaagctgaagaagacagcaacaggctggatgaccacaattaacggcaaggagctgaaggtggagggccagattacctactacaacagatacaagagacagaacgtagtcaaggacctgtccgtcgagctggatagactgagcgaagaatctgtgaacaacgacatctcctcctggacaaagggcagaagcggagaagctctgagcctcctgaagaaaagattctcccatagacccgtgcaggagaagttcgtgtgcctgaactgcggcttcgagacacacgcagccgagcaagccgccctgaacatcgccagatcctggctgttcctgcggagccaggagtacaagaaataccagacaaacaagacaaccggcaacaccgataagagagccttcgtcgagacctggcagtccttttaccggaagaagcttaaggaggtgtggaaacctgccgtgcggtctggcggatctggcggaggctcctgacagcgtggccttcgaggacgtggccgtgaacttcacccaggaggagtgggccctgctggaccccagccagaagaacctgtacagggaggtgatgcaggagaccctgaggaacctgaccagcatcggcaagaagtggaacaaccagtacatcgaggacgagcaccagaaccccaagaggaacctgaggaggctgatcggcgagaggctgagcgagagcaaggagagccaccagcacggcgagggatctggctccggcagcggccccaagaaaaagagaaaagtctaagctgccttctgcggggcttgccttctggccatgcccttcttctctcccttgcacctgtacctcttggtctttgaataaagcctgagtaggaaggctagcaaaaaaaaaaaaaaaaaaaaaaaaaaaaaaaaaaaaaaaaaaaaaaaaaaaaaaaaaaaaaaaaaaaaaaaaaaaaaaaa

SEQ ID NO: 15657 - RNA, 9485 nt, synthetic construct
  source 1..9485: mol_type = other RNA
aggaaataagagagaaaagaagagtaagaagaaatataagagccaccatggcccctaagaagaagcgtaaagtgagccggatggaacgcctcgtctacgaggtgcggcagaagtgcagaaacatcgaggacatctgcatctcctgcggatctctgaacgtgaccctggagcacccactgttcatcggcggcatgtgccagaactgtaaaaactgttttctggagtgtgcctatcaatacgacgatgacggctaccagagctactgcaccatctgttgcggcggaagagaggtgctgatgtgtggaaataacaactgctgccggtgcttctgcgtggaatgcgtggacctgctggtgggccccggcgccgcccaggccgctattaaggaagatccttggaactgctacatgtgcggccacaagggcacatacggcctgctgagacggagagaggactggcctagcagactgcagatgttcttcgccaataaccacgaccaggagttcgacccccctaaggtgtaccctcccgtccccgccgagaagagaaagcccatccgggtcctgagcctgttcgatggcatcgccaccggtctgctggtgctgaaggacctgggcatccaggtggataggtacattgcctccgaggtgtgcgaggactccatcaccgtgggaatggtgcgtcatcagggcaagatcatgtacgtgggcgacgtgcggagcgtgacacagaagcatatccaggagtggggccctttcgacctggtgatcggcggcagcccttgcaatgacctgagcatcgtgaacccagcccggaagggcctgtacgagggaaccggcagactgttcttcgagttttacagactgctgcacgacgcccggcctaaggaaggcgacgaccggcccttcttttggctgttcgagaatgtggtggccatgggagtcagcgacaagcgggatattagccggttcctggagagcaaccccgtgatgatcgatgccaaggaagtgagcgccgcccaccgggccagatacttctggggcaatctgcctggcatgaacagacccctggccagcaccgtgaacgacaagctggagctgcaggagtgcctggagcacggccggatcgccaagttcagcaaggtgagaaccatcaccacccgaagcaacagcatcaaacaaggcaaggaccagcactttcctgtgttcatgaacgagaaggaggacatcctgtggtgtaccgagatggagagagtgttcgggttcccagtccactacacagatgtcagcaacatgtctagactggccagacagagactgctgggaagaagctggtccgtccctgtgatcagacacctgttcgcccctctgaaggagtacttcgcctgcgtgagcagcggcaacagcaacgccaacagccggggccccagcttctctagcggcctggtgccactgtccctgagagggagccacatgggccccatggagatctacaaaaccgtgagcgcctggaagcggcagcctgtgcgcgtgctgagcctgtttcggaatatcgataaagtcctgaaaagcctgggattcctggagagcggctctggctccggcggtggcaccctgaagtacgtggaggatgtgacaaacgtggtcagacgggatgtggagaagtggggccccttcgatctggtgtacggcagcacccaacccctgggcagctcttgtgaccggtgccctggctggtacatgtttcagttccaccggatcctgcagtacgccctgccgagacaggagtcccagcggccattcttttggattttcatggacaacttgctgctgaccgaggatgaccaggaaactaccactcggttcctgcagaccgaagccgtgaccctgcaggacgtgagaggccgggactaccagaacgccatgcgggtgtggtccaacatccctggactgaaaagcaagcacgcacctctgacccctaaagaagaggagtacctgcaggcccaggtgcggagcagaagcaagctggacgcccctaaggtggatctgctggtgaagaattgcctcctgcccctgagagagtacttcaagtatttcagccagaatagtctgcccctgggaggcagcggcggcggcgccctggtgacatttgaggacgtcgccgtgcggttcacccaggaggaatgggctctgctggatccttctcagaaaatcctgtaccgggacgtgatgagagagacataccggaatctgacctccgtgggcatcaactgggaatgttgggaccttgaagcctgcttcagaagcctgggaagaaacctgagagtgcaggtggtgaagagaaagtgcgagctgaccaacagcggcccctgcgccgagggcggcccaagcagcggcgcccctcctcccagcggcggcagcccagccggctccccaacctctaccgaggagggcacctctgagtccgccacccccgagagcggccctggcacctccaccgagcccagcgagggcagcgcacccggcagccctgccggcagccccacctccacagaggagggaaccagcaccgagcccagcgaaggcagcgccccaggcaccagcaccgagcctagtgagcaggagattaaacggatcaacaagatcagaagaagacttgtgaaagacagcaacaccaagaaggccggcaagacaggccccatgaaaaccctgctggttagagtgatgacacccgatctgagagagcggctggaaaacctgagaaagaagcctgaaaatatcccccagcccatcagcaatacatctagagccaacctgaataagctgctgaccgattacaccgaaatgaagaaggcgatcctgcatgtgtactgggaagagttccagaaggaccctgtgggcctgatgagccgggtggcccagcctgccagcaagaagatcgatcagaacaagctgaaacctgagatggacgagaagggcaacctgaccaccgccggctttgcctgctctcagtgtggccagcccctgttcgtgtacaagctggagcaggtgtctgagaagggcaaggcttacaccaactacttcggacggtgcaatgtggccgagcacgaaaagctgatcctgctggcccagctgaagcccgagaaggatagcgacgaagccgtgacatatagcctgggaaagtttgggcagagggccctggatttctacagcattcatgtgaccaaggagtccacccaccccgtgaagcccctggcccagatcgccggaaacagatacgcctccggacctgtgggaaaggccctgagcgacgcatgtatgggcacaatcgcctccttcctgtctaagtaccaggacatcatcatcgaacaccagaaggtggtgaagggcaaccagaagagactggagagcctgcgggagctggccggcaaggaaaacctggaataccctagcgtgaccctgccacctcagcctcacaccaaggagggcgttgatgcctacaacgaagtgatcgcccgggtgcgaatgtgggtgaacctgaacctgtggcagaagctgaagctaagcagagatgatgccaagcctctgctgagactgaagggattcccttcctttcctctggtcgagagacaggccaacgaagtggactggtgggacatggtgtgtaacgtgaagaagctgatcaacgagaaaaaggaggatggcaaggtgttttggcagaatctggctggctacaagagacaggaagccctgagaccatacctgagcagcgaggaagatcggaagaagggaaagaaattcgctcggtaccagctgggcgacctgctgctgcacctggaaaagaagcacggcgaggactggggaaaggtgtacgacgaggcctgggagcggattgacaagaaagtggaaggcctgagcaagcacatcaagctggaagaggaacggagaagcgaggacgcccagagcaaggccgccctgaccgactggctgcgggctaaggccagcttcgtgatcgagggcctgaaggaggccgacaaggacgagttctgcagatgcgagctgaagctgcagaagtggtacggggacctgcggggaaagcccttcgccatcgaagccgagaacagcatcctggacatcagcggcttcagcaagcagtacaactgtgccttcatctggcagaaggacggcgtgaagaagctgaacctgtacctgatcatcaactacttcaagggcggcaagctgcggttcaagaagatcaaacctgaagccttcgaagccaacagattctacaccgtgatcaacaaaaagagcggcgagatcgtgcccatggaggtgaacttcaacttcgacgaccccaacctgatcatcctgcctctggcctttggcaagagacagggcagagaattcatctggaacgacctgctgtccctggaaaccggcagcctgaagctggccaacggaagagtgatcgagaagacactgtacaacagaagaacccggcaggatgagcctgccctgttcgtggccctgaccttcgagcggcgggaggtcctggactcctccaatatcaaaccaatgaacctgatcggcgtggcaagaggcgaaaacatccccgccgtgatcgccctgaccgaccccgagggctgcccactgagccggtttaaggatagcctgggaaacccaacccacatcctgagaatcggcgagagctataaggagaagcagcggaccatccaggccaagaaggaggtggagcagcggagagccggcggctacagccggaagtacgccagcaaagccaagaatctggcagacgatatggtgagaaacaccgctagagatctgctgtactacgccgtgacccaggatgccatgctgatcttcgccaacctgagccggggcttcggccggcagggcaagcggaccttcatggccgagagacagtacacacggatggaggactggctgaccgccaagctggcctacgagggcctgagcaagacctacctgtccaagacactggcccagtacacctccaagacatgcagcaactgtgggtttaccatcaccagcgccgactacgacagggtgctggagaagctgaagaagacagcaacaggctggatgaccacaattaacggcaaggagctgaaggtggagggccagattacctactacaacagatacaagagacagaacgtagtcaaggacctgtccgtcgagctggatagactgagcgaagaatctgtgaacaacgacatctcctcctggacaaagggcagaagcggagaagctctgagcctcctgaagaaaagattctcccatagacccgtgcaggagaagttcgtgtgcctgaactgcggcttcgagacacacgcagccgagcaagccgccctgaacatcgccagatcctggctgttcctgcggagccaggagtacaagaaataccagacaaacaagacaaccggcaacaccgataagagagccttcgtcgagacctggcagtccttttaccggaagaagcttaaggaggtgtggaaacctgccgtgcggtctggcggatctggcggaggctccgtgcaggagcccgtgaccttcaaggacgtggccgtggacttcacccaggaggagtggggccagctggacctggtgcagaggaccctgtacagggacgtgatgctggagacctacggccacctgctgagcgtgggcaaccagatcgccaagcccgaggtgatcagcctgctggagcagggcgaggagccctggagcgtggagcaggcctgcccccagaggaccggccccgagtgggtgaggaacggcggcccaagcagcggcgcccctcctcccagcggcggcagcccagccggctccccaacctctaccgaggagggcacctctgagtccgccacccccgagagcggccctggcacctccaccgagcccagcgagggcagcgcacccggcagccctgccggcagccccacctccacagaggagggaaccagcaccgagcccagcgaaggcagcgccccaggcaccagcaccgagcctagtgagcaggagattaaacggatcaacaagatcagaagaagacttgtgaaagacagcaacaccaagaaggccggcaagacaggccccatgaaaaccctgctggttagagtgatgacacccgatctgagagagcggctggaaaacctgagaaagaagcctgaaaatatcccccagcccatcagcaatacatctagagccaacctgaataagctgctgaccgattacaccgaaatgaagaaggcgatcctgcatgtgtactgggaagagttccagaaggaccctgtgggcctgatgagccgggtggcccagcctgccagcaagaagatcgatcagaacaagctgaaacctgagatggacgagaagggcaacctgaccaccgccggctttgcctgctctcagtgtggccagcccctgttcgtgtacaagctggagcaggtgtctgagaagggcaaggcttacaccaactacttcggacggtgcaatgtggccgagcacgaaaagctgatcctgctggcccagctgaagcccgagaaggatagcgacgaagccgtgacatatagcctgggaaagtttgggcagagggccctggatttctacagcattcatgtgaccaaggagtccacccaccccgtgaagcccctggcccagatcgccggaaacagatacgcctccggacctgtgggaaaggccctgagcgacgcatgtatgggcacaatcgcctccttcctgtctaagtaccaggacatcatcatcgaacaccagaaggtggtgaagggcaaccagaagagactggagagcctgcgggagctggccggcaaggaaaacctggaataccctagcgtgaccctgccacctcagcctcacaccaaggagggcgttgatgcctacaacgaagtgatcgcccgggtgcgaatgtgggtgaacctgaacctgtggcagaagctgaagctaagcagagatgatgccaagcctctgctgagactgaagggattcccttcctttcctctggtcgagagacaggccaacgaagtggactggtgggacatggtgtgtaacgtgaagaagctgatcaacgagaaaaaggaggatggcaaggtgttttggcagaatctggctggctacaagagacaggaagccctgagaccatacctgagcagcgaggaagatcggaagaagggaaagaaattcgctcggtaccagctgggcgacctgctgctgcacctggaaaagaagcacggcgaggactggggaaaggtgtacgacgaggcctgggagcggattgacaagaaagtggaaggcctgagcaagcacatcaagctggaagaggaacggagaagcgaggacgcccagagcaaggccgccctgaccgactggctgcgggctaaggccagcttcgtgatcgagggcctgaaggaggccgacaaggacgagttctgcagatgcgagctgaagctgcagaagtggtacggggacctgcggggaaagcccttcgccatcgaagccgagaacagcatcctggacatcagcggcttcagcaagcagtacaactgtgccttcatctggcagaaggacggcgtgaagaagctgaacctgtacctgatcatcaactacttcaagggcggcaagctgcggttcaagaagatcaaacctgaagccttcgaagccaacagattctacaccgtgatcaacaaaaagagcggcgagatcgtgcccatggaggtgaacttcaacttcgacgaccccaacctgatcatcctgcctctggcctttggcaagagacagggcagagaattcatctggaacgacctgctgtccctggaaaccggcagcctgaagctggccaacggaagagtgatcgagaagacactgtacaacagaagaacccggcaggatgagcctgccctgttcgtggccctgaccttcgagcggcgggaggtcctggactcctccaatatcaaaccaatgaacctgatcggcgtggcaagaggcgaaaacatccccgccgtgatcgccctgaccgaccccgagggctgcccactgagccggtttaaggatagcctgggaaacccaacccacatcctgagaatcggcgagagctataaggagaagcagcggaccatccaggccaagaaggaggtggagcagcggagagccggcggctacagccggaagtacgccagcaaagccaagaatctggcagacgatatggtgagaaacaccgctagagatctgctgtactacgccgtgacccaggatgccatgctgatcttcgccaacctgagccggggcttcggccggcagggcaagcggaccttcatggccgagagacagtacacacggatggaggactggctgaccgccaagctggcctacgagggcctgagcaagacctacctgtccaagacactggcccagtacacctccaagacatgcagcaactgtgggtttaccatcaccagcgccgactacgacagggtgctggagaagctgaagaagacagcaacaggctggatgaccacaattaacggcaaggagctgaaggtggagggccagattacctactacaacagatacaagagacagaacgtagtcaaggacctgtccgtcgagctggatagactgagcgaagaatctgtgaacaacgacatctcctcctggacaaagggcagaagcggagaagctctgagcctcctgaagaaaagattctcccatagacccgtgcaggagaagttcgtgtgcctgaactgcggcttcgagacacacgcagccgagcaagccgccctgaacatcgccagatcctggctgttcctgcggagccaggagtacaagaaataccagacaaacaagacaaccggcaacaccgataagagagccttcgtcgagacctggcagtccttttaccggaagaagcttaaggaggtgtggaaacctgccgtgcggtctggcggatctggcggaggctcctgtgcaggagcccgtgaccttcaaggacgtggccgtggacttcacccaggaggagtggggccagctggacctggtgcagaggaccctgtacagggacgtgatgctggagacctacggccacctgctgagcgtgggcaaccagatcgccaagcccgaggtgatcagcctgctggagcagggcgaggagccctggagcgtggagcaggcctgcccccagaggaccggccccgagtgggtgaggaacggatctggctccggcagcggccccaagaaaaagagaaaagtctaagctgccttctgcggggcttgccttctggccatgcccttcttctctcccttgcacctgtacctcttggtctttgaataaagcctgagtaggaaggctagcaaaaaaaaaaaaaaaaaaaaaaaaaaaaaaaaaaaaaaaaaaaaaaaaaaaaaaaaaaaaaaaaaaaaaaaaaaaaaaaa

SEQ ID NO: 15658 - RNA, 9485 nt, synthetic construct
  source 1..9485: mol_type = other RNA
aggaaataagagagaaaagaagagtaagaagaaatataagagccaccatggcccctaagaagaagcgtaaagtgagccggatggaacgcctcgtctacgaggtgcggcagaagtgcagaaacatcgaggacatctgcatctcctgcggatctctgaacgtgaccctggagcacccactgttcatcggcggcatgtgccagaactgtaaaaactgttttctggagtgtgcctatcaatacgacgatgacggctaccagagctactgcaccatctgttgcggcggaagagaggtgctgatgtgtggaaataacaactgctgccggtgcttctgcgtggaatgcgtggacctgctggtgggccccggcgccgcccaggccgctattaaggaagatccttggaactgctacatgtgcggccacaagggcacatacggcctgctgagacggagagaggactggcctagcagactgcagatgttcttcgccaataaccacgaccaggagttcgacccccctaaggtgtaccctcccgtccccgccgagaagagaaagcccatccgggtcctgagcctgttcgatggcatcgccaccggtctgctggtgctgaaggacctgggcatccaggtggataggtacattgcctccgaggtgtgcgaggactccatcaccgtgggaatggtgcgtcatcagggcaagatcatgtacgtgggcgacgtgcggagcgtgacacagaagcatatccaggagtggggccctttcgacctggtgatcggcggcagcccttgcaatgacctgagcatcgtgaacccagcccggaagggcctgtacgagggaaccggcagactgttcttcgagttttacagactgctgcacgacgcccggcctaaggaaggcgacgaccggcccttcttttggctgttcgagaatgtggtggccatgggagtcagcgacaagcgggatattagccggttcctggagagcaaccccgtgatgatcgatgccaaggaagtgagcgccgcccaccgggccagatacttctggggcaatctgcctggcatgaacagacccctggccagcaccgtgaacgacaagctggagctgcaggagtgcctggagcacggccggatcgccaagttcagcaaggtgagaaccatcaccacccgaagcaacagcatcaaacaaggcaaggaccagcactttcctgtgttcatgaacgagaaggaggacatcctgtggtgtaccgagatggagagagtgttcgggttcccagtccactacacagatgtcagcaacatgtctagactggccagacagagactgctgggaagaagctggtccgtccctgtgatcagacacctgttcgcccctctgaaggagtacttcgcctgcgtgagcagcggcaacagcaacgccaacagccggggccccagcttctctagcggcctggtgccactgtccctgagagggagccacatgggccccatggagatctacaaaaccgtgagcgcctggaagcggcagcctgtgcgcgtgctgagcctgtttcggaatatcgataaagtcctgaaaagcctgggattcctggagagcggctctggctccggcggtggcaccctgaagtacgtggaggatgtgacaaacgtggtcagacgggatgtggagaagtggggccccttcgatctggtgtacggcagcacccaacccctgggcagctcttgtgaccggtgccctggctggtacatgtttcagttccaccggatcctgcagtacgccctgccgagacaggagtcccagcggccattcttttggattttcatggacaacttgctgctgaccgaggatgaccaggaaactaccactcggttcctgcagaccgaagccgtgaccctgcaggacgtgagaggccgggactaccagaacgccatgcgggtgtggtccaacatccctggactgaaaagcaagcacgcacctctgacccctaaagaagaggagtacctgcaggcccaggtgcggagcagaagcaagctggacgcccctaaggtggatctgctggtgaagaattgcctcctgcccctgagagagtacttcaagtatttcagccagaatagtctgcccctgggaggcagcggcggcggcgccctggtgacatttgaggacgtcgccgtgcggttcacccaggaggaatgggctctgctggatccttctcagaaaatcctgtaccgggacgtgatgagagagacataccggaatctgacctccgtgggcatcaactgggaatgttgggaccttgaagcctgcttcagaagcctgggaagaaacctgagagtgcaggtggtgaagagaaagtgcgagctgaccaacagcggcccctgcgccgagggcggcccaagcagcggcgcccctcctcccagcggcggcagcccagccggctccccaacctctaccgaggagggcacctctgagtccgccacccccgagagcggccctggcacctccaccgagcccagcgagggcagcgcacccggcagccctgccggcagccccacctccacagaggagggaaccagcaccgagcccagcgaaggcagcgccccaggcaccagcaccgagcctagtgagcaggagattaaacggatcaacaagatcagaagaagacttgtgaaagacagcaacaccaagaaggccggcaagacaggccccatgaaaaccctgctggttagagtgatgacacccgatctgagagagcggctggaaaacctgagaaagaagcctgaaaatatcccccagcccatcagcaatacatctagagccaacctgaataagctgctgaccgattacaccgaaatgaagaaggcgatcctgcatgtgtactgggaagagttccagaaggaccctgtgggcctgatgagccgggtggcccagcctgccagcaagaagatcgatcagaacaagctgaaacctgagatggacgagaagggcaacctgaccaccgccggctttgcctgctctcagtgtggccagcccctgttcgtgtacaagctggagcaggtgtctgagaagggcaaggcttacaccaactacttcggacggtgcaatgtggccgagcacgaaaagctgatcctgctggcccagctgaagcccgagaaggatagcgacgaagccgtgacatatagcctgggaaagtttgggcagagggccctggatttctacagcattcatgtgaccaaggagtccacccaccccgtgaagcccctggcccagatcgccggaaacagatacgcctccggacctgtgggaaaggccctgagcgacgcatgtatgggcacaatcgcctccttcctgtctaagtaccaggacatcatcatcgaacaccagaaggtggtgaagggcaaccagaagagactggagagcctgcgggagctggccggcaaggaaaacctggaataccctagcgtgaccctgccacctcagcctcacaccaaggagggcgttgatgcctacaacgaagtgatcgcccgggtgcgaatgtgggtgaacctgaacctgtggcagaagctgaagctaagcagagatgatgccaagcctctgctgagactgaagggattcccttcctttcctctggtcgagagacaggccaacgaagtggactggtgggacatggtgtgtaacgtgaagaagctgatcaacgagaaaaaggaggatggcaaggtgttttggcagaatctggctggctacaagagacaggaagccctgagaccatacctgagcagcgaggaagatcggaagaagggaaagaaattcgctcggtaccagctgggcgacctgctgctgcacctggaaaagaagcacggcgaggactggggaaaggtgtacgacgaggcctgggagcggattgacaagaaagtggaaggcctgagcaagcacatcaagctggaagaggaacggagaagcgaggacgcccagagcaaggccgccctgaccgactggctgcgggctaaggccagcttcgtgatcgagggcctgaaggaggccgacaaggacgagttctgcagatgcgagctgaagctgcagaagtggtacggggacctgcggggaaagcccttcgccatcgaagccgagaacagcatcctggacatcagcggcttcagcaagcagtacaactgtgccttcatctggcagaaggacggcgtgaagaagctgaacctgtacctgatcatcaactacttcaagggcggcaagctgcggttcaagaagatcaaacctgaagccttcgaagccaacagattctacaccgtgatcaacaaaaagagcggcgagatcgtgcccatggaggtgaacttcaacttcgacgaccccaacctgatcatcctgcctctggcctttggcaagagacagggcagagaattcatctggaacgacctgctgtccctggaaaccggcagcctgaagctggccaacggaagagtgatcgagaagacactgtacaacagaagaacccggcaggatgagcctgccctgttcgtggccctgaccttcgagcggcgggaggtcctggactcctccaatatcaaaccaatgaacctgatcggcgtggcaagaggcgaaaacatccccgccgtgatcgccctgaccgaccccgagggctgcccactgagccggtttaaggatagcctgggaaacccaacccacatcctgagaatcggcgagagctataaggagaagcagcggaccatccaggccaagaaggaggtggagcagcggagagccggcggctacagccggaagtacgccagcaaagccaagaatctggcagacgatatggtgagaaacaccgctagagatctgctgtactacgccgtgacccaggatgccatgctgatcttcgccaacctgagccggggcttcggccggcagggcaagcggaccttcatggccgagagacagtacacacggatggaggactggctgaccgccaagctggcctacgagggcctgagcaagacctacctgtccaagacactggcccagtacacctccaagacatgcagcaactgtgggtttaccatcaccagcgccgactacgacagggtgctggagaagctgaagaagacagcaacaggctggatgaccacaattaacggcaaggagctgaaggtggagggccagattacctactacaacagatacaagagacagaacgtagtcaaggacctgtccgtcgagctggatagactgagcgaagaatctgtgaacaacgacatctcctcctggacaaagggcagaagcggagaagctctgagcctcctgaagaaaagattctcccatagacccgtgcaggagaagttcgtgtgcctgaactgcggcttcgagacacacgcagccgagcaagccgccctgaacatcgccagatcctggctgttcctgcggagccaggagtacaagaaataccagacaaacaagacaaccggcaacaccgataagagagccttcgtcgagacctggcagtccttttaccggaagaagcttaaggaggtgtggaaacctgccgtgcggtctggcggatctggcggaggctccttccaggagagcgtggccttcgaggacgtggccgtgtacttcacccagaaccagtggggcagcctggaccccgcccagagggccctgtacagcgaggtgatgctggagaactacgccaacgtggccagcctggccttccccttccccaagcccgccctgatcagccacctggagaagggcgaggccccctggggccccgacccctgggacgccgagatccccagcggcatcaaccagggcggcggcggcccaagcagcggcgcccctcctcccagcggcggcagcccagccggctccccaacctctaccgaggagggcacctctgagtccgccacccccgagagcggccctggcacctccaccgagcccagcgagggcagcgcacccggcagccctgccggcagccccacctccacagaggagggaaccagcaccgagcccagcgaaggcagcgccccaggcaccagcaccgagcctagtgagcaggagattaaacggatcaacaagatcagaagaagacttgtgaaagacagcaacaccaagaaggccggcaagacaggccccatgaaaaccctgctggttagagtgatgacacccgatctgagagagcggctggaaaacctgagaaagaagcctgaaaatatcccccagcccatcagcaatacatctagagccaacctgaataagctgctgaccgattacaccgaaatgaagaaggcgatcctgcatgtgtactgggaagagttccagaaggaccctgtgggcctgatgagccgggtggcccagcctgccagcaagaagatcgatcagaacaagctgaaacctgagatggacgagaagggcaacctgaccaccgccggctttgcctgctctcagtgtggccagcccctgttcgtgtacaagctggagcaggtgtctgagaagggcaaggcttacaccaactacttcggacggtgcaatgtggccgagcacgaaaagctgatcctgctggcccagctgaagcccgagaaggatagcgacgaagccgtgacatatagcctgggaaagtttgggcagagggccctggatttctacagcattcatgtgaccaaggagtccacccaccccgtgaagcccctggcccagatcgccggaaacagatacgcctccggacctgtgggaaaggccctgagcgacgcatgtatgggcacaatcgcctccttcctgtctaagtaccaggacatcatcatcgaacaccagaaggtggtgaagggcaaccagaagagactggagagcctgcgggagctggccggcaaggaaaacctggaataccctagcgtgaccctgccacctcagcctcacaccaaggagggcgttgatgcctacaacgaagtgatcgcccgggtgcgaatgtgggtgaacctgaacctgtggcagaagctgaagctaagcagagatgatgccaagcctctgctgagactgaagggattcccttcctttcctctggtcgagagacaggccaacgaagtggactggtgggacatggtgtgtaacgtgaagaagctgatcaacgagaaaaaggaggatggcaaggtgttttggcagaatctggctggctacaagagacaggaagccctgagaccatacctgagcagcgaggaagatcggaagaagggaaagaaattcgctcggtaccagctgggcgacctgctgctgcacctggaaaagaagcacggcgaggactggggaaaggtgtacgacgaggcctgggagcggattgacaagaaagtggaaggcctgagcaagcacatcaagctggaagaggaacggagaagcgaggacgcccagagcaaggccgccctgaccgactggctgcgggctaaggccagcttcgtgatcgagggcctgaaggaggccgacaaggacgagttctgcagatgcgagctgaagctgcagaagtggtacggggacctgcggggaaagcccttcgccatcgaagccgagaacagcatcctggacatcagcggcttcagcaagcagtacaactgtgccttcatctggcagaaggacggcgtgaagaagctgaacctgtacctgatcatcaactacttcaagggcggcaagctgcggttcaagaagatcaaacctgaagccttcgaagccaacagattctacaccgtgatcaacaaaaagagcggcgagatcgtgcccatggaggtgaacttcaacttcgacgaccccaacctgatcatcctgcctctggcctttggcaagagacagggcagagaattcatctggaacgacctgctgtccctggaaaccggcagcctgaagctggccaacggaagagtgatcgagaagacactgtacaacagaagaacccggcaggatgagcctgccctgttcgtggccctgaccttcgagcggcgggaggtcctggactcctccaatatcaaaccaatgaacctgatcggcgtggcaagaggcgaaaacatccccgccgtgatcgccctgaccgaccccgagggctgcccactgagccggtttaaggatagcctgggaaacccaacccacatcctgagaatcggcgagagctataaggagaagcagcggaccatccaggccaagaaggaggtggagcagcggagagccggcggctacagccggaagtacgccagcaaagccaagaatctggcagacgatatggtgagaaacaccgctagagatctgctgtactacgccgtgacccaggatgccatgctgatcttcgccaacctgagccggggcttcggccggcagggcaagcggaccttcatggccgagagacagtacacacggatggaggactggctgaccgccaagctggcctacgagggcctgagcaagacctacctgtccaagacactggcccagtacacctccaagacatgcagcaactgtgggtttaccatcaccagcgccgactacgacagggtgctggagaagctgaagaagacagcaacaggctggatgaccacaattaacggcaaggagctgaaggtggagggccagattacctactacaacagatacaagagacagaacgtagtcaaggacctgtccgtcgagctggatagactgagcgaagaatctgtgaacaacgacatctcctcctggacaaagggcagaagcggagaagctctgagcctcctgaagaaaagattctcccatagacccgtgcaggagaagttcgtgtgcctgaactgcggcttcgagacacacgcagccgagcaagccgccctgaacatcgccagatcctggctgttcctgcggagccaggagtacaagaaataccagacaaacaagacaaccggcaacaccgataagagagccttcgtcgagacctggcagtccttttaccggaagaagcttaaggaggtgtggaaacctgccgtgcggtctggcggatctggcggaggctcctttccaggagagcgtggccttcgaggacgtggccgtgtacttcacccagaaccagtggggcagcctggaccccgcccagagggccctgtacagcgaggtgatgctggagaactacgccaacgtggccagcctggccttccccttccccaagcccgccctgatcagccacctggagaagggcgaggccccctggggccccgacccctgggacgccgagatccccagcggcatcaaccagggcggcggatctggctccggcagcggccccaagaaaaagagaaaagtctaagctgccttctgcggggcttgccttctggccatgcccttcttctctcccttgcacctgtacctcttggtctttgaataaagcctgagtaggaaggctagcaaaaaaaaaaaaaaaaaaaaaaaaaaaaaaaaaaaaaaaaaaaaaaaaaaaaaaaaaaaaaaaaaaaaaaaaaaaaaaaa

SEQ ID NO: 15659 - RNA, 9485 nt, synthetic construct
  source 1..9485: mol_type = other RNA
aggaaataagagagaaaagaagagtaagaagaaatataagagccaccatggcccctaagaagaagcgtaaagtgagccggatggaacgcctcgtctacgaggtgcggcagaagtgcagaaacatcgaggacatctgcatctcctgcggatctctgaacgtgaccctggagcacccactgttcatcggcggcatgtgccagaactgtaaaaactgttttctggagtgtgcctatcaatacgacgatgacggctaccagagctactgcaccatctgttgcggcggaagagaggtgctgatgtgtggaaataacaactgctgccggtgcttctgcgtggaatgcgtggacctgctggtgggccccggcgccgcccaggccgctattaaggaagatccttggaactgctacatgtgcggccacaagggcacatacggcctgctgagacggagagaggactggcctagcagactgcagatgttcttcgccaataaccacgaccaggagttcgacccccctaaggtgtaccctcccgtccccgccgagaagagaaagcccatccgggtcctgagcctgttcgatggcatcgccaccggtctgctggtgctgaaggacctgggcatccaggtggataggtacattgcctccgaggtgtgcgaggactccatcaccgtgggaatggtgcgtcatcagggcaagatcatgtacgtgggcgacgtgcggagcgtgacacagaagcatatccaggagtggggccctttcgacctggtgatcggcggcagcccttgcaatgacctgagcatcgtgaacccagcccggaagggcctgtacgagggaaccggcagactgttcttcgagttttacagactgctgcacgacgcccggcctaaggaaggcgacgaccggcccttcttttggctgttcgagaatgtggtggccatgggagtcagcgacaagcgggatattagccggttcctggagagcaaccccgtgatgatcgatgccaaggaagtgagcgccgcccaccgggccagatacttctggggcaatctgcctggcatgaacagacccctggccagcaccgtgaacgacaagctggagctgcaggagtgcctggagcacggccggatcgccaagttcagcaaggtgagaaccatcaccacccgaagcaacagcatcaaacaaggcaaggaccagcactttcctgtgttcatgaacgagaaggaggacatcctgtggtgtaccgagatggagagagtgttcgggttcccagtccactacacagatgtcagcaacatgtctagactggccagacagagactgctgggaagaagctggtccgtccctgtgatcagacacctgttcgcccctctgaaggagtacttcgcctgcgtgagcagcggcaacagcaacgccaacagccggggccccagcttctctagcggcctggtgccactgtccctgagagggagccacatgggccccatggagatctacaaaaccgtgagcgcctggaagcggcagcctgtgcgcgtgctgagcctgtttcggaatatcgataaagtcctgaaaagcctgggattcctggagagcggctctggctccggcggtggcaccctgaagtacgtggaggatgtgacaaacgtggtcagacgggatgtggagaagtggggccccttcgatctggtgtacggcagcacccaacccctgggcagctcttgtgaccggtgccctggctggtacatgtttcagttccaccggatcctgcagtacgccctgccgagacaggagtcccagcggccattcttttggattttcatggacaacttgctgctgaccgaggatgaccaggaaactaccactcggttcctgcagaccgaagccgtgaccctgcaggacgtgagaggccgggactaccagaacgccatgcgggtgtggtccaacatccctggactgaaaagcaagcacgcacctctgacccctaaagaagaggagtacctgcaggcccaggtgcggagcagaagcaagctggacgcccctaaggtggatctgctggtgaagaattgcctcctgcccctgagagagtacttcaagtatttcagccagaatagtctgcccctgggaggcagcggcggcggcgccctggtgacatttgaggacgtcgccgtgcggttcacccaggaggaatgggctctgctggatccttctcagaaaatcctgtaccgggacgtgatgagagagacataccggaatctgacctccgtgggcatcaactgggaatgttgggaccttgaagcctgcttcagaagcctgggaagaaacctgagagtgcaggtggtgaagagaaagtgcgagctgaccaacagcggcccctgcgccgagggcggcccaagcagcggcgcccctcctcccagcggcggcagcccagccggctccccaacctctaccgaggagggcacctctgagtccgccacccccgagagcggccctggcacctccaccgagcccagcgagggcagcgcacccggcagccctgccggcagccccacctccacagaggagggaaccagcaccgagcccagcgaaggcagcgccccaggcaccagcaccgagcctagtgagcaggagattaaacggatcaacaagatcagaagaagacttgtgaaagacagcaacaccaagaaggccggcaagacaggccccatgaaaaccctgctggttagagtgatgacacccgatctgagagagcggctggaaaacctgagaaagaagcctgaaaatatcccccagcccatcagcaatacatctagagccaacctgaataagctgctgaccgattacaccgaaatgaagaaggcgatcctgcatgtgtactgggaagagttccagaaggaccctgtgggcctgatgagccgggtggcccagcctgccagcaagaagatcgatcagaacaagctgaaacctgagatggacgagaagggcaacctgaccaccgccggctttgcctgctctcagtgtggccagcccctgttcgtgtacaagctggagcaggtgtctgagaagggcaaggcttacaccaactacttcggacggtgcaatgtggccgagcacgaaaagctgatcctgctggcccagctgaagcccgagaaggatagcgacgaagccgtgacatatagcctgggaaagtttgggcagagggccctggatttctacagcattcatgtgaccaaggagtccacccaccccgtgaagcccctggcccagatcgccggaaacagatacgcctccggacctgtgggaaaggccctgagcgacgcatgtatgggcacaatcgcctccttcctgtctaagtaccaggacatcatcatcgaacaccagaaggtggtgaagggcaaccagaagagactggagagcctgcgggagctggccggcaaggaaaacctggaataccctagcgtgaccctgccacctcagcctcacaccaaggagggcgttgatgcctacaacgaagtgatcgcccgggtgcgaatgtgggtgaacctgaacctgtggcagaagctgaagctaagcagagatgatgccaagcctctgctgagactgaagggattcccttcctttcctctggtcgagagacaggccaacgaagtggactggtgggacatggtgtgtaacgtgaagaagctgatcaacgagaaaaaggaggatggcaaggtgttttggcagaatctggctggctacaagagacaggaagccctgagaccatacctgagcagcgaggaagatcggaagaagggaaagaaattcgctcggtaccagctgggcgacctgctgctgcacctggaaaagaagcacggcgaggactggggaaaggtgtacgacgaggcctgggagcggattgacaagaaagtggaaggcctgagcaagcacatcaagctggaagaggaacggagaagcgaggacgcccagagcaaggccgccctgaccgactggctgcgggctaaggccagcttcgtgatcgagggcctgaaggaggccgacaaggacgagttctgcagatgcgagctgaagctgcagaagtggtacggggacctgcggggaaagcccttcgccatcgaagccgagaacagcatcctggacatcagcggcttcagcaagcagtacaactgtgccttcatctggcagaaggacggcgtgaagaagctgaacctgtacctgatcatcaactacttcaagggcggcaagctgcggttcaagaagatcaaacctgaagccttcgaagccaacagattctacaccgtgatcaacaaaaagagcggcgagatcgtgcccatggaggtgaacttcaacttcgacgaccccaacctgatcatcctgcctctggcctttggcaagagacagggcagagaattcatctggaacgacctgctgtccctggaaaccggcagcctgaagctggccaacggaagagtgatcgagaagacactgtacaacagaagaacccggcaggatgagcctgccctgttcgtggccctgaccttcgagcggcgggaggtcctggactcctccaatatcaaaccaatgaacctgatcggcgtggcaagaggcgaaaacatccccgccgtgatcgccctgaccgaccccgagggctgcccactgagccggtttaaggatagcctgggaaacccaacccacatcctgagaatcggcgagagctataaggagaagcagcggaccatccaggccaagaaggaggtggagcagcggagagccggcggctacagccggaagtacgccagcaaagccaagaatctggcagacgatatggtgagaaacaccgctagagatctgctgtactacgccgtgacccaggatgccatgctgatcttcgccaacctgagccggggcttcggccggcagggcaagcggaccttcatggccgagagacagtacacacggatggaggactggctgaccgccaagctggcctacgagggcctgagcaagacctacctgtccaagacactggcccagtacacctccaagacatgcagcaactgtgggtttaccatcaccagcgccgactacgacagggtgctggagaagctgaagaagacagcaacaggctggatgaccacaattaacggcaaggagctgaaggtggagggccagattacctactacaacagatacaagagacagaacgtagtcaaggacctgtccgtcgagctggatagactgagcgaagaatctgtgaacaacgacatctcctcctggacaaagggcagaagcggagaagctctgagcctcctgaagaaaagattctcccatagacccgtgcaggagaagttcgtgtgcctgaactgcggcttcgagacacacgcagccgagcaagccgccctgaacatcgccagatcctggctgttcctgcggagccaggagtacaagaaataccagacaaacaagacaaccggcaacaccgataagagagccttcgtcgagacctggcagtccttttaccggaagaagcttaaggaggtgtggaaacctgccgtgcggtctggcggatctggcggaggctccatggacgccgtgacctacgacgacgtgcacatcaacttcaccctggaggagtgggccctgctgaaccccagccagaagagcctgtacaaggacgtgatgctggacacctacaggaacctgaccgccatcggctacagctgggacgaccacaacatcgaggagatctgccagagcagcaggagccacaggaggcacctgcagaggcacgccaagatcaacaccggcgagaagccctacggcagcggcggcccaagcagcggcgcccctcctcccagcggcggcagcccagccggctccccaacctctaccgaggagggcacctctgagtccgccacccccgagagcggccctggcacctccaccgagcccagcgagggcagcgcacccggcagccctgccggcagccccacctccacagaggagggaaccagcaccgagcccagcgaaggcagcgccccaggcaccagcaccgagcctagtgagcaggagattaaacggatcaacaagatcagaagaagacttgtgaaagacagcaacaccaagaaggccggcaagacaggccccatgaaaaccctgctggttagagtgatgacacccgatctgagagagcggctggaaaacctgagaaagaagcctgaaaatatcccccagcccatcagcaatacatctagagccaacctgaataagctgctgaccgattacaccgaaatgaagaaggcgatcctgcatgtgtactgggaagagttccagaaggaccctgtgggcctgatgagccgggtggcccagcctgccagcaagaagatcgatcagaacaagctgaaacctgagatggacgagaagggcaacctgaccaccgccggctttgcctgctctcagtgtggccagcccctgttcgtgtacaagctggagcaggtgtctgagaagggcaaggcttacaccaactacttcggacggtgcaatgtggccgagcacgaaaagctgatcctgctggcccagctgaagcccgagaaggatagcgacgaagccgtgacatatagcctgggaaagtttgggcagagggccctggatttctacagcattcatgtgaccaaggagtccacccaccccgtgaagcccctggcccagatcgccggaaacagatacgcctccggacctgtgggaaaggccctgagcgacgcatgtatgggcacaatcgcctccttcctgtctaagtaccaggacatcatcatcgaacaccagaaggtggtgaagggcaaccagaagagactggagagcctgcgggagctggccggcaaggaaaacctggaataccctagcgtgaccctgccacctcagcctcacaccaaggagggcgttgatgcctacaacgaagtgatcgcccgggtgcgaatgtgggtgaacctgaacctgtggcagaagctgaagctaagcagagatgatgccaagcctctgctgagactgaagggattcccttcctttcctctggtcgagagacaggccaacgaagtggactggtgggacatggtgtgtaacgtgaagaagctgatcaacgagaaaaaggaggatggcaaggtgttttggcagaatctggctggctacaagagacaggaagccctgagaccatacctgagcagcgaggaagatcggaagaagggaaagaaattcgctcggtaccagctgggcgacctgctgctgcacctggaaaagaagcacggcgaggactggggaaaggtgtacgacgaggcctgggagcggattgacaagaaagtggaaggcctgagcaagcacatcaagctggaagaggaacggagaagcgaggacgcccagagcaaggccgccctgaccgactggctgcgggctaaggccagcttcgtgatcgagggcctgaaggaggccgacaaggacgagttctgcagatgcgagctgaagctgcagaagtggtacggggacctgcggggaaagcccttcgccatcgaagccgagaacagcatcctggacatcagcggcttcagcaagcagtacaactgtgccttcatctggcagaaggacggcgtgaagaagctgaacctgtacctgatcatcaactacttcaagggcggcaagctgcggttcaagaagatcaaacctgaagccttcgaagccaacagattctacaccgtgatcaacaaaaagagcggcgagatcgtgcccatggaggtgaacttcaacttcgacgaccccaacctgatcatcctgcctctggcctttggcaagagacagggcagagaattcatctggaacgacctgctgtccctggaaaccggcagcctgaagctggccaacggaagagtgatcgagaagacactgtacaacagaagaacccggcaggatgagcctgccctgttcgtggccctgaccttcgagcggcgggaggtcctggactcctccaatatcaaaccaatgaacctgatcggcgtggcaagaggcgaaaacatccccgccgtgatcgccctgaccgaccccgagggctgcccactgagccggtttaaggatagcctgggaaacccaacccacatcctgagaatcggcgagagctataaggagaagcagcggaccatccaggccaagaaggaggtggagcagcggagagccggcggctacagccggaagtacgccagcaaagccaagaatctggcagacgatatggtgagaaacaccgctagagatctgctgtactacgccgtgacccaggatgccatgctgatcttcgccaacctgagccggggcttcggccggcagggcaagcggaccttcatggccgagagacagtacacacggatggaggactggctgaccgccaagctggcctacgagggcctgagcaagacctacctgtccaagacactggcccagtacacctccaagacatgcagcaactgtgggtttaccatcaccagcgccgactacgacagggtgctggagaagctgaagaagacagcaacaggctggatgaccacaattaacggcaaggagctgaaggtggagggccagattacctactacaacagatacaagagacagaacgtagtcaaggacctgtccgtcgagctggatagactgagcgaagaatctgtgaacaacgacatctcctcctggacaaagggcagaagcggagaagctctgagcctcctgaagaaaagattctcccatagacccgtgcaggagaagttcgtgtgcctgaactgcggcttcgagacacacgcagccgagcaagccgccctgaacatcgccagatcctggctgttcctgcggagccaggagtacaagaaataccagacaaacaagacaaccggcaacaccgataagagagccttcgtcgagacctggcagtccttttaccggaagaagcttaaggaggtgtggaaacctgccgtgcggtctggcggatctggcggaggctcctatggacgccgtgacctacgacgacgtgcacatcaacttcaccctggaggagtgggccctgctgaaccccagccagaagagcctgtacaaggacgtgatgctggacacctacaggaacctgaccgccatcggctacagctgggacgaccacaacatcgaggagatctgccagagcagcaggagccacaggaggcacctgcagaggcacgccaagatcaacaccggcgagaagccctacggcagcggatctggctccggcagcggccccaagaaaaagagaaaagtctaagctgccttctgcggggcttgccttctggccatgcccttcttctctcccttgcacctgtacctcttggtctttgaataaagcctgagtaggaaggctagcaaaaaaaaaaaaaaaaaaaaaaaaaaaaaaaaaaaaaaaaaaaaaaaaaaaaaaaaaaaaaaaaaaaaaaaaaaaaaaaa

SEQ ID NO: 15660 - RNA, 9485 nt, synthetic construct
  source 1..9485: mol_type = other RNA
aggaaataagagagaaaagaagagtaagaagaaatataagagccaccatggcccctaagaagaagcgtaaagtgagccggatggaacgcctcgtctacgaggtgcggcagaagtgcagaaacatcgaggacatctgcatctcctgcggatctctgaacgtgaccctggagcacccactgttcatcggcggcatgtgccagaactgtaaaaactgttttctggagtgtgcctatcaatacgacgatgacggctaccagagctactgcaccatctgttgcggcggaagagaggtgctgatgtgtggaaataacaactgctgccggtgcttctgcgtggaatgcgtggacctgctggtgggccccggcgccgcccaggccgctattaaggaagatccttggaactgctacatgtgcggccacaagggcacatacggcctgctgagacggagagaggactggcctagcagactgcagatgttcttcgccaataaccacgaccaggagttcgacccccctaaggtgtaccctcccgtccccgccgagaagagaaagcccatccgggtcctgagcctgttcgatggcatcgccaccggtctgctggtgctgaaggacctgggcatccaggtggataggtacattgcctccgaggtgtgcgaggactccatcaccgtgggaatggtgcgtcatcagggcaagatcatgtacgtgggcgacgtgcggagcgtgacacagaagcatatccaggagtggggccctttcgacctggtgatcggcggcagcccttgcaatgacctgagcatcgtgaacccagcccggaagggcctgtacgagggaaccggcagactgttcttcgagttttacagactgctgcacgacgcccggcctaaggaaggcgacgaccggcccttcttttggctgttcgagaatgtggtggccatgggagtcagcgacaagcgggatattagccggttcctggagagcaaccccgtgatgatcgatgccaaggaagtgagcgccgcccaccgggccagatacttctggggcaatctgcctggcatgaacagacccctggccagcaccgtgaacgacaagctggagctgcaggagtgcctggagcacggccggatcgccaagttcagcaaggtgagaaccatcaccacccgaagcaacagcatcaaacaaggcaaggaccagcactttcctgtgttcatgaacgagaaggaggacatcctgtggtgtaccgagatggagagagtgttcgggttcccagtccactacacagatgtcagcaacatgtctagactggccagacagagactgctgggaagaagctggtccgtccctgtgatcagacacctgttcgcccctctgaaggagtacttcgcctgcgtgagcagcggcaacagcaacgccaacagccggggccccagcttctctagcggcctggtgccactgtccctgagagggagccacatgggccccatggagatctacaaaaccgtgagcgcctggaagcggcagcctgtgcgcgtgctgagcctgtttcggaatatcgataaagtcctgaaaagcctgggattcctggagagcggctctggctccggcggtggcaccctgaagtacgtggaggatgtgacaaacgtggtcagacgggatgtggagaagtggggccccttcgatctggtgtacggcagcacccaacccctgggcagctcttgtgaccggtgccctggctggtacatgtttcagttccaccggatcctgcagtacgccctgccgagacaggagtcccagcggccattcttttggattttcatggacaacttgctgctgaccgaggatgaccaggaaactaccactcggttcctgcagaccgaagccgtgaccctgcaggacgtgagaggccgggactaccagaacgccatgcgggtgtggtccaacatccctggactgaaaagcaagcacgcacctctgacccctaaagaagaggagtacctgcaggcccaggtgcggagcagaagcaagctggacgcccctaaggtggatctgctggtgaagaattgcctcctgcccctgagagagtacttcaagtatttcagccagaatagtctgcccctgggaggcagcggcggcggcgccctggtgacatttgaggacgtcgccgtgcggttcacccaggaggaatgggctctgctggatccttctcagaaaatcctgtaccgggacgtgatgagagagacataccggaatctgacctccgtgggcatcaactgggaatgttgggaccttgaagcctgcttcagaagcctgggaagaaacctgagagtgcaggtggtgaagagaaagtgcgagctgaccaacagcggcccctgcgccgagggcggcccaagcagcggcgcccctcctcccagcggcggcagcccagccggctccccaacctctaccgaggagggcacctctgagtccgccacccccgagagcggccctggcacctccaccgagcccagcgagggcagcgcacccggcagccctgccggcagccccacctccacagaggagggaaccagcaccgagcccagcgaaggcagcgccccaggcaccagcaccgagcctagtgagcaggagattaaacggatcaacaagatcagaagaagacttgtgaaagacagcaacaccaagaaggccggcaagacaggccccatgaaaaccctgctggttagagtgatgacacccgatctgagagagcggctggaaaacctgagaaagaagcctgaaaatatcccccagcccatcagcaatacatctagagccaacctgaataagctgctgaccgattacaccgaaatgaagaaggcgatcctgcatgtgtactgggaagagttccagaaggaccctgtgggcctgatgagccgggtggcccagcctgccagcaagaagatcgatcagaacaagctgaaacctgagatggacgagaagggcaacctgaccaccgccggctttgcctgctctcagtgtggccagcccctgttcgtgtacaagctggagcaggtgtctgagaagggcaaggcttacaccaactacttcggacggtgcaatgtggccgagcacgaaaagctgatcctgctggcccagctgaagcccgagaaggatagcgacgaagccgtgacatatagcctgggaaagtttgggcagagggccctggatttctacagcattcatgtgaccaaggagtccacccaccccgtgaagcccctggcccagatcgccggaaacagatacgcctccggacctgtgggaaaggccctgagcgacgcatgtatgggcacaatcgcctccttcctgtctaagtaccaggacatcatcatcgaacaccagaaggtggtgaagggcaaccagaagagactggagagcctgcgggagctggccggcaaggaaaacctggaataccctagcgtgaccctgccacctcagcctcacaccaaggagggcgttgatgcctacaacgaagtgatcgcccgggtgcgaatgtgggtgaacctgaacctgtggcagaagctgaagctaagcagagatgatgccaagcctctgctgagactgaagggattcccttcctttcctctggtcgagagacaggccaacgaagtggactggtgggacatggtgtgtaacgtgaagaagctgatcaacgagaaaaaggaggatggcaaggtgttttggcagaatctggctggctacaagagacaggaagccctgagaccatacctgagcagcgaggaagatcggaagaagggaaagaaattcgctcggtaccagctgggcgacctgctgctgcacctggaaaagaagcacggcgaggactggggaaaggtgtacgacgaggcctgggagcggattgacaagaaagtggaaggcctgagcaagcacatcaagctggaagaggaacggagaagcgaggacgcccagagcaaggccgccctgaccgactggctgcgggctaaggccagcttcgtgatcgagggcctgaaggaggccgacaaggacgagttctgcagatgcgagctgaagctgcagaagtggtacggggacctgcggggaaagcccttcgccatcgaagccgagaacagcatcctggacatcagcggcttcagcaagcagtacaactgtgccttcatctggcagaaggacggcgtgaagaagctgaacctgtacctgatcatcaactacttcaagggcggcaagctgcggttcaagaagatcaaacctgaagccttcgaagccaacagattctacaccgtgatcaacaaaaagagcggcgagatcgtgcccatggaggtgaacttcaacttcgacgaccccaacctgatcatcctgcctctggcctttggcaagagacagggcagagaattcatctggaacgacctgctgtccctggaaaccggcagcctgaagctggccaacggaagagtgatcgagaagacactgtacaacagaagaacccggcaggatgagcctgccctgttcgtggccctgaccttcgagcggcgggaggtcctggactcctccaatatcaaaccaatgaacctgatcggcgtggcaagaggcgaaaacatccccgccgtgatcgccctgaccgaccccgagggctgcccactgagccggtttaaggatagcctgggaaacccaacccacatcctgagaatcggcgagagctataaggagaagcagcggaccatccaggccaagaaggaggtggagcagcggagagccggcggctacagccggaagtacgccagcaaagccaagaatctggcagacgatatggtgagaaacaccgctagagatctgctgtactacgccgtgacccaggatgccatgctgatcttcgccaacctgagccggggcttcggccggcagggcaagcggaccttcatggccgagagacagtacacacggatggaggactggctgaccgccaagctggcctacgagggcctgagcaagacctacctgtccaagacactggcccagtacacctccaagacatgcagcaactgtgggtttaccatcaccagcgccgactacgacagggtgctggagaagctgaagaagacagcaacaggctggatgaccacaattaacggcaaggagctgaaggtggagggccagattacctactacaacagatacaagagacagaacgtagtcaaggacctgtccgtcgagctggatagactgagcgaagaatctgtgaacaacgacatctcctcctggacaaagggcagaagcggagaagctctgagcctcctgaagaaaagattctcccatagacccgtgcaggagaagttcgtgtgcctgaactgcggcttcgagacacacgcagccgagcaagccgccctgaacatcgccagatcctggctgttcctgcggagccaggagtacaagaaataccagacaaacaagacaaccggcaacaccgataagagagccttcgtcgagacctggcagtccttttaccggaagaagcttaaggaggtgtggaaacctgccgtgcggtctggcggatctggcggaggctccagccaggaggccgtgaccttcgaggacgtggccgtgtacttcacccagaaccagtgggccagcctggagcccgcccagaaggccctgtaccaggaggtgatgctggagaactacgccaacatcaccagcctggccgccctgcccttccccaagcccgacctgatcttccagctggagctgggcgaggccccctgggtgcccgacagctggaggcccgtgggcgaggaggccctgggcggcaggggcggcccaagcagcggcgcccctcctcccagcggcggcagcccagccggctccccaacctctaccgaggagggcacctctgagtccgccacccccgagagcggccctggcacctccaccgagcccagcgagggcagcgcacccggcagccctgccggcagccccacctccacagaggagggaaccagcaccgagcccagcgaaggcagcgccccaggcaccagcaccgagcctagtgagcaggagattaaacggatcaacaagatcagaagaagacttgtgaaagacagcaacaccaagaaggccggcaagacaggccccatgaaaaccctgctggttagagtgatgacacccgatctgagagagcggctggaaaacctgagaaagaagcctgaaaatatcccccagcccatcagcaatacatctagagccaacctgaataagctgctgaccgattacaccgaaatgaagaaggcgatcctgcatgtgtactgggaagagttccagaaggaccctgtgggcctgatgagccgggtggcccagcctgccagcaagaagatcgatcagaacaagctgaaacctgagatggacgagaagggcaacctgaccaccgccggctttgcctgctctcagtgtggccagcccctgttcgtgtacaagctggagcaggtgtctgagaagggcaaggcttacaccaactacttcggacggtgcaatgtggccgagcacgaaaagctgatcctgctggcccagctgaagcccgagaaggatagcgacgaagccgtgacatatagcctgggaaagtttgggcagagggccctggatttctacagcattcatgtgaccaaggagtccacccaccccgtgaagcccctggcccagatcgccggaaacagatacgcctccggacctgtgggaaaggccctgagcgacgcatgtatgggcacaatcgcctccttcctgtctaagtaccaggacatcatcatcgaacaccagaaggtggtgaagggcaaccagaagagactggagagcctgcgggagctggccggcaaggaaaacctggaataccctagcgtgaccctgccacctcagcctcacaccaaggagggcgttgatgcctacaacgaagtgatcgcccgggtgcgaatgtgggtgaacctgaacctgtggcagaagctgaagctaagcagagatgatgccaagcctctgctgagactgaagggattcccttcctttcctctggtcgagagacaggccaacgaagtggactggtgggacatggtgtgtaacgtgaagaagctgatcaacgagaaaaaggaggatggcaaggtgttttggcagaatctggctggctacaagagacaggaagccctgagaccatacctgagcagcgaggaagatcggaagaagggaaagaaattcgctcggtaccagctgggcgacctgctgctgcacctggaaaagaagcacggcgaggactggggaaaggtgtacgacgaggcctgggagcggattgacaagaaagtggaaggcctgagcaagcacatcaagctggaagaggaacggagaagcgaggacgcccagagcaaggccgccctgaccgactggctgcgggctaaggccagcttcgtgatcgagggcctgaaggaggccgacaaggacgagttctgcagatgcgagctgaagctgcagaagtggtacggggacctgcggggaaagcccttcgccatcgaagccgagaacagcatcctggacatcagcggcttcagcaagcagtacaactgtgccttcatctggcagaaggacggcgtgaagaagctgaacctgtacctgatcatcaactacttcaagggcggcaagctgcggttcaagaagatcaaacctgaagccttcgaagccaacagattctacaccgtgatcaacaaaaagagcggcgagatcgtgcccatggaggtgaacttcaacttcgacgaccccaacctgatcatcctgcctctggcctttggcaagagacagggcagagaattcatctggaacgacctgctgtccctggaaaccggcagcctgaagctggccaacggaagagtgatcgagaagacactgtacaacagaagaacccggcaggatgagcctgccctgttcgtggccctgaccttcgagcggcgggaggtcctggactcctccaatatcaaaccaatgaacctgatcggcgtggcaagaggcgaaaacatccccgccgtgatcgccctgaccgaccccgagggctgcccactgagccggtttaaggatagcctgggaaacccaacccacatcctgagaatcggcgagagctataaggagaagcagcggaccatccaggccaagaaggaggtggagcagcggagagccggcggctacagccggaagtacgccagcaaagccaagaatctggcagacgatatggtgagaaacaccgctagagatctgctgtactacgccgtgacccaggatgccatgctgatcttcgccaacctgagccggggcttcggccggcagggcaagcggaccttcatggccgagagacagtacacacggatggaggactggctgaccgccaagctggcctacgagggcctgagcaagacctacctgtccaagacactggcccagtacacctccaagacatgcagcaactgtgggtttaccatcaccagcgccgactacgacagggtgctggagaagctgaagaagacagcaacaggctggatgaccacaattaacggcaaggagctgaaggtggagggccagattacctactacaacagatacaagagacagaacgtagtcaaggacctgtccgtcgagctggatagactgagcgaagaatctgtgaacaacgacatctcctcctggacaaagggcagaagcggagaagctctgagcctcctgaagaaaagattctcccatagacccgtgcaggagaagttcgtgtgcctgaactgcggcttcgagacacacgcagccgagcaagccgccctgaacatcgccagatcctggctgttcctgcggagccaggagtacaagaaataccagacaaacaagacaaccggcaacaccgataagagagccttcgtcgagacctggcagtccttttaccggaagaagcttaaggaggtgtggaaacctgccgtgcggtctggcggatctggcggaggctcctagccaggaggccgtgaccttcgaggacgtggccgtgtacttcacccagaaccagtgggccagcctggagcccgcccagaaggccctgtaccaggaggtgatgctggagaactacgccaacatcaccagcctggccgccctgcccttccccaagcccgacctgatcttccagctggagctgggcgaggccccctgggtgcccgacagctggaggcccgtgggcgaggaggccctgggcggcaggggatctggctccggcagcggccccaagaaaaagagaaaagtctaagctgccttctgcggggcttgccttctggccatgcccttcttctctcccttgcacctgtacctcttggtctttgaataaagcctgagtaggaaggctagcaaaaaaaaaaaaaaaaaaaaaaaaaaaaaaaaaaaaaaaaaaaaaaaaaaaaaaaaaaaaaaaaaaaaaaaaaaaaaaaa

SEQ ID NO: 15661 - RNA, 9485 nt, synthetic construct
  source 1..9485: mol_type = other RNA
aggaaataagagagaaaagaagagtaagaagaaatataagagccaccatggcccctaagaagaagcgtaaagtgagccggatggaacgcctcgtctacgaggtgcggcagaagtgcagaaacatcgaggacatctgcatctcctgcggatctctgaacgtgaccctggagcacccactgttcatcggcggcatgtgccagaactgtaaaaactgttttctggagtgtgcctatcaatacgacgatgacggctaccagagctactgcaccatctgttgcggcggaagagaggtgctgatgtgtggaaataacaactgctgccggtgcttctgcgtggaatgcgtggacctgctggtgggccccggcgccgcccaggccgctattaaggaagatccttggaactgctacatgtgcggccacaagggcacatacggcctgctgagacggagagaggactggcctagcagactgcagatgttcttcgccaataaccacgaccaggagttcgacccccctaaggtgtaccctcccgtccccgccgagaagagaaagcccatccgggtcctgagcctgttcgatggcatcgccaccggtctgctggtgctgaaggacctgggcatccaggtggataggtacattgcctccgaggtgtgcgaggactccatcaccgtgggaatggtgcgtcatcagggcaagatcatgtacgtgggcgacgtgcggagcgtgacacagaagcatatccaggagtggggccctttcgacctggtgatcggcggcagcccttgcaatgacctgagcatcgtgaacccagcccggaagggcctgtacgagggaaccggcagactgttcttcgagttttacagactgctgcacgacgcccggcctaaggaaggcgacgaccggcccttcttttggctgttcgagaatgtggtggccatgggagtcagcgacaagcgggatattagccggttcctggagagcaaccccgtgatgatcgatgccaaggaagtgagcgccgcccaccgggccagatacttctggggcaatctgcctggcatgaacagacccctggccagcaccgtgaacgacaagctggagctgcaggagtgcctggagcacggccggatcgccaagttcagcaaggtgagaaccatcaccacccgaagcaacagcatcaaacaaggcaaggaccagcactttcctgtgttcatgaacgagaaggaggacatcctgtggtgtaccgagatggagagagtgttcgggttcccagtccactacacagatgtcagcaacatgtctagactggccagacagagactgctgggaagaagctggtccgtccctgtgatcagacacctgttcgcccctctgaaggagtacttcgcctgcgtgagcagcggcaacagcaacgccaacagccggggccccagcttctctagcggcctggtgccactgtccctgagagggagccacatgggccccatggagatctacaaaaccgtgagcgcctggaagcggcagcctgtgcgcgtgctgagcctgtttcggaatatcgataaagtcctgaaaagcctgggattcctggagagcggctctggctccggcggtggcaccctgaagtacgtggaggatgtgacaaacgtggtcagacgggatgtggagaagtggggccccttcgatctggtgtacggcagcacccaacccctgggcagctcttgtgaccggtgccctggctggtacatgtttcagttccaccggatcctgcagtacgccctgccgagacaggagtcccagcggccattcttttggattttcatggacaacttgctgctgaccgaggatgaccaggaaactaccactcggttcctgcagaccgaagccgtgaccctgcaggacgtgagaggccgggactaccagaacgccatgcgggtgtggtccaacatccctggactgaaaagcaagcacgcacctctgacccctaaagaagaggagtacctgcaggcccaggtgcggagcagaagcaagctggacgcccctaaggtggatctgctggtgaagaattgcctcctgcccctgagagagtacttcaagtatttcagccagaatagtctgcccctgggaggcagcggcggcggcgccctggtgacatttgaggacgtcgccgtgcggttcacccaggaggaatgggctctgctggatccttctcagaaaatcctgtaccgggacgtgatgagagagacataccggaatctgacctccgtgggcatcaactgggaatgttgggaccttgaagcctgcttcagaagcctgggaagaaacctgagagtgcaggtggtgaagagaaagtgcgagctgaccaacagcggcccctgcgccgagggcggcccaagcagcggcgcccctcctcccagcggcggcagcccagccggctccccaacctctaccgaggagggcacctctgagtccgccacccccgagagcggccctggcacctccaccgagcccagcgagggcagcgcacccggcagccctgccggcagccccacctccacagaggagggaaccagcaccgagcccagcgaaggcagcgccccaggcaccagcaccgagcctagtgagcaggagattaaacggatcaacaagatcagaagaagacttgtgaaagacagcaacaccaagaaggccggcaagacaggccccatgaaaaccctgctggttagagtgatgacacccgatctgagagagcggctggaaaacctgagaaagaagcctgaaaatatcccccagcccatcagcaatacatctagagccaacctgaataagctgctgaccgattacaccgaaatgaagaaggcgatcctgcatgtgtactgggaagagttccagaaggaccctgtgggcctgatgagccgggtggcccagcctgccagcaagaagatcgatcagaacaagctgaaacctgagatggacgagaagggcaacctgaccaccgccggctttgcctgctctcagtgtggccagcccctgttcgtgtacaagctggagcaggtgtctgagaagggcaaggcttacaccaactacttcggacggtgcaatgtggccgagcacgaaaagctgatcctgctggcccagctgaagcccgagaaggatagcgacgaagccgtgacatatagcctgggaaagtttgggcagagggccctggatttctacagcattcatgtgaccaaggagtccacccaccccgtgaagcccctggcccagatcgccggaaacagatacgcctccggacctgtgggaaaggccctgagcgacgcatgtatgggcacaatcgcctccttcctgtctaagtaccaggacatcatcatcgaacaccagaaggtggtgaagggcaaccagaagagactggagagcctgcgggagctggccggcaaggaaaacctggaataccctagcgtgaccctgccacctcagcctcacaccaaggagggcgttgatgcctacaacgaagtgatcgcccgggtgcgaatgtgggtgaacctgaacctgtggcagaagctgaagctaagcagagatgatgccaagcctctgctgagactgaagggattcccttcctttcctctggtcgagagacaggccaacgaagtggactggtgggacatggtgtgtaacgtgaagaagctgatcaacgagaaaaaggaggatggcaaggtgttttggcagaatctggctggctacaagagacaggaagccctgagaccatacctgagcagcgaggaagatcggaagaagggaaagaaattcgctcggtaccagctgggcgacctgctgctgcacctggaaaagaagcacggcgaggactggggaaaggtgtacgacgaggcctgggagcggattgacaagaaagtggaaggcctgagcaagcacatcaagctggaagaggaacggagaagcgaggacgcccagagcaaggccgccctgaccgactggctgcgggctaaggccagcttcgtgatcgagggcctgaaggaggccgacaaggacgagttctgcagatgcgagctgaagctgcagaagtggtacggggacctgcggggaaagcccttcgccatcgaagccgagaacagcatcctggacatcagcggcttcagcaagcagtacaactgtgccttcatctggcagaaggacggcgtgaagaagctgaacctgtacctgatcatcaactacttcaagggcggcaagctgcggttcaagaagatcaaacctgaagccttcgaagccaacagattctacaccgtgatcaacaaaaagagcggcgagatcgtgcccatggaggtgaacttcaacttcgacgaccccaacctgatcatcctgcctctggcctttggcaagagacagggcagagaattcatctggaacgacctgctgtccctggaaaccggcagcctgaagctggccaacggaagagtgatcgagaagacactgtacaacagaagaacccggcaggatgagcctgccctgttcgtggccctgaccttcgagcggcgggaggtcctggactcctccaatatcaaaccaatgaacctgatcggcgtggcaagaggcgaaaacatccccgccgtgatcgccctgaccgaccccgagggctgcccactgagccggtttaaggatagcctgggaaacccaacccacatcctgagaatcggcgagagctataaggagaagcagcggaccatccaggccaagaaggaggtggagcagcggagagccggcggctacagccggaagtacgccagcaaagccaagaatctggcagacgatatggtgagaaacaccgctagagatctgctgtactacgccgtgacccaggatgccatgctgatcttcgccaacctgagccggggcttcggccggcagggcaagcggaccttcatggccgagagacagtacacacggatggaggactggctgaccgccaagctggcctacgagggcctgagcaagacctacctgtccaagacactggcccagtacacctccaagacatgcagcaactgtgggtttaccatcaccagcgccgactacgacagggtgctggagaagctgaagaagacagcaacaggctggatgaccacaattaacggcaaggagctgaaggtggagggccagattacctactacaacagatacaagagacagaacgtagtcaaggacctgtccgtcgagctggatagactgagcgaagaatctgtgaacaacgacatctcctcctggacaaagggcagaagcggagaagctctgagcctcctgaagaaaagattctcccatagacccgtgcaggagaagttcgtgtgcctgaactgcggcttcgagacacacgcagccgagcaagccgccctgaacatcgccagatcctggctgttcctgcggagccaggagtacaagaaataccagacaaacaagacaaccggcaacaccgataagagagccttcgtcgagacctggcagtccttttaccggaagaagcttaaggaggtgtggaaacctgccgtgcggtctggcggatctggcggaggctcccagatgcccgtgaagttcgaggacatcgccgtgagcttcagccaggaggagtgggagtacctgaacgaggagcagaaggagctgtacagggaggtgatggaggagaactaccagaccctgatcagcctgggcatcggcagccccagcgtgacccccgacatcatcagccacatcgagggcggcgaggagccctacatcagggaggagcccggcagcgaggagagggagcccggcaggagcagcggcggcccaagcagcggcgcccctcctcccagcggcggcagcccagccggctccccaacctctaccgaggagggcacctctgagtccgccacccccgagagcggccctggcacctccaccgagcccagcgagggcagcgcacccggcagccctgccggcagccccacctccacagaggagggaaccagcaccgagcccagcgaaggcagcgccccaggcaccagcaccgagcctagtgagcaggagattaaacggatcaacaagatcagaagaagacttgtgaaagacagcaacaccaagaaggccggcaagacaggccccatgaaaaccctgctggttagagtgatgacacccgatctgagagagcggctggaaaacctgagaaagaagcctgaaaatatcccccagcccatcagcaatacatctagagccaacctgaataagctgctgaccgattacaccgaaatgaagaaggcgatcctgcatgtgtactgggaagagttccagaaggaccctgtgggcctgatgagccgggtggcccagcctgccagcaagaagatcgatcagaacaagctgaaacctgagatggacgagaagggcaacctgaccaccgccggctttgcctgctctcagtgtggccagcccctgttcgtgtacaagctggagcaggtgtctgagaagggcaaggcttacaccaactacttcggacggtgcaatgtggccgagcacgaaaagctgatcctgctggcccagctgaagcccgagaaggatagcgacgaagccgtgacatatagcctgggaaagtttgggcagagggccctggatttctacagcattcatgtgaccaaggagtccacccaccccgtgaagcccctggcccagatcgccggaaacagatacgcctccggacctgtgggaaaggccctgagcgacgcatgtatgggcacaatcgcctccttcctgtctaagtaccaggacatcatcatcgaacaccagaaggtggtgaagggcaaccagaagagactggagagcctgcgggagctggccggcaaggaaaacctggaataccctagcgtgaccctgccacctcagcctcacaccaaggagggcgttgatgcctacaacgaagtgatcgcccgggtgcgaatgtgggtgaacctgaacctgtggcagaagctgaagctaagcagagatgatgccaagcctctgctgagactgaagggattcccttcctttcctctggtcgagagacaggccaacgaagtggactggtgggacatggtgtgtaacgtgaagaagctgatcaacgagaaaaaggaggatggcaaggtgttttggcagaatctggctggctacaagagacaggaagccctgagaccatacctgagcagcgaggaagatcggaagaagggaaagaaattcgctcggtaccagctgggcgacctgctgctgcacctggaaaagaagcacggcgaggactggggaaaggtgtacgacgaggcctgggagcggattgacaagaaagtggaaggcctgagcaagcacatcaagctggaagaggaacggagaagcgaggacgcccagagcaaggccgccctgaccgactggctgcgggctaaggccagcttcgtgatcgagggcctgaaggaggccgacaaggacgagttctgcagatgcgagctgaagctgcagaagtggtacggggacctgcggggaaagcccttcgccatcgaagccgagaacagcatcctggacatcagcggcttcagcaagcagtacaactgtgccttcatctggcagaaggacggcgtgaagaagctgaacctgtacctgatcatcaactacttcaagggcggcaagctgcggttcaagaagatcaaacctgaagccttcgaagccaacagattctacaccgtgatcaacaaaaagagcggcgagatcgtgcccatggaggtgaacttcaacttcgacgaccccaacctgatcatcctgcctctggcctttggcaagagacagggcagagaattcatctggaacgacctgctgtccctggaaaccggcagcctgaagctggccaacggaagagtgatcgagaagacactgtacaacagaagaacccggcaggatgagcctgccctgttcgtggccctgaccttcgagcggcgggaggtcctggactcctccaatatcaaaccaatgaacctgatcggcgtggcaagaggcgaaaacatccccgccgtgatcgccctgaccgaccccgagggctgcccactgagccggtttaaggatagcctgggaaacccaacccacatcctgagaatcggcgagagctataaggagaagcagcggaccatccaggccaagaaggaggtggagcagcggagagccggcggctacagccggaagtacgccagcaaagccaagaatctggcagacgatatggtgagaaacaccgctagagatctgctgtactacgccgtgacccaggatgccatgctgatcttcgccaacctgagccggggcttcggccggcagggcaagcggaccttcatggccgagagacagtacacacggatggaggactggctgaccgccaagctggcctacgagggcctgagcaagacctacctgtccaagacactggcccagtacacctccaagacatgcagcaactgtgggtttaccatcaccagcgccgactacgacagggtgctggagaagctgaagaagacagcaacaggctggatgaccacaattaacggcaaggagctgaaggtggagggccagattacctactacaacagatacaagagacagaacgtagtcaaggacctgtccgtcgagctggatagactgagcgaagaatctgtgaacaacgacatctcctcctggacaaagggcagaagcggagaagctctgagcctcctgaagaaaagattctcccatagacccgtgcaggagaagttcgtgtgcctgaactgcggcttcgagacacacgcagccgagcaagccgccctgaacatcgccagatcctggctgttcctgcggagccaggagtacaagaaataccagacaaacaagacaaccggcaacaccgataagagagccttcgtcgagacctggcagtccttttaccggaagaagcttaaggaggtgtggaaacctgccgtgcggtctggcggatctggcggaggctcctcagatgcccgtgaagttcgaggacatcgccgtgagcttcagccaggaggagtgggagtacctgaacgaggagcagaaggagctgtacagggaggtgatggaggagaactaccagaccctgatcagcctgggcatcggcagccccagcgtgacccccgacatcatcagccacatcgagggcggcgaggagccctacatcagggaggagcccggcagcgaggagagggagcccggcaggagcagcggatctggctccggcagcggccccaagaaaaagagaaaagtctaagctgccttctgcggggcttgccttctggccatgcccttcttctctcccttgcacctgtacctcttggtctttgaataaagcctgagtaggaaggctagcaaaaaaaaaaaaaaaaaaaaaaaaaaaaaaaaaaaaaaaaaaaaaaaaaaaaaaaaaaaaaaaaaaaaaaaaaaaaaaaa

SEQ ID NO: 15662 - RNA, 9485 nt, synthetic construct
  source 1..9485: mol_type = other RNA
aggaaataagagagaaaagaagagtaagaagaaatataagagccaccatggcccctaagaagaagcgtaaagtgagccggatggaacgcctcgtctacgaggtgcggcagaagtgcagaaacatcgaggacatctgcatctcctgcggatctctgaacgtgaccctggagcacccactgttcatcggcggcatgtgccagaactgtaaaaactgttttctggagtgtgcctatcaatacgacgatgacggctaccagagctactgcaccatctgttgcggcggaagagaggtgctgatgtgtggaaataacaactgctgccggtgcttctgcgtggaatgcgtggacctgctggtgggccccggcgccgcccaggccgctattaaggaagatccttggaactgctacatgtgcggccacaagggcacatacggcctgctgagacggagagaggactggcctagcagactgcagatgttcttcgccaataaccacgaccaggagttcgacccccctaaggtgtaccctcccgtccccgccgagaagagaaagcccatccgggtcctgagcctgttcgatggcatcgccaccggtctgctggtgctgaaggacctgggcatccaggtggataggtacattgcctccgaggtgtgcgaggactccatcaccgtgggaatggtgcgtcatcagggcaagatcatgtacgtgggcgacgtgcggagcgtgacacagaagcatatccaggagtggggccctttcgacctggtgatcggcggcagcccttgcaatgacctgagcatcgtgaacccagcccggaagggcctgtacgagggaaccggcagactgttcttcgagttttacagactgctgcacgacgcccggcctaaggaaggcgacgaccggcccttcttttggctgttcgagaatgtggtggccatgggagtcagcgacaagcgggatattagccggttcctggagagcaaccccgtgatgatcgatgccaaggaagtgagcgccgcccaccgggccagatacttctggggcaatctgcctggcatgaacagacccctggccagcaccgtgaacgacaagctggagctgcaggagtgcctggagcacggccggatcgccaagttcagcaaggtgagaaccatcaccacccgaagcaacagcatcaaacaaggcaaggaccagcactttcctgtgttcatgaacgagaaggaggacatcctgtggtgtaccgagatggagagagtgttcgggttcccagtccactacacagatgtcagcaacatgtctagactggccagacagagactgctgggaagaagctggtccgtccctgtgatcagacacctgttcgcccctctgaaggagtacttcgcctgcgtgagcagcggcaacagcaacgccaacagccggggccccagcttctctagcggcctggtgccactgtccctgagagggagccacatgggccccatggagatctacaaaaccgtgagcgcctggaagcggcagcctgtgcgcgtgctgagcctgtttcggaatatcgataaagtcctgaaaagcctgggattcctggagagcggctctggctccggcggtggcaccctgaagtacgtggaggatgtgacaaacgtggtcagacgggatgtggagaagtggggccccttcgatctggtgtacggcagcacccaacccctgggcagctcttgtgaccggtgccctggctggtacatgtttcagttccaccggatcctgcagtacgccctgccgagacaggagtcccagcggccattcttttggattttcatggacaacttgctgctgaccgaggatgaccaggaaactaccactcggttcctgcagaccgaagccgtgaccctgcaggacgtgagaggccgggactaccagaacgccatgcgggtgtggtccaacatccctggactgaaaagcaagcacgcacctctgacccctaaagaagaggagtacctgcaggcccaggtgcggagcagaagcaagctggacgcccctaaggtggatctgctggtgaagaattgcctcctgcccctgagagagtacttcaagtatttcagccagaatagtctgcccctgggaggcagcggcggcggcgccctggtgacatttgaggacgtcgccgtgcggttcacccaggaggaatgggctctgctggatccttctcagaaaatcctgtaccgggacgtgatgagagagacataccggaatctgacctccgtgggcatcaactgggaatgttgggaccttgaagcctgcttcagaagcctgggaagaaacctgagagtgcaggtggtgaagagaaagtgcgagctgaccaacagcggcccctgcgccgagggcggcccaagcagcggcgcccctcctcccagcggcggcagcccagccggctccccaacctctaccgaggagggcacctctgagtccgccacccccgagagcggccctggcacctccaccgagcccagcgagggcagcgcacccggcagccctgccggcagccccacctccacagaggagggaaccagcaccgagcccagcgaaggcagcgccccaggcaccagcaccgagcctagtgagcaggagattaaacggatcaacaagatcagaagaagacttgtgaaagacagcaacaccaagaaggccggcaagacaggccccatgaaaaccctgctggttagagtgatgacacccgatctgagagagcggctggaaaacctgagaaagaagcctgaaaatatcccccagcccatcagcaatacatctagagccaacctgaataagctgctgaccgattacaccgaaatgaagaaggcgatcctgcatgtgtactgggaagagttccagaaggaccctgtgggcctgatgagccgggtggcccagcctgccagcaagaagatcgatcagaacaagctgaaacctgagatggacgagaagggcaacctgaccaccgccggctttgcctgctctcagtgtggccagcccctgttcgtgtacaagctggagcaggtgtctgagaagggcaaggcttacaccaactacttcggacggtgcaatgtggccgagcacgaaaagctgatcctgctggcccagctgaagcccgagaaggatagcgacgaagccgtgacatatagcctgggaaagtttgggcagagggccctggatttctacagcattcatgtgaccaaggagtccacccaccccgtgaagcccctggcccagatcgccggaaacagatacgcctccggacctgtgggaaaggccctgagcgacgcatgtatgggcacaatcgcctccttcctgtctaagtaccaggacatcatcatcgaacaccagaaggtggtgaagggcaaccagaagagactggagagcctgcgggagctggccggcaaggaaaacctggaataccctagcgtgaccctgccacctcagcctcacaccaaggagggcgttgatgcctacaacgaagtgatcgcccgggtgcgaatgtgggtgaacctgaacctgtggcagaagctgaagctaagcagagatgatgccaagcctctgctgagactgaagggattcccttcctttcctctggtcgagagacaggccaacgaagtggactggtgggacatggtgtgtaacgtgaagaagctgatcaacgagaaaaaggaggatggcaaggtgttttggcagaatctggctggctacaagagacaggaagccctgagaccatacctgagcagcgaggaagatcggaagaagggaaagaaattcgctcggtaccagctgggcgacctgctgctgcacctggaaaagaagcacggcgaggactggggaaaggtgtacgacgaggcctgggagcggattgacaagaaagtggaaggcctgagcaagcacatcaagctggaagaggaacggagaagcgaggacgcccagagcaaggccgccctgaccgactggctgcgggctaaggccagcttcgtgatcgagggcctgaaggaggccgacaaggacgagttctgcagatgcgagctgaagctgcagaagtggtacggggacctgcggggaaagcccttcgccatcgaagccgagaacagcatcctggacatcagcggcttcagcaagcagtacaactgtgccttcatctggcagaaggacggcgtgaagaagctgaacctgtacctgatcatcaactacttcaagggcggcaagctgcggttcaagaagatcaaacctgaagccttcgaagccaacagattctacaccgtgatcaacaaaaagagcggcgagatcgtgcccatggaggtgaacttcaacttcgacgaccccaacctgatcatcctgcctctggcctttggcaagagacagggcagagaattcatctggaacgacctgctgtccctggaaaccggcagcctgaagctggccaacggaagagtgatcgagaagacactgtacaacagaagaacccggcaggatgagcctgccctgttcgtggccctgaccttcgagcggcgggaggtcctggactcctccaatatcaaaccaatgaacctgatcggcgtggcaagaggcgaaaacatccccgccgtgatcgccctgaccgaccccgagggctgcccactgagccggtttaaggatagcctgggaaacccaacccacatcctgagaatcggcgagagctataaggagaagcagcggaccatccaggccaagaaggaggtggagcagcggagagccggcggctacagccggaagtacgccagcaaagccaagaatctggcagacgatatggtgagaaacaccgctagagatctgctgtactacgccgtgacccaggatgccatgctgatcttcgccaacctgagccggggcttcggccggcagggcaagcggaccttcatggccgagagacagtacacacggatggaggactggctgaccgccaagctggcctacgagggcctgagcaagacctacctgtccaagacactggcccagtacacctccaagacatgcagcaactgtgggtttaccatcaccagcgccgactacgacagggtgctggagaagctgaagaagacagcaacaggctggatgaccacaattaacggcaaggagctgaaggtggagggccagattacctactacaacagatacaagagacagaacgtagtcaaggacctgtccgtcgagctggatagactgagcgaagaatctgtgaacaacgacatctcctcctggacaaagggcagaagcggagaagctctgagcctcctgaagaaaagattctcccatagacccgtgcaggagaagttcgtgtgcctgaactgcggcttcgagacacacgcagccgagcaagccgccctgaacatcgccagatcctggctgttcctgcggagccaggagtacaagaaataccagacaaacaagacaaccggcaacaccgataagagagccttcgtcgagacctggcagtccttttaccggaagaagcttaaggaggtgtggaaacctgccgtgcggtctggcggatctggcggaggctccatggacagcgtgaccatcgaggacgtggccgtggacttcaccctggaggagtgggccctgctgggccccagccagaggaagctgtacagggacgtgatgcaggagaccctgaggaacctggccgccgtgggcgccaagagggagtaccacgccatcgaggaccagtacaagaaccagggcaggaagctgaggaccttcatggtggagaggttctgcaagagcaaggacatcagcctgtgcggcggcggcccaagcagcggcgcccctcctcccagcggcggcagcccagccggctccccaacctctaccgaggagggcacctctgagtccgccacccccgagagcggccctggcacctccaccgagcccagcgagggcagcgcacccggcagccctgccggcagccccacctccacagaggagggaaccagcaccgagcccagcgaaggcagcgccccaggcaccagcaccgagcctagtgagcaggagattaaacggatcaacaagatcagaagaagacttgtgaaagacagcaacaccaagaaggccggcaagacaggccccatgaaaaccctgctggttagagtgatgacacccgatctgagagagcggctggaaaacctgagaaagaagcctgaaaatatcccccagcccatcagcaatacatctagagccaacctgaataagctgctgaccgattacaccgaaatgaagaaggcgatcctgcatgtgtactgggaagagttccagaaggaccctgtgggcctgatgagccgggtggcccagcctgccagcaagaagatcgatcagaacaagctgaaacctgagatggacgagaagggcaacctgaccaccgccggctttgcctgctctcagtgtggccagcccctgttcgtgtacaagctggagcaggtgtctgagaagggcaaggcttacaccaactacttcggacggtgcaatgtggccgagcacgaaaagctgatcctgctggcccagctgaagcccgagaaggatagcgacgaagccgtgacatatagcctgggaaagtttgggcagagggccctggatttctacagcattcatgtgaccaaggagtccacccaccccgtgaagcccctggcccagatcgccggaaacagatacgcctccggacctgtgggaaaggccctgagcgacgcatgtatgggcacaatcgcctccttcctgtctaagtaccaggacatcatcatcgaacaccagaaggtggtgaagggcaaccagaagagactggagagcctgcgggagctggccggcaaggaaaacctggaataccctagcgtgaccctgccacctcagcctcacaccaaggagggcgttgatgcctacaacgaagtgatcgcccgggtgcgaatgtgggtgaacctgaacctgtggcagaagctgaagctaagcagagatgatgccaagcctctgctgagactgaagggattcccttcctttcctctggtcgagagacaggccaacgaagtggactggtgggacatggtgtgtaacgtgaagaagctgatcaacgagaaaaaggaggatggcaaggtgttttggcagaatctggctggctacaagagacaggaagccctgagaccatacctgagcagcgaggaagatcggaagaagggaaagaaattcgctcggtaccagctgggcgacctgctgctgcacctggaaaagaagcacggcgaggactggggaaaggtgtacgacgaggcctgggagcggattgacaagaaagtggaaggcctgagcaagcacatcaagctggaagaggaacggagaagcgaggacgcccagagcaaggccgccctgaccgactggctgcgggctaaggccagcttcgtgatcgagggcctgaaggaggccgacaaggacgagttctgcagatgcgagctgaagctgcagaagtggtacggggacctgcggggaaagcccttcgccatcgaagccgagaacagcatcctggacatcagcggcttcagcaagcagtacaactgtgccttcatctggcagaaggacggcgtgaagaagctgaacctgtacctgatcatcaactacttcaagggcggcaagctgcggttcaagaagatcaaacctgaagccttcgaagccaacagattctacaccgtgatcaacaaaaagagcggcgagatcgtgcccatggaggtgaacttcaacttcgacgaccccaacctgatcatcctgcctctggcctttggcaagagacagggcagagaattcatctggaacgacctgctgtccctggaaaccggcagcctgaagctggccaacggaagagtgatcgagaagacactgtacaacagaagaacccggcaggatgagcctgccctgttcgtggccctgaccttcgagcggcgggaggtcctggactcctccaatatcaaaccaatgaacctgatcggcgtggcaagaggcgaaaacatccccgccgtgatcgccctgaccgaccccgagggctgcccactgagccggtttaaggatagcctgggaaacccaacccacatcctgagaatcggcgagagctataaggagaagcagcggaccatccaggccaagaaggaggtggagcagcggagagccggcggctacagccggaagtacgccagcaaagccaagaatctggcagacgatatggtgagaaacaccgctagagatctgctgtactacgccgtgacccaggatgccatgctgatcttcgccaacctgagccggggcttcggccggcagggcaagcggaccttcatggccgagagacagtacacacggatggaggactggctgaccgccaagctggcctacgagggcctgagcaagacctacctgtccaagacactggcccagtacacctccaagacatgcagcaactgtgggtttaccatcaccagcgccgactacgacagggtgctggagaagctgaagaagacagcaacaggctggatgaccacaattaacggcaaggagctgaaggtggagggccagattacctactacaacagatacaagagacagaacgtagtcaaggacctgtccgtcgagctggatagactgagcgaagaatctgtgaacaacgacatctcctcctggacaaagggcagaagcggagaagctctgagcctcctgaagaaaagattctcccatagacccgtgcaggagaagttcgtgtgcctgaactgcggcttcgagacacacgcagccgagcaagccgccctgaacatcgccagatcctggctgttcctgcggagccaggagtacaagaaataccagacaaacaagacaaccggcaacaccgataagagagccttcgtcgagacctggcagtccttttaccggaagaagcttaaggaggtgtggaaacctgccgtgcggtctggcggatctggcggaggctcctatggacagcgtgaccatcgaggacgtggccgtggacttcaccctggaggagtgggccctgctgggccccagccagaggaagctgtacagggacgtgatgcaggagaccctgaggaacctggccgccgtgggcgccaagagggagtaccacgccatcgaggaccagtacaagaaccagggcaggaagctgaggaccttcatggtggagaggttctgcaagagcaaggacatcagcctgtgcggcggatctggctccggcagcggccccaagaaaaagagaaaagtctaagctgccttctgcggggcttgccttctggccatgcccttcttctctcccttgcacctgtacctcttggtctttgaataaagcctgagtaggaaggctagcaaaaaaaaaaaaaaaaaaaaaaaaaaaaaaaaaaaaaaaaaaaaaaaaaaaaaaaaaaaaaaaaaaaaaaaaaaaaaaaa

SEQ ID NO: 15663 - RNA, 9485 nt, synthetic construct
  source 1..9485: mol_type = other RNA
aggaaataagagagaaaagaagagtaagaagaaatataagagccaccatggcccctaagaagaagcgtaaagtgagccggatggaacgcctcgtctacgaggtgcggcagaagtgcagaaacatcgaggacatctgcatctcctgcggatctctgaacgtgaccctggagcacccactgttcatcggcggcatgtgccagaactgtaaaaactgttttctggagtgtgcctatcaatacgacgatgacggctaccagagctactgcaccatctgttgcggcggaagagaggtgctgatgtgtggaaataacaactgctgccggtgcttctgcgtggaatgcgtggacctgctggtgggccccggcgccgcccaggccgctattaaggaagatccttggaactgctacatgtgcggccacaagggcacatacggcctgctgagacggagagaggactggcctagcagactgcagatgttcttcgccaataaccacgaccaggagttcgacccccctaaggtgtaccctcccgtccccgccgagaagagaaagcccatccgggtcctgagcctgttcgatggcatcgccaccggtctgctggtgctgaaggacctgggcatccaggtggataggtacattgcctccgaggtgtgcgaggactccatcaccgtgggaatggtgcgtcatcagggcaagatcatgtacgtgggcgacgtgcggagcgtgacacagaagcatatccaggagtggggccctttcgacctggtgatcggcggcagcccttgcaatgacctgagcatcgtgaacccagcccggaagggcctgtacgagggaaccggcagactgttcttcgagttttacagactgctgcacgacgcccggcctaaggaaggcgacgaccggcccttcttttggctgttcgagaatgtggtggccatgggagtcagcgacaagcgggatattagccggttcctggagagcaaccccgtgatgatcgatgccaaggaagtgagcgccgcccaccgggccagatacttctggggcaatctgcctggcatgaacagacccctggccagcaccgtgaacgacaagctggagctgcaggagtgcctggagcacggccggatcgccaagttcagcaaggtgagaaccatcaccacccgaagcaacagcatcaaacaaggcaaggaccagcactttcctgtgttcatgaacgagaaggaggacatcctgtggtgtaccgagatggagagagtgttcgggttcccagtccactacacagatgtcagcaacatgtctagactggccagacagagactgctgggaagaagctggtccgtccctgtgatcagacacctgttcgcccctctgaaggagtacttcgcctgcgtgagcagcggcaacagcaacgccaacagccggggccccagcttctctagcggcctggtgccactgtccctgagagggagccacatgggccccatggagatctacaaaaccgtgagcgcctggaagcggcagcctgtgcgcgtgctgagcctgtttcggaatatcgataaagtcctgaaaagcctgggattcctggagagcggctctggctccggcggtggcaccctgaagtacgtggaggatgtgacaaacgtggtcagacgggatgtggagaagtggggccccttcgatctggtgtacggcagcacccaacccctgggcagctcttgtgaccggtgccctggctggtacatgtttcagttccaccggatcctgcagtacgccctgccgagacaggagtcccagcggccattcttttggattttcatggacaacttgctgctgaccgaggatgaccaggaaactaccactcggttcctgcagaccgaagccgtgaccctgcaggacgtgagaggccgggactaccagaacgccatgcgggtgtggtccaacatccctggactgaaaagcaagcacgcacctctgacccctaaagaagaggagtacctgcaggcccaggtgcggagcagaagcaagctggacgcccctaaggtggatctgctggtgaagaattgcctcctgcccctgagagagtacttcaagtatttcagccagaatagtctgcccctgggaggcagcggcggcggcgccctggtgacatttgaggacgtcgccgtgcggttcacccaggaggaatgggctctgctggatccttctcagaaaatcctgtaccgggacgtgatgagagagacataccggaatctgacctccgtgggcatcaactgggaatgttgggaccttgaagcctgcttcagaagcctgggaagaaacctgagagtgcaggtggtgaagagaaagtgcgagctgaccaacagcggcccctgcgccgagggcggcccaagcagcggcgcccctcctcccagcggcggcagcccagccggctccccaacctctaccgaggagggcacctctgagtccgccacccccgagagcggccctggcacctccaccgagcccagcgagggcagcgcacccggcagccctgccggcagccccacctccacagaggagggaaccagcaccgagcccagcgaaggcagcgccccaggcaccagcaccgagcctagtgagcaggagattaaacggatcaacaagatcagaagaagacttgtgaaagacagcaacaccaagaaggccggcaagacaggccccatgaaaaccctgctggttagagtgatgacacccgatctgagagagcggctggaaaacctgagaaagaagcctgaaaatatcccccagcccatcagcaatacatctagagccaacctgaataagctgctgaccgattacaccgaaatgaagaaggcgatcctgcatgtgtactgggaagagttccagaaggaccctgtgggcctgatgagccgggtggcccagcctgccagcaagaagatcgatcagaacaagctgaaacctgagatggacgagaagggcaacctgaccaccgccggctttgcctgctctcagtgtggccagcccctgttcgtgtacaagctggagcaggtgtctgagaagggcaaggcttacaccaactacttcggacggtgcaatgtggccgagcacgaaaagctgatcctgctggcccagctgaagcccgagaaggatagcgacgaagccgtgacatatagcctgggaaagtttgggcagagggccctggatttctacagcattcatgtgaccaaggagtccacccaccccgtgaagcccctggcccagatcgccggaaacagatacgcctccggacctgtgggaaaggccctgagcgacgcatgtatgggcacaatcgcctccttcctgtctaagtaccaggacatcatcatcgaacaccagaaggtggtgaagggcaaccagaagagactggagagcctgcgggagctggccggcaaggaaaacctggaataccctagcgtgaccctgccacctcagcctcacaccaaggagggcgttgatgcctacaacgaagtgatcgcccgggtgcgaatgtgggtgaacctgaacctgtggcagaagctgaagctaagcagagatgatgccaagcctctgctgagactgaagggattcccttcctttcctctggtcgagagacaggccaacgaagtggactggtgggacatggtgtgtaacgtgaagaagctgatcaacgagaaaaaggaggatggcaaggtgttttggcagaatctggctggctacaagagacaggaagccctgagaccatacctgagcagcgaggaagatcggaagaagggaaagaaattcgctcggtaccagctgggcgacctgctgctgcacctggaaaagaagcacggcgaggactggggaaaggtgtacgacgaggcctgggagcggattgacaagaaagtggaaggcctgagcaagcacatcaagctggaagaggaacggagaagcgaggacgcccagagcaaggccgccctgaccgactggctgcgggctaaggccagcttcgtgatcgagggcctgaaggaggccgacaaggacgagttctgcagatgcgagctgaagctgcagaagtggtacggggacctgcggggaaagcccttcgccatcgaagccgagaacagcatcctggacatcagcggcttcagcaagcagtacaactgtgccttcatctggcagaaggacggcgtgaagaagctgaacctgtacctgatcatcaactacttcaagggcggcaagctgcggttcaagaagatcaaacctgaagccttcgaagccaacagattctacaccgtgatcaacaaaaagagcggcgagatcgtgcccatggaggtgaacttcaacttcgacgaccccaacctgatcatcctgcctctggcctttggcaagagacagggcagagaattcatctggaacgacctgctgtccctggaaaccggcagcctgaagctggccaacggaagagtgatcgagaagacactgtacaacagaagaacccggcaggatgagcctgccctgttcgtggccctgaccttcgagcggcgggaggtcctggactcctccaatatcaaaccaatgaacctgatcggcgtggcaagaggcgaaaacatccccgccgtgatcgccctgaccgaccccgagggctgcccactgagccggtttaaggatagcctgggaaacccaacccacatcctgagaatcggcgagagctataaggagaagcagcggaccatccaggccaagaaggaggtggagcagcggagagccggcggctacagccggaagtacgccagcaaagccaagaatctggcagacgatatggtgagaaacaccgctagagatctgctgtactacgccgtgacccaggatgccatgctgatcttcgccaacctgagccggggcttcggccggcagggcaagcggaccttcatggccgagagacagtacacacggatggaggactggctgaccgccaagctggcctacgagggcctgagcaagacctacctgtccaagacactggcccagtacacctccaagacatgcagcaactgtgggtttaccatcaccagcgccgactacgacagggtgctggagaagctgaagaagacagcaacaggctggatgaccacaattaacggcaaggagctgaaggtggagggccagattacctactacaacagatacaagagacagaacgtagtcaaggacctgtccgtcgagctggatagactgagcgaagaatctgtgaacaacgacatctcctcctggacaaagggcagaagcggagaagctctgagcctcctgaagaaaagattctcccatagacccgtgcaggagaagttcgtgtgcctgaactgcggcttcgagacacacgcagccgagcaagccgccctgaacatcgccagatcctggctgttcctgcggagccaggagtacaagaaataccagacaaacaagacaaccggcaacaccgataagagagccttcgtcgagacctggcagtccttttaccggaagaagcttaaggaggtgtggaaacctgccgtgcggtctggcggatctggcggaggctccttccaggagcccgtgaccttcgaggacgtggccgtgtacttcacccagaacgagtggaccagcctgcagcccagccagagggccctgttcagggaggtgatgctggagaactacgccaccgtgaccagcctgagcgccttccccttccccaagcccgacctgatcttcaggctggagcagggcgaggccgcctggggccccgacccctggaccctggccggcgaggaggccctgaggggcctgggcggcccaagcagcggcgcccctcctcccagcggcggcagcccagccggctccccaacctctaccgaggagggcacctctgagtccgccacccccgagagcggccctggcacctccaccgagcccagcgagggcagcgcacccggcagccctgccggcagccccacctccacagaggagggaaccagcaccgagcccagcgaaggcagcgccccaggcaccagcaccgagcctagtgagcaggagattaaacggatcaacaagatcagaagaagacttgtgaaagacagcaacaccaagaaggccggcaagacaggccccatgaaaaccctgctggttagagtgatgacacccgatctgagagagcggctggaaaacctgagaaagaagcctgaaaatatcccccagcccatcagcaatacatctagagccaacctgaataagctgctgaccgattacaccgaaatgaagaaggcgatcctgcatgtgtactgggaagagttccagaaggaccctgtgggcctgatgagccgggtggcccagcctgccagcaagaagatcgatcagaacaagctgaaacctgagatggacgagaagggcaacctgaccaccgccggctttgcctgctctcagtgtggccagcccctgttcgtgtacaagctggagcaggtgtctgagaagggcaaggcttacaccaactacttcggacggtgcaatgtggccgagcacgaaaagctgatcctgctggcccagctgaagcccgagaaggatagcgacgaagccgtgacatatagcctgggaaagtttgggcagagggccctggatttctacagcattcatgtgaccaaggagtccacccaccccgtgaagcccctggcccagatcgccggaaacagatacgcctccggacctgtgggaaaggccctgagcgacgcatgtatgggcacaatcgcctccttcctgtctaagtaccaggacatcatcatcgaacaccagaaggtggtgaagggcaaccagaagagactggagagcctgcgggagctggccggcaaggaaaacctggaataccctagcgtgaccctgccacctcagcctcacaccaaggagggcgttgatgcctacaacgaagtgatcgcccgggtgcgaatgtgggtgaacctgaacctgtggcagaagctgaagctaagcagagatgatgccaagcctctgctgagactgaagggattcccttcctttcctctggtcgagagacaggccaacgaagtggactggtgggacatggtgtgtaacgtgaagaagctgatcaacgagaaaaaggaggatggcaaggtgttttggcagaatctggctggctacaagagacaggaagccctgagaccatacctgagcagcgaggaagatcggaagaagggaaagaaattcgctcggtaccagctgggcgacctgctgctgcacctggaaaagaagcacggcgaggactggggaaaggtgtacgacgaggcctgggagcggattgacaagaaagtggaaggcctgagcaagcacatcaagctggaagaggaacggagaagcgaggacgcccagagcaaggccgccctgaccgactggctgcgggctaaggccagcttcgtgatcgagggcctgaaggaggccgacaaggacgagttctgcagatgcgagctgaagctgcagaagtggtacggggacctgcggggaaagcccttcgccatcgaagccgagaacagcatcctggacatcagcggcttcagcaagcagtacaactgtgccttcatctggcagaaggacggcgtgaagaagctgaacctgtacctgatcatcaactacttcaagggcggcaagctgcggttcaagaagatcaaacctgaagccttcgaagccaacagattctacaccgtgatcaacaaaaagagcggcgagatcgtgcccatggaggtgaacttcaacttcgacgaccccaacctgatcatcctgcctctggcctttggcaagagacagggcagagaattcatctggaacgacctgctgtccctggaaaccggcagcctgaagctggccaacggaagagtgatcgagaagacactgtacaacagaagaacccggcaggatgagcctgccctgttcgtggccctgaccttcgagcggcgggaggtcctggactcctccaatatcaaaccaatgaacctgatcggcgtggcaagaggcgaaaacatccccgccgtgatcgccctgaccgaccccgagggctgcccactgagccggtttaaggatagcctgggaaacccaacccacatcctgagaatcggcgagagctataaggagaagcagcggaccatccaggccaagaaggaggtggagcagcggagagccggcggctacagccggaagtacgccagcaaagccaagaatctggcagacgatatggtgagaaacaccgctagagatctgctgtactacgccgtgacccaggatgccatgctgatcttcgccaacctgagccggggcttcggccggcagggcaagcggaccttcatggccgagagacagtacacacggatggaggactggctgaccgccaagctggcctacgagggcctgagcaagacctacctgtccaagacactggcccagtacacctccaagacatgcagcaactgtgggtttaccatcaccagcgccgactacgacagggtgctggagaagctgaagaagacagcaacaggctggatgaccacaattaacggcaaggagctgaaggtggagggccagattacctactacaacagatacaagagacagaacgtagtcaaggacctgtccgtcgagctggatagactgagcgaagaatctgtgaacaacgacatctcctcctggacaaagggcagaagcggagaagctctgagcctcctgaagaaaagattctcccatagacccgtgcaggagaagttcgtgtgcctgaactgcggcttcgagacacacgcagccgagcaagccgccctgaacatcgccagatcctggctgttcctgcggagccaggagtacaagaaataccagacaaacaagacaaccggcaacaccgataagagagccttcgtcgagacctggcagtccttttaccggaagaagcttaaggaggtgtggaaacctgccgtgcggtctggcggatctggcggaggctcctttccaggagcccgtgaccttcgaggacgtggccgtgtacttcacccagaacgagtggaccagcctgcagcccagccagagggccctgttcagggaggtgatgctggagaactacgccaccgtgaccagcctgagcgccttccccttccccaagcccgacctgatcttcaggctggagcagggcgaggccgcctggggccccgacccctggaccctggccggcgaggaggccctgaggggcctgggatctggctccggcagcggccccaagaaaaagagaaaagtctaagctgccttctgcggggcttgccttctggccatgcccttcttctctcccttgcacctgtacctcttggtctttgaataaagcctgagtaggaaggctagcaaaaaaaaaaaaaaaaaaaaaaaaaaaaaaaaaaaaaaaaaaaaaaaaaaaaaaaaaaaaaaaaaaaaaaaaaaaaaaaa

SEQ ID NO: 15664 - RNA, 9485 nt, synthetic construct
  source 1..9485: mol_type = other RNA
aggaaataagagagaaaagaagagtaagaagaaatataagagccaccatggcccctaagaagaagcgtaaagtgagccggatggaacgcctcgtctacgaggtgcggcagaagtgcagaaacatcgaggacatctgcatctcctgcggatctctgaacgtgaccctggagcacccactgttcatcggcggcatgtgccagaactgtaaaaactgttttctggagtgtgcctatcaatacgacgatgacggctaccagagctactgcaccatctgttgcggcggaagagaggtgctgatgtgtggaaataacaactgctgccggtgcttctgcgtggaatgcgtggacctgctggtgggccccggcgccgcccaggccgctattaaggaagatccttggaactgctacatgtgcggccacaagggcacatacggcctgctgagacggagagaggactggcctagcagactgcagatgttcttcgccaataaccacgaccaggagttcgacccccctaaggtgtaccctcccgtccccgccgagaagagaaagcccatccgggtcctgagcctgttcgatggcatcgccaccggtctgctggtgctgaaggacctgggcatccaggtggataggtacattgcctccgaggtgtgcgaggactccatcaccgtgggaatggtgcgtcatcagggcaagatcatgtacgtgggcgacgtgcggagcgtgacacagaagcatatccaggagtggggccctttcgacctggtgatcggcggcagcccttgcaatgacctgagcatcgtgaacccagcccggaagggcctgtacgagggaaccggcagactgttcttcgagttttacagactgctgcacgacgcccggcctaaggaaggcgacgaccggcccttcttttggctgttcgagaatgtggtggccatgggagtcagcgacaagcgggatattagccggttcctggagagcaaccccgtgatgatcgatgccaaggaagtgagcgccgcccaccgggccagatacttctggggcaatctgcctggcatgaacagacccctggccagcaccgtgaacgacaagctggagctgcaggagtgcctggagcacggccggatcgccaagttcagcaaggtgagaaccatcaccacccgaagcaacagcatcaaacaaggcaaggaccagcactttcctgtgttcatgaacgagaaggaggacatcctgtggtgtaccgagatggagagagtgttcgggttcccagtccactacacagatgtcagcaacatgtctagactggccagacagagactgctgggaagaagctggtccgtccctgtgatcagacacctgttcgcccctctgaaggagtacttcgcctgcgtgagcagcggcaacagcaacgccaacagccggggccccagcttctctagcggcctggtgccactgtccctgagagggagccacatgggccccatggagatctacaaaaccgtgagcgcctggaagcggcagcctgtgcgcgtgctgagcctgtttcggaatatcgataaagtcctgaaaagcctgggattcctggagagcggctctggctccggcggtggcaccctgaagtacgtggaggatgtgacaaacgtggtcagacgggatgtggagaagtggggccccttcgatctggtgtacggcagcacccaacccctgggcagctcttgtgaccggtgccctggctggtacatgtttcagttccaccggatcctgcagtacgccctgccgagacaggagtcccagcggccattcttttggattttcatggacaacttgctgctgaccgaggatgaccaggaaactaccactcggttcctgcagaccgaagccgtgaccctgcaggacgtgagaggccgggactaccagaacgccatgcgggtgtggtccaacatccctggactgaaaagcaagcacgcacctctgacccctaaagaagaggagtacctgcaggcccaggtgcggagcagaagcaagctggacgcccctaaggtggatctgctggtgaagaattgcctcctgcccctgagagagtacttcaagtatttcagccagaatagtctgcccctgggaggcagcggcggcggcgccctggtgacatttgaggacgtcgccgtgcggttcacccaggaggaatgggctctgctggatccttctcagaaaatcctgtaccgggacgtgatgagagagacataccggaatctgacctccgtgggcatcaactgggaatgttgggaccttgaagcctgcttcagaagcctgggaagaaacctgagagtgcaggtggtgaagagaaagtgcgagctgaccaacagcggcccctgcgccgagggcggcccaagcagcggcgcccctcctcccagcggcggcagcccagccggctccccaacctctaccgaggagggcacctctgagtccgccacccccgagagcggccctggcacctccaccgagcccagcgagggcagcgcacccggcagccctgccggcagccccacctccacagaggagggaaccagcaccgagcccagcgaaggcagcgccccaggcaccagcaccgagcctagtgagcaggagattaaacggatcaacaagatcagaagaagacttgtgaaagacagcaacaccaagaaggccggcaagacaggccccatgaaaaccctgctggttagagtgatgacacccgatctgagagagcggctggaaaacctgagaaagaagcctgaaaatatcccccagcccatcagcaatacatctagagccaacctgaataagctgctgaccgattacaccgaaatgaagaaggcgatcctgcatgtgtactgggaagagttccagaaggaccctgtgggcctgatgagccgggtggcccagcctgccagcaagaagatcgatcagaacaagctgaaacctgagatggacgagaagggcaacctgaccaccgccggctttgcctgctctcagtgtggccagcccctgttcgtgtacaagctggagcaggtgtctgagaagggcaaggcttacaccaactacttcggacggtgcaatgtggccgagcacgaaaagctgatcctgctggcccagctgaagcccgagaaggatagcgacgaagccgtgacatatagcctgggaaagtttgggcagagggccctggatttctacagcattcatgtgaccaaggagtccacccaccccgtgaagcccctggcccagatcgccggaaacagatacgcctccggacctgtgggaaaggccctgagcgacgcatgtatgggcacaatcgcctccttcctgtctaagtaccaggacatcatcatcgaacaccagaaggtggtgaagggcaaccagaagagactggagagcctgcgggagctggccggcaaggaaaacctggaataccctagcgtgaccctgccacctcagcctcacaccaaggagggcgttgatgcctacaacgaagtgatcgcccgggtgcgaatgtgggtgaacctgaacctgtggcagaagctgaagctaagcagagatgatgccaagcctctgctgagactgaagggattcccttcctttcctctggtcgagagacaggccaacgaagtggactggtgggacatggtgtgtaacgtgaagaagctgatcaacgagaaaaaggaggatggcaaggtgttttggcagaatctggctggctacaagagacaggaagccctgagaccatacctgagcagcgaggaagatcggaagaagggaaagaaattcgctcggtaccagctgggcgacctgctgctgcacctggaaaagaagcacggcgaggactggggaaaggtgtacgacgaggcctgggagcggattgacaagaaagtggaaggcctgagcaagcacatcaagctggaagaggaacggagaagcgaggacgcccagagcaaggccgccctgaccgactggctgcgggctaaggccagcttcgtgatcgagggcctgaaggaggccgacaaggacgagttctgcagatgcgagctgaagctgcagaagtggtacggggacctgcggggaaagcccttcgccatcgaagccgagaacagcatcctggacatcagcggcttcagcaagcagtacaactgtgccttcatctggcagaaggacggcgtgaagaagctgaacctgtacctgatcatcaactacttcaagggcggcaagctgcggttcaagaagatcaaacctgaagccttcgaagccaacagattctacaccgtgatcaacaaaaagagcggcgagatcgtgcccatggaggtgaacttcaacttcgacgaccccaacctgatcatcctgcctctggcctttggcaagagacagggcagagaattcatctggaacgacctgctgtccctggaaaccggcagcctgaagctggccaacggaagagtgatcgagaagacactgtacaacagaagaacccggcaggatgagcctgccctgttcgtggccctgaccttcgagcggcgggaggtcctggactcctccaatatcaaaccaatgaacctgatcggcgtggcaagaggcgaaaacatccccgccgtgatcgccctgaccgaccccgagggctgcccactgagccggtttaaggatagcctgggaaacccaacccacatcctgagaatcggcgagagctataaggagaagcagcggaccatccaggccaagaaggaggtggagcagcggagagccggcggctacagccggaagtacgccagcaaagccaagaatctggcagacgatatggtgagaaacaccgctagagatctgctgtactacgccgtgacccaggatgccatgctgatcttcgccaacctgagccggggcttcggccggcagggcaagcggaccttcatggccgagagacagtacacacggatggaggactggctgaccgccaagctggcctacgagggcctgagcaagacctacctgtccaagacactggcccagtacacctccaagacatgcagcaactgtgggtttaccatcaccagcgccgactacgacagggtgctggagaagctgaagaagacagcaacaggctggatgaccacaattaacggcaaggagctgaaggtggagggccagattacctactacaacagatacaagagacagaacgtagtcaaggacctgtccgtcgagctggatagactgagcgaagaatctgtgaacaacgacatctcctcctggacaaagggcagaagcggagaagctctgagcctcctgaagaaaagattctcccatagacccgtgcaggagaagttcgtgtgcctgaactgcggcttcgagacacacgcagccgagcaagccgccctgaacatcgccagatcctggctgttcctgcggagccaggagtacaagaaataccagacaaacaagacaaccggcaacaccgataagagagccttcgtcgagacctggcagtccttttaccggaagaagcttaaggaggtgtggaaacctgccgtgcggtctggcggatctggcggaggctccatgatcgagtaccagatccccgtgagcttcaaggacgtggtggtgggcttcacccaggaggagtggcaccagctgagccccgcccagagggccctgtacagggacgtgatgctggagacctacagcaacctggtgagcgtgggctacgagggcaccaagcccgacgtgatcctgaggctggagcaggaggaggccccctggatcggcgaggccgcctgccccggctgccactgctgggaggacggcggcccaagcagcggcgcccctcctcccagcggcggcagcccagccggctccccaacctctaccgaggagggcacctctgagtccgccacccccgagagcggccctggcacctccaccgagcccagcgagggcagcgcacccggcagccctgccggcagccccacctccacagaggagggaaccagcaccgagcccagcgaaggcagcgccccaggcaccagcaccgagcctagtgagcaggagattaaacggatcaacaagatcagaagaagacttgtgaaagacagcaacaccaagaaggccggcaagacaggccccatgaaaaccctgctggttagagtgatgacacccgatctgagagagcggctggaaaacctgagaaagaagcctgaaaatatcccccagcccatcagcaatacatctagagccaacctgaataagctgctgaccgattacaccgaaatgaagaaggcgatcctgcatgtgtactgggaagagttccagaaggaccctgtgggcctgatgagccgggtggcccagcctgccagcaagaagatcgatcagaacaagctgaaacctgagatggacgagaagggcaacctgaccaccgccggctttgcctgctctcagtgtggccagcccctgttcgtgtacaagctggagcaggtgtctgagaagggcaaggcttacaccaactacttcggacggtgcaatgtggccgagcacgaaaagctgatcctgctggcccagctgaagcccgagaaggatagcgacgaagccgtgacatatagcctgggaaagtttgggcagagggccctggatttctacagcattcatgtgaccaaggagtccacccaccccgtgaagcccctggcccagatcgccggaaacagatacgcctccggacctgtgggaaaggccctgagcgacgcatgtatgggcacaatcgcctccttcctgtctaagtaccaggacatcatcatcgaacaccagaaggtggtgaagggcaaccagaagagactggagagcctgcgggagctggccggcaaggaaaacctggaataccctagcgtgaccctgccacctcagcctcacaccaaggagggcgttgatgcctacaacgaagtgatcgcccgggtgcgaatgtgggtgaacctgaacctgtggcagaagctgaagctaagcagagatgatgccaagcctctgctgagactgaagggattcccttcctttcctctggtcgagagacaggccaacgaagtggactggtgggacatggtgtgtaacgtgaagaagctgatcaacgagaaaaaggaggatggcaaggtgttttggcagaatctggctggctacaagagacaggaagccctgagaccatacctgagcagcgaggaagatcggaagaagggaaagaaattcgctcggtaccagctgggcgacctgctgctgcacctggaaaagaagcacggcgaggactggggaaaggtgtacgacgaggcctgggagcggattgacaagaaagtggaaggcctgagcaagcacatcaagctggaagaggaacggagaagcgaggacgcccagagcaaggccgccctgaccgactggctgcgggctaaggccagcttcgtgatcgagggcctgaaggaggccgacaaggacgagttctgcagatgcgagctgaagctgcagaagtggtacggggacctgcggggaaagcccttcgccatcgaagccgagaacagcatcctggacatcagcggcttcagcaagcagtacaactgtgccttcatctggcagaaggacggcgtgaagaagctgaacctgtacctgatcatcaactacttcaagggcggcaagctgcggttcaagaagatcaaacctgaagccttcgaagccaacagattctacaccgtgatcaacaaaaagagcggcgagatcgtgcccatggaggtgaacttcaacttcgacgaccccaacctgatcatcctgcctctggcctttggcaagagacagggcagagaattcatctggaacgacctgctgtccctggaaaccggcagcctgaagctggccaacggaagagtgatcgagaagacactgtacaacagaagaacccggcaggatgagcctgccctgttcgtggccctgaccttcgagcggcgggaggtcctggactcctccaatatcaaaccaatgaacctgatcggcgtggcaagaggcgaaaacatccccgccgtgatcgccctgaccgaccccgagggctgcccactgagccggtttaaggatagcctgggaaacccaacccacatcctgagaatcggcgagagctataaggagaagcagcggaccatccaggccaagaaggaggtggagcagcggagagccggcggctacagccggaagtacgccagcaaagccaagaatctggcagacgatatggtgagaaacaccgctagagatctgctgtactacgccgtgacccaggatgccatgctgatcttcgccaacctgagccggggcttcggccggcagggcaagcggaccttcatggccgagagacagtacacacggatggaggactggctgaccgccaagctggcctacgagggcctgagcaagacctacctgtccaagacactggcccagtacacctccaagacatgcagcaactgtgggtttaccatcaccagcgccgactacgacagggtgctggagaagctgaagaagacagcaacaggctggatgaccacaattaacggcaaggagctgaaggtggagggccagattacctactacaacagatacaagagacagaacgtagtcaaggacctgtccgtcgagctggatagactgagcgaagaatctgtgaacaacgacatctcctcctggacaaagggcagaagcggagaagctctgagcctcctgaagaaaagattctcccatagacccgtgcaggagaagttcgtgtgcctgaactgcggcttcgagacacacgcagccgagcaagccgccctgaacatcgccagatcctggctgttcctgcggagccaggagtacaagaaataccagacaaacaagacaaccggcaacaccgataagagagccttcgtcgagacctggcagtccttttaccggaagaagcttaaggaggtgtggaaacctgccgtgcggtctggcggatctggcggaggctcctatgatcgagtaccagatccccgtgagcttcaaggacgtggtggtgggcttcacccaggaggagtggcaccagctgagccccgcccagagggccctgtacagggacgtgatgctggagacctacagcaacctggtgagcgtgggctacgagggcaccaagcccgacgtgatcctgaggctggagcaggaggaggccccctggatcggcgaggccgcctgccccggctgccactgctgggaggacggatctggctccggcagcggccccaagaaaaagagaaaagtctaagctgccttctgcggggcttgccttctggccatgcccttcttctctcccttgcacctgtacctcttggtctttgaataaagcctgagtaggaaggctagcaaaaaaaaaaaaaaaaaaaaaaaaaaaaaaaaaaaaaaaaaaaaaaaaaaaaaaaaaaaaaaaaaaaaaaaaaaaaaaaa

SEQ ID NO: 15665 - RNA, 9485 nt, synthetic construct
  source 1..9485: mol_type = other RNA
aggaaataagagagaaaagaagagtaagaagaaatataagagccaccatggcccctaagaagaagcgtaaagtgagccggatggaacgcctcgtctacgaggtgcggcagaagtgcagaaacatcgaggacatctgcatctcctgcggatctctgaacgtgaccctggagcacccactgttcatcggcggcatgtgccagaactgtaaaaactgttttctggagtgtgcctatcaatacgacgatgacggctaccagagctactgcaccatctgttgcggcggaagagaggtgctgatgtgtggaaataacaactgctgccggtgcttctgcgtggaatgcgtggacctgctggtgggccccggcgccgcccaggccgctattaaggaagatccttggaactgctacatgtgcggccacaagggcacatacggcctgctgagacggagagaggactggcctagcagactgcagatgttcttcgccaataaccacgaccaggagttcgacccccctaaggtgtaccctcccgtccccgccgagaagagaaagcccatccgggtcctgagcctgttcgatggcatcgccaccggtctgctggtgctgaaggacctgggcatccaggtggataggtacattgcctccgaggtgtgcgaggactccatcaccgtgggaatggtgcgtcatcagggcaagatcatgtacgtgggcgacgtgcggagcgtgacacagaagcatatccaggagtggggccctttcgacctggtgatcggcggcagcccttgcaatgacctgagcatcgtgaacccagcccggaagggcctgtacgagggaaccggcagactgttcttcgagttttacagactgctgcacgacgcccggcctaaggaaggcgacgaccggcccttcttttggctgttcgagaatgtggtggccatgggagtcagcgacaagcgggatattagccggttcctggagagcaaccccgtgatgatcgatgccaaggaagtgagcgccgcccaccgggccagatacttctggggcaatctgcctggcatgaacagacccctggccagcaccgtgaacgacaagctggagctgcaggagtgcctggagcacggccggatcgccaagttcagcaaggtgagaaccatcaccacccgaagcaacagcatcaaacaaggcaaggaccagcactttcctgtgttcatgaacgagaaggaggacatcctgtggtgtaccgagatggagagagtgttcgggttcccagtccactacacagatgtcagcaacatgtctagactggccagacagagactgctgggaagaagctggtccgtccctgtgatcagacacctgttcgcccctctgaaggagtacttcgcctgcgtgagcagcggcaacagcaacgccaacagccggggccccagcttctctagcggcctggtgccactgtccctgagagggagccacatgggccccatggagatctacaaaaccgtgagcgcctggaagcggcagcctgtgcgcgtgctgagcctgtttcggaatatcgataaagtcctgaaaagcctgggattcctggagagcggctctggctccggcggtggcaccctgaagtacgtggaggatgtgacaaacgtggtcagacgggatgtggagaagtggggccccttcgatctggtgtacggcagcacccaacccctgggcagctcttgtgaccggtgccctggctggtacatgtttcagttccaccggatcctgcagtacgccctgccgagacaggagtcccagcggccattcttttggattttcatggacaacttgctgctgaccgaggatgaccaggaaactaccactcggttcctgcagaccgaagccgtgaccctgcaggacgtgagaggccgggactaccagaacgccatgcgggtgtggtccaacatccctggactgaaaagcaagcacgcacctctgacccctaaagaagaggagtacctgcaggcccaggtgcggagcagaagcaagctggacgcccctaaggtggatctgctggtgaagaattgcctcctgcccctgagagagtacttcaagtatttcagccagaatagtctgcccctgggaggcagcggcggcggcgccctggtgacatttgaggacgtcgccgtgcggttcacccaggaggaatgggctctgctggatccttctcagaaaatcctgtaccgggacgtgatgagagagacataccggaatctgacctccgtgggcatcaactgggaatgttgggaccttgaagcctgcttcagaagcctgggaagaaacctgagagtgcaggtggtgaagagaaagtgcgagctgaccaacagcggcccctgcgccgagggcggcccaagcagcggcgcccctcctcccagcggcggcagcccagccggctccccaacctctaccgaggagggcacctctgagtccgccacccccgagagcggccctggcacctccaccgagcccagcgagggcagcgcacccggcagccctgccggcagccccacctccacagaggagggaaccagcaccgagcccagcgaaggcagcgccccaggcaccagcaccgagcctagtgagcaggagattaaacggatcaacaagatcagaagaagacttgtgaaagacagcaacaccaagaaggccggcaagacaggccccatgaaaaccctgctggttagagtgatgacacccgatctgagagagcggctggaaaacctgagaaagaagcctgaaaatatcccccagcccatcagcaatacatctagagccaacctgaataagctgctgaccgattacaccgaaatgaagaaggcgatcctgcatgtgtactgggaagagttccagaaggaccctgtgggcctgatgagccgggtggcccagcctgccagcaagaagatcgatcagaacaagctgaaacctgagatggacgagaagggcaacctgaccaccgccggctttgcctgctctcagtgtggccagcccctgttcgtgtacaagctggagcaggtgtctgagaagggcaaggcttacaccaactacttcggacggtgcaatgtggccgagcacgaaaagctgatcctgctggcccagctgaagcccgagaaggatagcgacgaagccgtgacatatagcctgggaaagtttgggcagagggccctggatttctacagcattcatgtgaccaaggagtccacccaccccgtgaagcccctggcccagatcgccggaaacagatacgcctccggacctgtgggaaaggccctgagcgacgcatgtatgggcacaatcgcctccttcctgtctaagtaccaggacatcatcatcgaacaccagaaggtggtgaagggcaaccagaagagactggagagcctgcgggagctggccggcaaggaaaacctggaataccctagcgtgaccctgccacctcagcctcacaccaaggagggcgttgatgcctacaacgaagtgatcgcccgggtgcgaatgtgggtgaacctgaacctgtggcagaagctgaagctaagcagagatgatgccaagcctctgctgagactgaagggattcccttcctttcctctggtcgagagacaggccaacgaagtggactggtgggacatggtgtgtaacgtgaagaagctgatcaacgagaaaaaggaggatggcaaggtgttttggcagaatctggctggctacaagagacaggaagccctgagaccatacctgagcagcgaggaagatcggaagaagggaaagaaattcgctcggtaccagctgggcgacctgctgctgcacctggaaaagaagcacggcgaggactggggaaaggtgtacgacgaggcctgggagcggattgacaagaaagtggaaggcctgagcaagcacatcaagctggaagaggaacggagaagcgaggacgcccagagcaaggccgccctgaccgactggctgcgggctaaggccagcttcgtgatcgagggcctgaaggaggccgacaaggacgagttctgcagatgcgagctgaagctgcagaagtggtacggggacctgcggggaaagcccttcgccatcgaagccgagaacagcatcctggacatcagcggcttcagcaagcagtacaactgtgccttcatctggcagaaggacggcgtgaagaagctgaacctgtacctgatcatcaactacttcaagggcggcaagctgcggttcaagaagatcaaacctgaagccttcgaagccaacagattctacaccgtgatcaacaaaaagagcggcgagatcgtgcccatggaggtgaacttcaacttcgacgaccccaacctgatcatcctgcctctggcctttggcaagagacagggcagagaattcatctggaacgacctgctgtccctggaaaccggcagcctgaagctggccaacggaagagtgatcgagaagacactgtacaacagaagaacccggcaggatgagcctgccctgttcgtggccctgaccttcgagcggcgggaggtcctggactcctccaatatcaaaccaatgaacctgatcggcgtggcaagaggcgaaaacatccccgccgtgatcgccctgaccgaccccgagggctgcccactgagccggtttaaggatagcctgggaaacccaacccacatcctgagaatcggcgagagctataaggagaagcagcggaccatccaggccaagaaggaggtggagcagcggagagccggcggctacagccggaagtacgccagcaaagccaagaatctggcagacgatatggtgagaaacaccgctagagatctgctgtactacgccgtgacccaggatgccatgctgatcttcgccaacctgagccggggcttcggccggcagggcaagcggaccttcatggccgagagacagtacacacggatggaggactggctgaccgccaagctggcctacgagggcctgagcaagacctacctgtccaagacactggcccagtacacctccaagacatgcagcaactgtgggtttaccatcaccagcgccgactacgacagggtgctggagaagctgaagaagacagcaacaggctggatgaccacaattaacggcaaggagctgaaggtggagggccagattacctactacaacagatacaagagacagaacgtagtcaaggacctgtccgtcgagctggatagactgagcgaagaatctgtgaacaacgacatctcctcctggacaaagggcagaagcggagaagctctgagcctcctgaagaaaagattctcccatagacccgtgcaggagaagttcgtgtgcctgaactgcggcttcgagacacacgcagccgagcaagccgccctgaacatcgccagatcctggctgttcctgcggagccaggagtacaagaaataccagacaaacaagacaaccggcaacaccgataagagagccttcgtcgagacctggcagtccttttaccggaagaagcttaaggaggtgtggaaacctgccgtgcggtctggcggatctggcggaggctccccccaggagctggtgaccttcgaggacgtggccgtgtacctgagcaaggaggagtggggcctgctggaccccgcccagaggaggctgtacagggacgtgatgctggagaactacggcaacgtggccagcctgggcctgcccgtgagcaagcccgacctgatcagccagctggagaggaccgacctgcccctggtgcccaggctgccccagaccgagatcgaggacctgttcgacgagaagctgggcggcccaagcagcggcgcccctcctcccagcggcggcagcccagccggctccccaacctctaccgaggagggcacctctgagtccgccacccccgagagcggccctggcacctccaccgagcccagcgagggcagcgcacccggcagccctgccggcagccccacctccacagaggagggaaccagcaccgagcccagcgaaggcagcgccccaggcaccagcaccgagcctagtgagcaggagattaaacggatcaacaagatcagaagaagacttgtgaaagacagcaacaccaagaaggccggcaagacaggccccatgaaaaccctgctggttagagtgatgacacccgatctgagagagcggctggaaaacctgagaaagaagcctgaaaatatcccccagcccatcagcaatacatctagagccaacctgaataagctgctgaccgattacaccgaaatgaagaaggcgatcctgcatgtgtactgggaagagttccagaaggaccctgtgggcctgatgagccgggtggcccagcctgccagcaagaagatcgatcagaacaagctgaaacctgagatggacgagaagggcaacctgaccaccgccggctttgcctgctctcagtgtggccagcccctgttcgtgtacaagctggagcaggtgtctgagaagggcaaggcttacaccaactacttcggacggtgcaatgtggccgagcacgaaaagctgatcctgctggcccagctgaagcccgagaaggatagcgacgaagccgtgacatatagcctgggaaagtttgggcagagggccctggatttctacagcattcatgtgaccaaggagtccacccaccccgtgaagcccctggcccagatcgccggaaacagatacgcctccggacctgtgggaaaggccctgagcgacgcatgtatgggcacaatcgcctccttcctgtctaagtaccaggacatcatcatcgaacaccagaaggtggtgaagggcaaccagaagagactggagagcctgcgggagctggccggcaaggaaaacctggaataccctagcgtgaccctgccacctcagcctcacaccaaggagggcgttgatgcctacaacgaagtgatcgcccgggtgcgaatgtgggtgaacctgaacctgtggcagaagctgaagctaagcagagatgatgccaagcctctgctgagactgaagggattcccttcctttcctctggtcgagagacaggccaacgaagtggactggtgggacatggtgtgtaacgtgaagaagctgatcaacgagaaaaaggaggatggcaaggtgttttggcagaatctggctggctacaagagacaggaagccctgagaccatacctgagcagcgaggaagatcggaagaagggaaagaaattcgctcggtaccagctgggcgacctgctgctgcacctggaaaagaagcacggcgaggactggggaaaggtgtacgacgaggcctgggagcggattgacaagaaagtggaaggcctgagcaagcacatcaagctggaagaggaacggagaagcgaggacgcccagagcaaggccgccctgaccgactggctgcgggctaaggccagcttcgtgatcgagggcctgaaggaggccgacaaggacgagttctgcagatgcgagctgaagctgcagaagtggtacggggacctgcggggaaagcccttcgccatcgaagccgagaacagcatcctggacatcagcggcttcagcaagcagtacaactgtgccttcatctggcagaaggacggcgtgaagaagctgaacctgtacctgatcatcaactacttcaagggcggcaagctgcggttcaagaagatcaaacctgaagccttcgaagccaacagattctacaccgtgatcaacaaaaagagcggcgagatcgtgcccatggaggtgaacttcaacttcgacgaccccaacctgatcatcctgcctctggcctttggcaagagacagggcagagaattcatctggaacgacctgctgtccctggaaaccggcagcctgaagctggccaacggaagagtgatcgagaagacactgtacaacagaagaacccggcaggatgagcctgccctgttcgtggccctgaccttcgagcggcgggaggtcctggactcctccaatatcaaaccaatgaacctgatcggcgtggcaagaggcgaaaacatccccgccgtgatcgccctgaccgaccccgagggctgcccactgagccggtttaaggatagcctgggaaacccaacccacatcctgagaatcggcgagagctataaggagaagcagcggaccatccaggccaagaaggaggtggagcagcggagagccggcggctacagccggaagtacgccagcaaagccaagaatctggcagacgatatggtgagaaacaccgctagagatctgctgtactacgccgtgacccaggatgccatgctgatcttcgccaacctgagccggggcttcggccggcagggcaagcggaccttcatggccgagagacagtacacacggatggaggactggctgaccgccaagctggcctacgagggcctgagcaagacctacctgtccaagacactggcccagtacacctccaagacatgcagcaactgtgggtttaccatcaccagcgccgactacgacagggtgctggagaagctgaagaagacagcaacaggctggatgaccacaattaacggcaaggagctgaaggtggagggccagattacctactacaacagatacaagagacagaacgtagtcaaggacctgtccgtcgagctggatagactgagcgaagaatctgtgaacaacgacatctcctcctggacaaagggcagaagcggagaagctctgagcctcctgaagaaaagattctcccatagacccgtgcaggagaagttcgtgtgcctgaactgcggcttcgagacacacgcagccgagcaagccgccctgaacatcgccagatcctggctgttcctgcggagccaggagtacaagaaataccagacaaacaagacaaccggcaacaccgataagagagccttcgtcgagacctggcagtccttttaccggaagaagcttaaggaggtgtggaaacctgccgtgcggtctggcggatctggcggaggctcctccccaggagctggtgaccttcgaggacgtggccgtgtacctgagcaaggaggagtggggcctgctggaccccgcccagaggaggctgtacagggacgtgatgctggagaactacggcaacgtggccagcctgggcctgcccgtgagcaagcccgacctgatcagccagctggagaggaccgacctgcccctggtgcccaggctgccccagaccgagatcgaggacctgttcgacgagaagctgggatctggctccggcagcggccccaagaaaaagagaaaagtctaagctgccttctgcggggcttgccttctggccatgcccttcttctctcccttgcacctgtacctcttggtctttgaataaagcctgagtaggaaggctagcaaaaaaaaaaaaaaaaaaaaaaaaaaaaaaaaaaaaaaaaaaaaaaaaaaaaaaaaaaaaaaaaaaaaaaaaaaaaaaaa

SEQ ID NO: 15666 - RNA, 9485 nt, synthetic construct
  source 1..9485: mol_type = other RNA
aggaaataagagagaaaagaagagtaagaagaaatataagagccaccatggcccctaagaagaagcgtaaagtgagccggatggaacgcctcgtctacgaggtgcggcagaagtgcagaaacatcgaggacatctgcatctcctgcggatctctgaacgtgaccctggagcacccactgttcatcggcggcatgtgccagaactgtaaaaactgttttctggagtgtgcctatcaatacgacgatgacggctaccagagctactgcaccatctgttgcggcggaagagaggtgctgatgtgtggaaataacaactgctgccggtgcttctgcgtggaatgcgtggacctgctggtgggccccggcgccgcccaggccgctattaaggaagatccttggaactgctacatgtgcggccacaagggcacatacggcctgctgagacggagagaggactggcctagcagactgcagatgttcttcgccaataaccacgaccaggagttcgacccccctaaggtgtaccctcccgtccccgccgagaagagaaagcccatccgggtcctgagcctgttcgatggcatcgccaccggtctgctggtgctgaaggacctgggcatccaggtggataggtacattgcctccgaggtgtgcgaggactccatcaccgtgggaatggtgcgtcatcagggcaagatcatgtacgtgggcgacgtgcggagcgtgacacagaagcatatccaggagtggggccctttcgacctggtgatcggcggcagcccttgcaatgacctgagcatcgtgaacccagcccggaagggcctgtacgagggaaccggcagactgttcttcgagttttacagactgctgcacgacgcccggcctaaggaaggcgacgaccggcccttcttttggctgttcgagaatgtggtggccatgggagtcagcgacaagcgggatattagccggttcctggagagcaaccccgtgatgatcgatgccaaggaagtgagcgccgcccaccgggccagatacttctggggcaatctgcctggcatgaacagacccctggccagcaccgtgaacgacaagctggagctgcaggagtgcctggagcacggccggatcgccaagttcagcaaggtgagaaccatcaccacccgaagcaacagcatcaaacaaggcaaggaccagcactttcctgtgttcatgaacgagaaggaggacatcctgtggtgtaccgagatggagagagtgttcgggttcccagtccactacacagatgtcagcaacatgtctagactggccagacagagactgctgggaagaagctggtccgtccctgtgatcagacacctgttcgcccctctgaaggagtacttcgcctgcgtgagcagcggcaacagcaacgccaacagccggggccccagcttctctagcggcctggtgccactgtccctgagagggagccacatgggccccatggagatctacaaaaccgtgagcgcctggaagcggcagcctgtgcgcgtgctgagcctgtttcggaatatcgataaagtcctgaaaagcctgggattcctggagagcggctctggctccggcggtggcaccctgaagtacgtggaggatgtgacaaacgtggtcagacgggatgtggagaagtggggccccttcgatctggtgtacggcagcacccaacccctgggcagctcttgtgaccggtgccctggctggtacatgtttcagttccaccggatcctgcagtacgccctgccgagacaggagtcccagcggccattcttttggattttcatggacaacttgctgctgaccgaggatgaccaggaaactaccactcggttcctgcagaccgaagccgtgaccctgcaggacgtgagaggccgggactaccagaacgccatgcgggtgtggtccaacatccctggactgaaaagcaagcacgcacctctgacccctaaagaagaggagtacctgcaggcccaggtgcggagcagaagcaagctggacgcccctaaggtggatctgctggtgaagaattgcctcctgcccctgagagagtacttcaagtatttcagccagaatagtctgcccctgggaggcagcggcggcggcgccctggtgacatttgaggacgtcgccgtgcggttcacccaggaggaatgggctctgctggatccttctcagaaaatcctgtaccgggacgtgatgagagagacataccggaatctgacctccgtgggcatcaactgggaatgttgggaccttgaagcctgcttcagaagcctgggaagaaacctgagagtgcaggtggtgaagagaaagtgcgagctgaccaacagcggcccctgcgccgagggcggcccaagcagcggcgcccctcctcccagcggcggcagcccagccggctccccaacctctaccgaggagggcacctctgagtccgccacccccgagagcggccctggcacctccaccgagcccagcgagggcagcgcacccggcagccctgccggcagccccacctccacagaggagggaaccagcaccgagcccagcgaaggcagcgccccaggcaccagcaccgagcctagtgagcaggagattaaacggatcaacaagatcagaagaagacttgtgaaagacagcaacaccaagaaggccggcaagacaggccccatgaaaaccctgctggttagagtgatgacacccgatctgagagagcggctggaaaacctgagaaagaagcctgaaaatatcccccagcccatcagcaatacatctagagccaacctgaataagctgctgaccgattacaccgaaatgaagaaggcgatcctgcatgtgtactgggaagagttccagaaggaccctgtgggcctgatgagccgggtggcccagcctgccagcaagaagatcgatcagaacaagctgaaacctgagatggacgagaagggcaacctgaccaccgccggctttgcctgctctcagtgtggccagcccctgttcgtgtacaagctggagcaggtgtctgagaagggcaaggcttacaccaactacttcggacggtgcaatgtggccgagcacgaaaagctgatcctgctggcccagctgaagcccgagaaggatagcgacgaagccgtgacatatagcctgggaaagtttgggcagagggccctggatttctacagcattcatgtgaccaaggagtccacccaccccgtgaagcccctggcccagatcgccggaaacagatacgcctccggacctgtgggaaaggccctgagcgacgcatgtatgggcacaatcgcctccttcctgtctaagtaccaggacatcatcatcgaacaccagaaggtggtgaagggcaaccagaagagactggagagcctgcgggagctggccggcaaggaaaacctggaataccctagcgtgaccctgccacctcagcctcacaccaaggagggcgttgatgcctacaacgaagtgatcgcccgggtgcgaatgtgggtgaacctgaacctgtggcagaagctgaagctaagcagagatgatgccaagcctctgctgagactgaagggattcccttcctttcctctggtcgagagacaggccaacgaagtggactggtgggacatggtgtgtaacgtgaagaagctgatcaacgagaaaaaggaggatggcaaggtgttttggcagaatctggctggctacaagagacaggaagccctgagaccatacctgagcagcgaggaagatcggaagaagggaaagaaattcgctcggtaccagctgggcgacctgctgctgcacctggaaaagaagcacggcgaggactggggaaaggtgtacgacgaggcctgggagcggattgacaagaaagtggaaggcctgagcaagcacatcaagctggaagaggaacggagaagcgaggacgcccagagcaaggccgccctgaccgactggctgcgggctaaggccagcttcgtgatcgagggcctgaaggaggccgacaaggacgagttctgcagatgcgagctgaagctgcagaagtggtacggggacctgcggggaaagcccttcgccatcgaagccgagaacagcatcctggacatcagcggcttcagcaagcagtacaactgtgccttcatctggcagaaggacggcgtgaagaagctgaacctgtacctgatcatcaactacttcaagggcggcaagctgcggttcaagaagatcaaacctgaagccttcgaagccaacagattctacaccgtgatcaacaaaaagagcggcgagatcgtgcccatggaggtgaacttcaacttcgacgaccccaacctgatcatcctgcctctggcctttggcaagagacagggcagagaattcatctggaacgacctgctgtccctggaaaccggcagcctgaagctggccaacggaagagtgatcgagaagacactgtacaacagaagaacccggcaggatgagcctgccctgttcgtggccctgaccttcgagcggcgggaggtcctggactcctccaatatcaaaccaatgaacctgatcggcgtggcaagaggcgaaaacatccccgccgtgatcgccctgaccgaccccgagggctgcccactgagccggtttaaggatagcctgggaaacccaacccacatcctgagaatcggcgagagctataaggagaagcagcggaccatccaggccaagaaggaggtggagcagcggagagccggcggctacagccggaagtacgccagcaaagccaagaatctggcagacgatatggtgagaaacaccgctagagatctgctgtactacgccgtgacccaggatgccatgctgatcttcgccaacctgagccggggcttcggccggcagggcaagcggaccttcatggccgagagacagtacacacggatggaggactggctgaccgccaagctggcctacgagggcctgagcaagacctacctgtccaagacactggcccagtacacctccaagacatgcagcaactgtgggtttaccatcaccagcgccgactacgacagggtgctggagaagctgaagaagacagcaacaggctggatgaccacaattaacggcaaggagctgaaggtggagggccagattacctactacaacagatacaagagacagaacgtagtcaaggacctgtccgtcgagctggatagactgagcgaagaatctgtgaacaacgacatctcctcctggacaaagggcagaagcggagaagctctgagcctcctgaagaaaagattctcccatagacccgtgcaggagaagttcgtgtgcctgaactgcggcttcgagacacacgcagccgagcaagccgccctgaacatcgccagatcctggctgttcctgcggagccaggagtacaagaaataccagacaaacaagacaaccggcaacaccgataagagagccttcgtcgagacctggcagtccttttaccggaagaagcttaaggaggtgtggaaacctgccgtgcggtctggcggatctggcggaggctccccccagggcctggtgaccttcggcgacgtggccgtggacttcagccaggaggagtgggagtggctgaaccccaaccagaggaacctgtacaggaaggtgatgctggagaactacaagaacctggccagcctgggcctgtgcgtgagcaagcccgacgtgatcagcagcctggagcagggcaaggagccctggaccgtgaagaggaagatgaccagggcctggtgccccgacctgaagatcgtgggcggcccaagcagcggcgcccctcctcccagcggcggcagcccagccggctccccaacctctaccgaggagggcacctctgagtccgccacccccgagagcggccctggcacctccaccgagcccagcgagggcagcgcacccggcagccctgccggcagccccacctccacagaggagggaaccagcaccgagcccagcgaaggcagcgccccaggcaccagcaccgagcctagtgagcaggagattaaacggatcaacaagatcagaagaagacttgtgaaagacagcaacaccaagaaggccggcaagacaggccccatgaaaaccctgctggttagagtgatgacacccgatctgagagagcggctggaaaacctgagaaagaagcctgaaaatatcccccagcccatcagcaatacatctagagccaacctgaataagctgctgaccgattacaccgaaatgaagaaggcgatcctgcatgtgtactgggaagagttccagaaggaccctgtgggcctgatgagccgggtggcccagcctgccagcaagaagatcgatcagaacaagctgaaacctgagatggacgagaagggcaacctgaccaccgccggctttgcctgctctcagtgtggccagcccctgttcgtgtacaagctggagcaggtgtctgagaagggcaaggcttacaccaactacttcggacggtgcaatgtggccgagcacgaaaagctgatcctgctggcccagctgaagcccgagaaggatagcgacgaagccgtgacatatagcctgggaaagtttgggcagagggccctggatttctacagcattcatgtgaccaaggagtccacccaccccgtgaagcccctggcccagatcgccggaaacagatacgcctccggacctgtgggaaaggccctgagcgacgcatgtatgggcacaatcgcctccttcctgtctaagtaccaggacatcatcatcgaacaccagaaggtggtgaagggcaaccagaagagactggagagcctgcgggagctggccggcaaggaaaacctggaataccctagcgtgaccctgccacctcagcctcacaccaaggagggcgttgatgcctacaacgaagtgatcgcccgggtgcgaatgtgggtgaacctgaacctgtggcagaagctgaagctaagcagagatgatgccaagcctctgctgagactgaagggattcccttcctttcctctggtcgagagacaggccaacgaagtggactggtgggacatggtgtgtaacgtgaagaagctgatcaacgagaaaaaggaggatggcaaggtgttttggcagaatctggctggctacaagagacaggaagccctgagaccatacctgagcagcgaggaagatcggaagaagggaaagaaattcgctcggtaccagctgggcgacctgctgctgcacctggaaaagaagcacggcgaggactggggaaaggtgtacgacgaggcctgggagcggattgacaagaaagtggaaggcctgagcaagcacatcaagctggaagaggaacggagaagcgaggacgcccagagcaaggccgccctgaccgactggctgcgggctaaggccagcttcgtgatcgagggcctgaaggaggccgacaaggacgagttctgcagatgcgagctgaagctgcagaagtggtacggggacctgcggggaaagcccttcgccatcgaagccgagaacagcatcctggacatcagcggcttcagcaagcagtacaactgtgccttcatctggcagaaggacggcgtgaagaagctgaacctgtacctgatcatcaactacttcaagggcggcaagctgcggttcaagaagatcaaacctgaagccttcgaagccaacagattctacaccgtgatcaacaaaaagagcggcgagatcgtgcccatggaggtgaacttcaacttcgacgaccccaacctgatcatcctgcctctggcctttggcaagagacagggcagagaattcatctggaacgacctgctgtccctggaaaccggcagcctgaagctggccaacggaagagtgatcgagaagacactgtacaacagaagaacccggcaggatgagcctgccctgttcgtggccctgaccttcgagcggcgggaggtcctggactcctccaatatcaaaccaatgaacctgatcggcgtggcaagaggcgaaaacatccccgccgtgatcgccctgaccgaccccgagggctgcccactgagccggtttaaggatagcctgggaaacccaacccacatcctgagaatcggcgagagctataaggagaagcagcggaccatccaggccaagaaggaggtggagcagcggagagccggcggctacagccggaagtacgccagcaaagccaagaatctggcagacgatatggtgagaaacaccgctagagatctgctgtactacgccgtgacccaggatgccatgctgatcttcgccaacctgagccggggcttcggccggcagggcaagcggaccttcatggccgagagacagtacacacggatggaggactggctgaccgccaagctggcctacgagggcctgagcaagacctacctgtccaagacactggcccagtacacctccaagacatgcagcaactgtgggtttaccatcaccagcgccgactacgacagggtgctggagaagctgaagaagacagcaacaggctggatgaccacaattaacggcaaggagctgaaggtggagggccagattacctactacaacagatacaagagacagaacgtagtcaaggacctgtccgtcgagctggatagactgagcgaagaatctgtgaacaacgacatctcctcctggacaaagggcagaagcggagaagctctgagcctcctgaagaaaagattctcccatagacccgtgcaggagaagttcgtgtgcctgaactgcggcttcgagacacacgcagccgagcaagccgccctgaacatcgccagatcctggctgttcctgcggagccaggagtacaagaaataccagacaaacaagacaaccggcaacaccgataagagagccttcgtcgagacctggcagtccttttaccggaagaagcttaaggaggtgtggaaacctgccgtgcggtctggcggatctggcggaggctcctccccagggcctggtgaccttcggcgacgtggccgtggacttcagccaggaggagtgggagtggctgaaccccaaccagaggaacctgtacaggaaggtgatgctggagaactacaagaacctggccagcctgggcctgtgcgtgagcaagcccgacgtgatcagcagcctggagcagggcaaggagccctggaccgtgaagaggaagatgaccagggcctggtgccccgacctgaagatcgtgggatctggctccggcagcggccccaagaaaaagagaaaagtctaagctgccttctgcggggcttgccttctggccatgcccttcttctctcccttgcacctgtacctcttggtctttgaataaagcctgagtaggaaggctagcaaaaaaaaaaaaaaaaaaaaaaaaaaaaaaaaaaaaaaaaaaaaaaaaaaaaaaaaaaaaaaaaaaaaaaaaaaaaaaaa

SEQ ID NO: 15667 - RNA, 9485 nt, synthetic construct
  source 1..9485: mol_type = other RNA
aggaaataagagagaaaagaagagtaagaagaaatataagagccaccatggcccctaagaagaagcgtaaagtgagccggatggaacgcctcgtctacgaggtgcggcagaagtgcagaaacatcgaggacatctgcatctcctgcggatctctgaacgtgaccctggagcacccactgttcatcggcggcatgtgccagaactgtaaaaactgttttctggagtgtgcctatcaatacgacgatgacggctaccagagctactgcaccatctgttgcggcggaagagaggtgctgatgtgtggaaataacaactgctgccggtgcttctgcgtggaatgcgtggacctgctggtgggccccggcgccgcccaggccgctattaaggaagatccttggaactgctacatgtgcggccacaagggcacatacggcctgctgagacggagagaggactggcctagcagactgcagatgttcttcgccaataaccacgaccaggagttcgacccccctaaggtgtaccctcccgtccccgccgagaagagaaagcccatccgggtcctgagcctgttcgatggcatcgccaccggtctgctggtgctgaaggacctgggcatccaggtggataggtacattgcctccgaggtgtgcgaggactccatcaccgtgggaatggtgcgtcatcagggcaagatcatgtacgtgggcgacgtgcggagcgtgacacagaagcatatccaggagtggggccctttcgacctggtgatcggcggcagcccttgcaatgacctgagcatcgtgaacccagcccggaagggcctgtacgagggaaccggcagactgttcttcgagttttacagactgctgcacgacgcccggcctaaggaaggcgacgaccggcccttcttttggctgttcgagaatgtggtggccatgggagtcagcgacaagcgggatattagccggttcctggagagcaaccccgtgatgatcgatgccaaggaagtgagcgccgcccaccgggccagatacttctggggcaatctgcctggcatgaacagacccctggccagcaccgtgaacgacaagctggagctgcaggagtgcctggagcacggccggatcgccaagttcagcaaggtgagaaccatcaccacccgaagcaacagcatcaaacaaggcaaggaccagcactttcctgtgttcatgaacgagaaggaggacatcctgtggtgtaccgagatggagagagtgttcgggttcccagtccactacacagatgtcagcaacatgtctagactggccagacagagactgctgggaagaagctggtccgtccctgtgatcagacacctgttcgcccctctgaaggagtacttcgcctgcgtgagcagcggcaacagcaacgccaacagccggggccccagcttctctagcggcctggtgccactgtccctgagagggagccacatgggccccatggagatctacaaaaccgtgagcgcctggaagcggcagcctgtgcgcgtgctgagcctgtttcggaatatcgataaagtcctgaaaagcctgggattcctggagagcggctctggctccggcggtggcaccctgaagtacgtggaggatgtgacaaacgtggtcagacgggatgtggagaagtggggccccttcgatctggtgtacggcagcacccaacccctgggcagctcttgtgaccggtgccctggctggtacatgtttcagttccaccggatcctgcagtacgccctgccgagacaggagtcccagcggccattcttttggattttcatggacaacttgctgctgaccgaggatgaccaggaaactaccactcggttcctgcagaccgaagccgtgaccctgcaggacgtgagaggccgggactaccagaacgccatgcgggtgtggtccaacatccctggactgaaaagcaagcacgcacctctgacccctaaagaagaggagtacctgcaggcccaggtgcggagcagaagcaagctggacgcccctaaggtggatctgctggtgaagaattgcctcctgcccctgagagagtacttcaagtatttcagccagaatagtctgcccctgggaggcagcggcggcggcgccctggtgacatttgaggacgtcgccgtgcggttcacccaggaggaatgggctctgctggatccttctcagaaaatcctgtaccgggacgtgatgagagagacataccggaatctgacctccgtgggcatcaactgggaatgttgggaccttgaagcctgcttcagaagcctgggaagaaacctgagagtgcaggtggtgaagagaaagtgcgagctgaccaacagcggcccctgcgccgagggcggcccaagcagcggcgcccctcctcccagcggcggcagcccagccggctccccaacctctaccgaggagggcacctctgagtccgccacccccgagagcggccctggcacctccaccgagcccagcgagggcagcgcacccggcagccctgccggcagccccacctccacagaggagggaaccagcaccgagcccagcgaaggcagcgccccaggcaccagcaccgagcctagtgagcaggagattaaacggatcaacaagatcagaagaagacttgtgaaagacagcaacaccaagaaggccggcaagacaggccccatgaaaaccctgctggttagagtgatgacacccgatctgagagagcggctggaaaacctgagaaagaagcctgaaaatatcccccagcccatcagcaatacatctagagccaacctgaataagctgctgaccgattacaccgaaatgaagaaggcgatcctgcatgtgtactgggaagagttccagaaggaccctgtgggcctgatgagccgggtggcccagcctgccagcaagaagatcgatcagaacaagctgaaacctgagatggacgagaagggcaacctgaccaccgccggctttgcctgctctcagtgtggccagcccctgttcgtgtacaagctggagcaggtgtctgagaagggcaaggcttacaccaactacttcggacggtgcaatgtggccgagcacgaaaagctgatcctgctggcccagctgaagcccgagaaggatagcgacgaagccgtgacatatagcctgggaaagtttgggcagagggccctggatttctacagcattcatgtgaccaaggagtccacccaccccgtgaagcccctggcccagatcgccggaaacagatacgcctccggacctgtgggaaaggccctgagcgacgcatgtatgggcacaatcgcctccttcctgtctaagtaccaggacatcatcatcgaacaccagaaggtggtgaagggcaaccagaagagactggagagcctgcgggagctggccggcaaggaaaacctggaataccctagcgtgaccctgccacctcagcctcacaccaaggagggcgttgatgcctacaacgaagtgatcgcccgggtgcgaatgtgggtgaacctgaacctgtggcagaagctgaagctaagcagagatgatgccaagcctctgctgagactgaagggattcccttcctttcctctggtcgagagacaggccaacgaagtggactggtgggacatggtgtgtaacgtgaagaagctgatcaacgagaaaaaggaggatggcaaggtgttttggcagaatctggctggctacaagagacaggaagccctgagaccatacctgagcagcgaggaagatcggaagaagggaaagaaattcgctcggtaccagctgggcgacctgctgctgcacctggaaaagaagcacggcgaggactggggaaaggtgtacgacgaggcctgggagcggattgacaagaaagtggaaggcctgagcaagcacatcaagctggaagaggaacggagaagcgaggacgcccagagcaaggccgccctgaccgactggctgcgggctaaggccagcttcgtgatcgagggcctgaaggaggccgacaaggacgagttctgcagatgcgagctgaagctgcagaagtggtacggggacctgcggggaaagcccttcgccatcgaagccgagaacagcatcctggacatcagcggcttcagcaagcagtacaactgtgccttcatctggcagaaggacggcgtgaagaagctgaacctgtacctgatcatcaactacttcaagggcggcaagctgcggttcaagaagatcaaacctgaagccttcgaagccaacagattctacaccgtgatcaacaaaaagagcggcgagatcgtgcccatggaggtgaacttcaacttcgacgaccccaacctgatcatcctgcctctggcctttggcaagagacagggcagagaattcatctggaacgacctgctgtccctggaaaccggcagcctgaagctggccaacggaagagtgatcgagaagacactgtacaacagaagaacccggcaggatgagcctgccctgttcgtggccctgaccttcgagcggcgggaggtcctggactcctccaatatcaaaccaatgaacctgatcggcgtggcaagaggcgaaaacatccccgccgtgatcgccctgaccgaccccgagggctgcccactgagccggtttaaggatagcctgggaaacccaacccacatcctgagaatcggcgagagctataaggagaagcagcggaccatccaggccaagaaggaggtggagcagcggagagccggcggctacagccggaagtacgccagcaaagccaagaatctggcagacgatatggtgagaaacaccgctagagatctgctgtactacgccgtgacccaggatgccatgctgatcttcgccaacctgagccggggcttcggccggcagggcaagcggaccttcatggccgagagacagtacacacggatggaggactggctgaccgccaagctggcctacgagggcctgagcaagacctacctgtccaagacactggcccagtacacctccaagacatgcagcaactgtgggtttaccatcaccagcgccgactacgacagggtgctggagaagctgaagaagacagcaacaggctggatgaccacaattaacggcaaggagctgaaggtggagggccagattacctactacaacagatacaagagacagaacgtagtcaaggacctgtccgtcgagctggatagactgagcgaagaatctgtgaacaacgacatctcctcctggacaaagggcagaagcggagaagctctgagcctcctgaagaaaagattctcccatagacccgtgcaggagaagttcgtgtgcctgaactgcggcttcgagacacacgcagccgagcaagccgccctgaacatcgccagatcctggctgttcctgcggagccaggagtacaagaaataccagacaaacaagacaaccggcaacaccgataagagagccttcgtcgagacctggcagtccttttaccggaagaagcttaaggaggtgtggaaacctgccgtgcggtctggcggatctggcggaggctccagcgtgaccttcagggacgtgatcgtggacttcacccaggaggagtgggagcagctgaagcccgtgcagaaggacctgtacagggacgtgatgatggagaactactggaacctggtgagcctggacctggagaccgagggcgacatgaacgaccccgaccccgagaaggacagctgggaggacaggcccagcgtgaccagcagcatgcccgccccccccaggctggagggccccaggggcgccggcggcccaagcagcggcgcccctcctcccagcggcggcagcccagccggctccccaacctctaccgaggagggcacctctgagtccgccacccccgagagcggccctggcacctccaccgagcccagcgagggcagcgcacccggcagccctgccggcagccccacctccacagaggagggaaccagcaccgagcccagcgaaggcagcgccccaggcaccagcaccgagcctagtgagcaggagattaaacggatcaacaagatcagaagaagacttgtgaaagacagcaacaccaagaaggccggcaagacaggccccatgaaaaccctgctggttagagtgatgacacccgatctgagagagcggctggaaaacctgagaaagaagcctgaaaatatcccccagcccatcagcaatacatctagagccaacctgaataagctgctgaccgattacaccgaaatgaagaaggcgatcctgcatgtgtactgggaagagttccagaaggaccctgtgggcctgatgagccgggtggcccagcctgccagcaagaagatcgatcagaacaagctgaaacctgagatggacgagaagggcaacctgaccaccgccggctttgcctgctctcagtgtggccagcccctgttcgtgtacaagctggagcaggtgtctgagaagggcaaggcttacaccaactacttcggacggtgcaatgtggccgagcacgaaaagctgatcctgctggcccagctgaagcccgagaaggatagcgacgaagccgtgacatatagcctgggaaagtttgggcagagggccctggatttctacagcattcatgtgaccaaggagtccacccaccccgtgaagcccctggcccagatcgccggaaacagatacgcctccggacctgtgggaaaggccctgagcgacgcatgtatgggcacaatcgcctccttcctgtctaagtaccaggacatcatcatcgaacaccagaaggtggtgaagggcaaccagaagagactggagagcctgcgggagctggccggcaaggaaaacctggaataccctagcgtgaccctgccacctcagcctcacaccaaggagggcgttgatgcctacaacgaagtgatcgcccgggtgcgaatgtgggtgaacctgaacctgtggcagaagctgaagctaagcagagatgatgccaagcctctgctgagactgaagggattcccttcctttcctctggtcgagagacaggccaacgaagtggactggtgggacatggtgtgtaacgtgaagaagctgatcaacgagaaaaaggaggatggcaaggtgttttggcagaatctggctggctacaagagacaggaagccctgagaccatacctgagcagcgaggaagatcggaagaagggaaagaaattcgctcggtaccagctgggcgacctgctgctgcacctggaaaagaagcacggcgaggactggggaaaggtgtacgacgaggcctgggagcggattgacaagaaagtggaaggcctgagcaagcacatcaagctggaagaggaacggagaagcgaggacgcccagagcaaggccgccctgaccgactggctgcgggctaaggccagcttcgtgatcgagggcctgaaggaggccgacaaggacgagttctgcagatgcgagctgaagctgcagaagtggtacggggacctgcggggaaagcccttcgccatcgaagccgagaacagcatcctggacatcagcggcttcagcaagcagtacaactgtgccttcatctggcagaaggacggcgtgaagaagctgaacctgtacctgatcatcaactacttcaagggcggcaagctgcggttcaagaagatcaaacctgaagccttcgaagccaacagattctacaccgtgatcaacaaaaagagcggcgagatcgtgcccatggaggtgaacttcaacttcgacgaccccaacctgatcatcctgcctctggcctttggcaagagacagggcagagaattcatctggaacgacctgctgtccctggaaaccggcagcctgaagctggccaacggaagagtgatcgagaagacactgtacaacagaagaacccggcaggatgagcctgccctgttcgtggccctgaccttcgagcggcgggaggtcctggactcctccaatatcaaaccaatgaacctgatcggcgtggcaagaggcgaaaacatccccgccgtgatcgccctgaccgaccccgagggctgcccactgagccggtttaaggatagcctgggaaacccaacccacatcctgagaatcggcgagagctataaggagaagcagcggaccatccaggccaagaaggaggtggagcagcggagagccggcggctacagccggaagtacgccagcaaagccaagaatctggcagacgatatggtgagaaacaccgctagagatctgctgtactacgccgtgacccaggatgccatgctgatcttcgccaacctgagccggggcttcggccggcagggcaagcggaccttcatggccgagagacagtacacacggatggaggactggctgaccgccaagctggcctacgagggcctgagcaagacctacctgtccaagacactggcccagtacacctccaagacatgcagcaactgtgggtttaccatcaccagcgccgactacgacagggtgctggagaagctgaagaagacagcaacaggctggatgaccacaattaacggcaaggagctgaaggtggagggccagattacctactacaacagatacaagagacagaacgtagtcaaggacctgtccgtcgagctggatagactgagcgaagaatctgtgaacaacgacatctcctcctggacaaagggcagaagcggagaagctctgagcctcctgaagaaaagattctcccatagacccgtgcaggagaagttcgtgtgcctgaactgcggcttcgagacacacgcagccgagcaagccgccctgaacatcgccagatcctggctgttcctgcggagccaggagtacaagaaataccagacaaacaagacaaccggcaacaccgataagagagccttcgtcgagacctggcagtccttttaccggaagaagcttaaggaggtgtggaaacctgccgtgcggtctggcggatctggcggaggctcctagcgtgaccttcagggacgtgatcgtggacttcacccaggaggagtgggagcagctgaagcccgtgcagaaggacctgtacagggacgtgatgatggagaactactggaacctggtgagcctggacctggagaccgagggcgacatgaacgaccccgaccccgagaaggacagctgggaggacaggcccagcgtgaccagcagcatgcccgccccccccaggctggagggccccaggggcgccggatctggctccggcagcggccccaagaaaaagagaaaagtctaagctgccttctgcggggcttgccttctggccatgcccttcttctctcccttgcacctgtacctcttggtctttgaataaagcctgagtaggaaggctagcaaaaaaaaaaaaaaaaaaaaaaaaaaaaaaaaaaaaaaaaaaaaaaaaaaaaaaaaaaaaaaaaaaaaaaaaaaaaaaaa

SEQ ID NO: 15668 - RNA, 9485 nt, synthetic construct
  source 1..9485: mol_type = other RNA
aggaaataagagagaaaagaagagtaagaagaaatataagagccaccatggcccctaagaagaagcgtaaagtgagccggatggaacgcctcgtctacgaggtgcggcagaagtgcagaaacatcgaggacatctgcatctcctgcggatctctgaacgtgaccctggagcacccactgttcatcggcggcatgtgccagaactgtaaaaactgttttctggagtgtgcctatcaatacgacgatgacggctaccagagctactgcaccatctgttgcggcggaagagaggtgctgatgtgtggaaataacaactgctgccggtgcttctgcgtggaatgcgtggacctgctggtgggccccggcgccgcccaggccgctattaaggaagatccttggaactgctacatgtgcggccacaagggcacatacggcctgctgagacggagagaggactggcctagcagactgcagatgttcttcgccaataaccacgaccaggagttcgacccccctaaggtgtaccctcccgtccccgccgagaagagaaagcccatccgggtcctgagcctgttcgatggcatcgccaccggtctgctggtgctgaaggacctgggcatccaggtggataggtacattgcctccgaggtgtgcgaggactccatcaccgtgggaatggtgcgtcatcagggcaagatcatgtacgtgggcgacgtgcggagcgtgacacagaagcatatccaggagtggggccctttcgacctggtgatcggcggcagcccttgcaatgacctgagcatcgtgaacccagcccggaagggcctgtacgagggaaccggcagactgttcttcgagttttacagactgctgcacgacgcccggcctaaggaaggcgacgaccggcccttcttttggctgttcgagaatgtggtggccatgggagtcagcgacaagcgggatattagccggttcctggagagcaaccccgtgatgatcgatgccaaggaagtgagcgccgcccaccgggccagatacttctggggcaatctgcctggcatgaacagacccctggccagcaccgtgaacgacaagctggagctgcaggagtgcctggagcacggccggatcgccaagttcagcaaggtgagaaccatcaccacccgaagcaacagcatcaaacaaggcaaggaccagcactttcctgtgttcatgaacgagaaggaggacatcctgtggtgtaccgagatggagagagtgttcgggttcccagtccactacacagatgtcagcaacatgtctagactggccagacagagactgctgggaagaagctggtccgtccctgtgatcagacacctgttcgcccctctgaaggagtacttcgcctgcgtgagcagcggcaacagcaacgccaacagccggggccccagcttctctagcggcctggtgccactgtccctgagagggagccacatgggccccatggagatctacaaaaccgtgagcgcctggaagcggcagcctgtgcgcgtgctgagcctgtttcggaatatcgataaagtcctgaaaagcctgggattcctggagagcggctctggctccggcggtggcaccctgaagtacgtggaggatgtgacaaacgtggtcagacgggatgtggagaagtggggccccttcgatctggtgtacggcagcacccaacccctgggcagctcttgtgaccggtgccctggctggtacatgtttcagttccaccggatcctgcagtacgccctgccgagacaggagtcccagcggccattcttttggattttcatggacaacttgctgctgaccgaggatgaccaggaaactaccactcggttcctgcagaccgaagccgtgaccctgcaggacgtgagaggccgggactaccagaacgccatgcgggtgtggtccaacatccctggactgaaaagcaagcacgcacctctgacccctaaagaagaggagtacctgcaggcccaggtgcggagcagaagcaagctggacgcccctaaggtggatctgctggtgaagaattgcctcctgcccctgagagagtacttcaagtatttcagccagaatagtctgcccctgggaggcagcggcggcggcgccctggtgacatttgaggacgtcgccgtgcggttcacccaggaggaatgggctctgctggatccttctcagaaaatcctgtaccgggacgtgatgagagagacataccggaatctgacctccgtgggcatcaactgggaatgttgggaccttgaagcctgcttcagaagcctgggaagaaacctgagagtgcaggtggtgaagagaaagtgcgagctgaccaacagcggcccctgcgccgagggcggcccaagcagcggcgcccctcctcccagcggcggcagcccagccggctccccaacctctaccgaggagggcacctctgagtccgccacccccgagagcggccctggcacctccaccgagcccagcgagggcagcgcacccggcagccctgccggcagccccacctccacagaggagggaaccagcaccgagcccagcgaaggcagcgccccaggcaccagcaccgagcctagtgagcaggagattaaacggatcaacaagatcagaagaagacttgtgaaagacagcaacaccaagaaggccggcaagacaggccccatgaaaaccctgctggttagagtgatgacacccgatctgagagagcggctggaaaacctgagaaagaagcctgaaaatatcccccagcccatcagcaatacatctagagccaacctgaataagctgctgaccgattacaccgaaatgaagaaggcgatcctgcatgtgtactgggaagagttccagaaggaccctgtgggcctgatgagccgggtggcccagcctgccagcaagaagatcgatcagaacaagctgaaacctgagatggacgagaagggcaacctgaccaccgccggctttgcctgctctcagtgtggccagcccctgttcgtgtacaagctggagcaggtgtctgagaagggcaaggcttacaccaactacttcggacggtgcaatgtggccgagcacgaaaagctgatcctgctggcccagctgaagcccgagaaggatagcgacgaagccgtgacatatagcctgggaaagtttgggcagagggccctggatttctacagcattcatgtgaccaaggagtccacccaccccgtgaagcccctggcccagatcgccggaaacagatacgcctccggacctgtgggaaaggccctgagcgacgcatgtatgggcacaatcgcctccttcctgtctaagtaccaggacatcatcatcgaacaccagaaggtggtgaagggcaaccagaagagactggagagcctgcgggagctggccggcaaggaaaacctggaataccctagcgtgaccctgccacctcagcctcacaccaaggagggcgttgatgcctacaacgaagtgatcgcccgggtgcgaatgtgggtgaacctgaacctgtggcagaagctgaagctaagcagagatgatgccaagcctctgctgagactgaagggattcccttcctttcctctggtcgagagacaggccaacgaagtggactggtgggacatggtgtgtaacgtgaagaagctgatcaacgagaaaaaggaggatggcaaggtgttttggcagaatctggctggctacaagagacaggaagccctgagaccatacctgagcagcgaggaagatcggaagaagggaaagaaattcgctcggtaccagctgggcgacctgctgctgcacctggaaaagaagcacggcgaggactggggaaaggtgtacgacgaggcctgggagcggattgacaagaaagtggaaggcctgagcaagcacatcaagctggaagaggaacggagaagcgaggacgcccagagcaaggccgccctgaccgactggctgcgggctaaggccagcttcgtgatcgagggcctgaaggaggccgacaaggacgagttctgcagatgcgagctgaagctgcagaagtggtacggggacctgcggggaaagcccttcgccatcgaagccgagaacagcatcctggacatcagcggcttcagcaagcagtacaactgtgccttcatctggcagaaggacggcgtgaagaagctgaacctgtacctgatcatcaactacttcaagggcggcaagctgcggttcaagaagatcaaacctgaagccttcgaagccaacagattctacaccgtgatcaacaaaaagagcggcgagatcgtgcccatggaggtgaacttcaacttcgacgaccccaacctgatcatcctgcctctggcctttggcaagagacagggcagagaattcatctggaacgacctgctgtccctggaaaccggcagcctgaagctggccaacggaagagtgatcgagaagacactgtacaacagaagaacccggcaggatgagcctgccctgttcgtggccctgaccttcgagcggcgggaggtcctggactcctccaatatcaaaccaatgaacctgatcggcgtggcaagaggcgaaaacatccccgccgtgatcgccctgaccgaccccgagggctgcccactgagccggtttaaggatagcctgggaaacccaacccacatcctgagaatcggcgagagctataaggagaagcagcggaccatccaggccaagaaggaggtggagcagcggagagccggcggctacagccggaagtacgccagcaaagccaagaatctggcagacgatatggtgagaaacaccgctagagatctgctgtactacgccgtgacccaggatgccatgctgatcttcgccaacctgagccggggcttcggccggcagggcaagcggaccttcatggccgagagacagtacacacggatggaggactggctgaccgccaagctggcctacgagggcctgagcaagacctacctgtccaagacactggcccagtacacctccaagacatgcagcaactgtgggtttaccatcaccagcgccgactacgacagggtgctggagaagctgaagaagacagcaacaggctggatgaccacaattaacggcaaggagctgaaggtggagggccagattacctactacaacagatacaagagacagaacgtagtcaaggacctgtccgtcgagctggatagactgagcgaagaatctgtgaacaacgacatctcctcctggacaaagggcagaagcggagaagctctgagcctcctgaagaaaagattctcccatagacccgtgcaggagaagttcgtgtgcctgaactgcggcttcgagacacacgcagccgagcaagccgccctgaacatcgccagatcctggctgttcctgcggagccaggagtacaagaaataccagacaaacaagacaaccggcaacaccgataagagagccttcgtcgagacctggcagtccttttaccggaagaagcttaaggaggtgtggaaacctgccgtgcggtctggcggatctggcggaggctcccccgcccaggtgctggtgaccttcaaggacgtggccgtggacttcacccaggaggagtggaggctgctggacccccaccagaaggagctgtacaaggaggtgaccctggagaacgcctggaacatgctgagcatgggcctgcccgtgcccagggacctggtgagccacttcaagcaggtggaggccccctggatgctggaggaggagggcagcagcaacagctgcctggacggcgagaggaggggcggcccaagcagcggcgcccctcctcccagcggcggcagcccagccggctccccaacctctaccgaggagggcacctctgagtccgccacccccgagagcggccctggcacctccaccgagcccagcgagggcagcgcacccggcagccctgccggcagccccacctccacagaggagggaaccagcaccgagcccagcgaaggcagcgccccaggcaccagcaccgagcctagtgagcaggagattaaacggatcaacaagatcagaagaagacttgtgaaagacagcaacaccaagaaggccggcaagacaggccccatgaaaaccctgctggttagagtgatgacacccgatctgagagagcggctggaaaacctgagaaagaagcctgaaaatatcccccagcccatcagcaatacatctagagccaacctgaataagctgctgaccgattacaccgaaatgaagaaggcgatcctgcatgtgtactgggaagagttccagaaggaccctgtgggcctgatgagccgggtggcccagcctgccagcaagaagatcgatcagaacaagctgaaacctgagatggacgagaagggcaacctgaccaccgccggctttgcctgctctcagtgtggccagcccctgttcgtgtacaagctggagcaggtgtctgagaagggcaaggcttacaccaactacttcggacggtgcaatgtggccgagcacgaaaagctgatcctgctggcccagctgaagcccgagaaggatagcgacgaagccgtgacatatagcctgggaaagtttgggcagagggccctggatttctacagcattcatgtgaccaaggagtccacccaccccgtgaagcccctggcccagatcgccggaaacagatacgcctccggacctgtgggaaaggccctgagcgacgcatgtatgggcacaatcgcctccttcctgtctaagtaccaggacatcatcatcgaacaccagaaggtggtgaagggcaaccagaagagactggagagcctgcgggagctggccggcaaggaaaacctggaataccctagcgtgaccctgccacctcagcctcacaccaaggagggcgttgatgcctacaacgaagtgatcgcccgggtgcgaatgtgggtgaacctgaacctgtggcagaagctgaagctaagcagagatgatgccaagcctctgctgagactgaagggattcccttcctttcctctggtcgagagacaggccaacgaagtggactggtgggacatggtgtgtaacgtgaagaagctgatcaacgagaaaaaggaggatggcaaggtgttttggcagaatctggctggctacaagagacaggaagccctgagaccatacctgagcagcgaggaagatcggaagaagggaaagaaattcgctcggtaccagctgggcgacctgctgctgcacctggaaaagaagcacggcgaggactggggaaaggtgtacgacgaggcctgggagcggattgacaagaaagtggaaggcctgagcaagcacatcaagctggaagaggaacggagaagcgaggacgcccagagcaaggccgccctgaccgactggctgcgggctaaggccagcttcgtgatcgagggcctgaaggaggccgacaaggacgagttctgcagatgcgagctgaagctgcagaagtggtacggggacctgcggggaaagcccttcgccatcgaagccgagaacagcatcctggacatcagcggcttcagcaagcagtacaactgtgccttcatctggcagaaggacggcgtgaagaagctgaacctgtacctgatcatcaactacttcaagggcggcaagctgcggttcaagaagatcaaacctgaagccttcgaagccaacagattctacaccgtgatcaacaaaaagagcggcgagatcgtgcccatggaggtgaacttcaacttcgacgaccccaacctgatcatcctgcctctggcctttggcaagagacagggcagagaattcatctggaacgacctgctgtccctggaaaccggcagcctgaagctggccaacggaagagtgatcgagaagacactgtacaacagaagaacccggcaggatgagcctgccctgttcgtggccctgaccttcgagcggcgggaggtcctggactcctccaatatcaaaccaatgaacctgatcggcgtggcaagaggcgaaaacatccccgccgtgatcgccctgaccgaccccgagggctgcccactgagccggtttaaggatagcctgggaaacccaacccacatcctgagaatcggcgagagctataaggagaagcagcggaccatccaggccaagaaggaggtggagcagcggagagccggcggctacagccggaagtacgccagcaaagccaagaatctggcagacgatatggtgagaaacaccgctagagatctgctgtactacgccgtgacccaggatgccatgctgatcttcgccaacctgagccggggcttcggccggcagggcaagcggaccttcatggccgagagacagtacacacggatggaggactggctgaccgccaagctggcctacgagggcctgagcaagacctacctgtccaagacactggcccagtacacctccaagacatgcagcaactgtgggtttaccatcaccagcgccgactacgacagggtgctggagaagctgaagaagacagcaacaggctggatgaccacaattaacggcaaggagctgaaggtggagggccagattacctactacaacagatacaagagacagaacgtagtcaaggacctgtccgtcgagctggatagactgagcgaagaatctgtgaacaacgacatctcctcctggacaaagggcagaagcggagaagctctgagcctcctgaagaaaagattctcccatagacccgtgcaggagaagttcgtgtgcctgaactgcggcttcgagacacacgcagccgagcaagccgccctgaacatcgccagatcctggctgttcctgcggagccaggagtacaagaaataccagacaaacaagacaaccggcaacaccgataagagagccttcgtcgagacctggcagtccttttaccggaagaagcttaaggaggtgtggaaacctgccgtgcggtctggcggatctggcggaggctcctcccgcccaggtgctggtgaccttcaaggacgtggccgtggacttcacccaggaggagtggaggctgctggacccccaccagaaggagctgtacaaggaggtgaccctggagaacgcctggaacatgctgagcatgggcctgcccgtgcccagggacctggtgagccacttcaagcaggtggaggccccctggatgctggaggaggagggcagcagcaacagctgcctggacggcgagaggaggggatctggctccggcagcggccccaagaaaaagagaaaagtctaagctgccttctgcggggcttgccttctggccatgcccttcttctctcccttgcacctgtacctcttggtctttgaataaagcctgagtaggaaggctagcaaaaaaaaaaaaaaaaaaaaaaaaaaaaaaaaaaaaaaaaaaaaaaaaaaaaaaaaaaaaaaaaaaaaaaaaaaaaaaaa

SEQ ID NO: 15669 - RNA, 9485 nt, synthetic construct
  source 1..9485: mol_type = other RNA
aggaaataagagagaaaagaagagtaagaagaaatataagagccaccatggcccctaagaagaagcgtaaagtgagccggatggaacgcctcgtctacgaggtgcggcagaagtgcagaaacatcgaggacatctgcatctcctgcggatctctgaacgtgaccctggagcacccactgttcatcggcggcatgtgccagaactgtaaaaactgttttctggagtgtgcctatcaatacgacgatgacggctaccagagctactgcaccatctgttgcggcggaagagaggtgctgatgtgtggaaataacaactgctgccggtgcttctgcgtggaatgcgtggacctgctggtgggccccggcgccgcccaggccgctattaaggaagatccttggaactgctacatgtgcggccacaagggcacatacggcctgctgagacggagagaggactggcctagcagactgcagatgttcttcgccaataaccacgaccaggagttcgacccccctaaggtgtaccctcccgtccccgccgagaagagaaagcccatccgggtcctgagcctgttcgatggcatcgccaccggtctgctggtgctgaaggacctgggcatccaggtggataggtacattgcctccgaggtgtgcgaggactccatcaccgtgggaatggtgcgtcatcagggcaagatcatgtacgtgggcgacgtgcggagcgtgacacagaagcatatccaggagtggggccctttcgacctggtgatcggcggcagcccttgcaatgacctgagcatcgtgaacccagcccggaagggcctgtacgagggaaccggcagactgttcttcgagttttacagactgctgcacgacgcccggcctaaggaaggcgacgaccggcccttcttttggctgttcgagaatgtggtggccatgggagtcagcgacaagcgggatattagccggttcctggagagcaaccccgtgatgatcgatgccaaggaagtgagcgccgcccaccgggccagatacttctggggcaatctgcctggcatgaacagacccctggccagcaccgtgaacgacaagctggagctgcaggagtgcctggagcacggccggatcgccaagttcagcaaggtgagaaccatcaccacccgaagcaacagcatcaaacaaggcaaggaccagcactttcctgtgttcatgaacgagaaggaggacatcctgtggtgtaccgagatggagagagtgttcgggttcccagtccactacacagatgtcagcaacatgtctagactggccagacagagactgctgggaagaagctggtccgtccctgtgatcagacacctgttcgcccctctgaaggagtacttcgcctgcgtgagcagcggcaacagcaacgccaacagccggggccccagcttctctagcggcctggtgccactgtccctgagagggagccacatgggccccatggagatctacaaaaccgtgagcgcctggaagcggcagcctgtgcgcgtgctgagcctgtttcggaatatcgataaagtcctgaaaagcctgggattcctggagagcggctctggctccggcggtggcaccctgaagtacgtggaggatgtgacaaacgtggtcagacgggatgtggagaagtggggccccttcgatctggtgtacggcagcacccaacccctgggcagctcttgtgaccggtgccctggctggtacatgtttcagttccaccggatcctgcagtacgccctgccgagacaggagtcccagcggccattcttttggattttcatggacaacttgctgctgaccgaggatgaccaggaaactaccactcggttcctgcagaccgaagccgtgaccctgcaggacgtgagaggccgggactaccagaacgccatgcgggtgtggtccaacatccctggactgaaaagcaagcacgcacctctgacccctaaagaagaggagtacctgcaggcccaggtgcggagcagaagcaagctggacgcccctaaggtggatctgctggtgaagaattgcctcctgcccctgagagagtacttcaagtatttcagccagaatagtctgcccctgggaggcagcggcggcggcgccctggtgacatttgaggacgtcgccgtgcggttcacccaggaggaatgggctctgctggatccttctcagaaaatcctgtaccgggacgtgatgagagagacataccggaatctgacctccgtgggcatcaactgggaatgttgggaccttgaagcctgcttcagaagcctgggaagaaacctgagagtgcaggtggtgaagagaaagtgcgagctgaccaacagcggcccctgcgccgagggcggcccaagcagcggcgcccctcctcccagcggcggcagcccagccggctccccaacctctaccgaggagggcacctctgagtccgccacccccgagagcggccctggcacctccaccgagcccagcgagggcagcgcacccggcagccctgccggcagccccacctccacagaggagggaaccagcaccgagcccagcgaaggcagcgccccaggcaccagcaccgagcctagtgagcaggagattaaacggatcaacaagatcagaagaagacttgtgaaagacagcaacaccaagaaggccggcaagacaggccccatgaaaaccctgctggttagagtgatgacacccgatctgagagagcggctggaaaacctgagaaagaagcctgaaaatatcccccagcccatcagcaatacatctagagccaacctgaataagctgctgaccgattacaccgaaatgaagaaggcgatcctgcatgtgtactgggaagagttccagaaggaccctgtgggcctgatgagccgggtggcccagcctgccagcaagaagatcgatcagaacaagctgaaacctgagatggacgagaagggcaacctgaccaccgccggctttgcctgctctcagtgtggccagcccctgttcgtgtacaagctggagcaggtgtctgagaagggcaaggcttacaccaactacttcggacggtgcaatgtggccgagcacgaaaagctgatcctgctggcccagctgaagcccgagaaggatagcgacgaagccgtgacatatagcctgggaaagtttgggcagagggccctggatttctacagcattcatgtgaccaaggagtccacccaccccgtgaagcccctggcccagatcgccggaaacagatacgcctccggacctgtgggaaaggccctgagcgacgcatgtatgggcacaatcgcctccttcctgtctaagtaccaggacatcatcatcgaacaccagaaggtggtgaagggcaaccagaagagactggagagcctgcgggagctggccggcaaggaaaacctggaataccctagcgtgaccctgccacctcagcctcacaccaaggagggcgttgatgcctacaacgaagtgatcgcccgggtgcgaatgtgggtgaacctgaacctgtggcagaagctgaagctaagcagagatgatgccaagcctctgctgagactgaagggattcccttcctttcctctggtcgagagacaggccaacgaagtggactggtgggacatggtgtgtaacgtgaagaagctgatcaacgagaaaaaggaggatggcaaggtgttttggcagaatctggctggctacaagagacaggaagccctgagaccatacctgagcagcgaggaagatcggaagaagggaaagaaattcgctcggtaccagctgggcgacctgctgctgcacctggaaaagaagcacggcgaggactggggaaaggtgtacgacgaggcctgggagcggattgacaagaaagtggaaggcctgagcaagcacatcaagctggaagaggaacggagaagcgaggacgcccagagcaaggccgccctgaccgactggctgcgggctaaggccagcttcgtgatcgagggcctgaaggaggccgacaaggacgagttctgcagatgcgagctgaagctgcagaagtggtacggggacctgcggggaaagcccttcgccatcgaagccgagaacagcatcctggacatcagcggcttcagcaagcagtacaactgtgccttcatctggcagaaggacggcgtgaagaagctgaacctgtacctgatcatcaactacttcaagggcggcaagctgcggttcaagaagatcaaacctgaagccttcgaagccaacagattctacaccgtgatcaacaaaaagagcggcgagatcgtgcccatggaggtgaacttcaacttcgacgaccccaacctgatcatcctgcctctggcctttggcaagagacagggcagagaattcatctggaacgacctgctgtccctggaaaccggcagcctgaagctggccaacggaagagtgatcgagaagacactgtacaacagaagaacccggcaggatgagcctgccctgttcgtggccctgaccttcgagcggcgggaggtcctggactcctccaatatcaaaccaatgaacctgatcggcgtggcaagaggcgaaaacatccccgccgtgatcgccctgaccgaccccgagggctgcccactgagccggtttaaggatagcctgggaaacccaacccacatcctgagaatcggcgagagctataaggagaagcagcggaccatccaggccaagaaggaggtggagcagcggagagccggcggctacagccggaagtacgccagcaaagccaagaatctggcagacgatatggtgagaaacaccgctagagatctgctgtactacgccgtgacccaggatgccatgctgatcttcgccaacctgagccggggcttcggccggcagggcaagcggaccttcatggccgagagacagtacacacggatggaggactggctgaccgccaagctggcctacgagggcctgagcaagacctacctgtccaagacactggcccagtacacctccaagacatgcagcaactgtgggtttaccatcaccagcgccgactacgacagggtgctggagaagctgaagaagacagcaacaggctggatgaccacaattaacggcaaggagctgaaggtggagggccagattacctactacaacagatacaagagacagaacgtagtcaaggacctgtccgtcgagctggatagactgagcgaagaatctgtgaacaacgacatctcctcctggacaaagggcagaagcggagaagctctgagcctcctgaagaaaagattctcccatagacccgtgcaggagaagttcgtgtgcctgaactgcggcttcgagacacacgcagccgagcaagccgccctgaacatcgccagatcctggctgttcctgcggagccaggagtacaagaaataccagacaaacaagacaaccggcaacaccgataagagagccttcgtcgagacctggcagtccttttaccggaagaagcttaaggaggtgtggaaacctgccgtgcggtctggcggatctggcggaggctccagcctggccctggtgaccttcaaggacgtgctggtgaacttcaccagggaggagtggaagctgctggacgccgcccagcaggtgatgtacagggacgtgatgctggagaactacaggaacctggtgagcctgggccacaggctgcccaagcccgacgtgatcctgcagctggagaagggcgaggagccctggctggtggagaggggcacccaccaggacgcccaccccgactgggacaccgccggcggcccaagcagcggcgcccctcctcccagcggcggcagcccagccggctccccaacctctaccgaggagggcacctctgagtccgccacccccgagagcggccctggcacctccaccgagcccagcgagggcagcgcacccggcagccctgccggcagccccacctccacagaggagggaaccagcaccgagcccagcgaaggcagcgccccaggcaccagcaccgagcctagtgagcaggagattaaacggatcaacaagatcagaagaagacttgtgaaagacagcaacaccaagaaggccggcaagacaggccccatgaaaaccctgctggttagagtgatgacacccgatctgagagagcggctggaaaacctgagaaagaagcctgaaaatatcccccagcccatcagcaatacatctagagccaacctgaataagctgctgaccgattacaccgaaatgaagaaggcgatcctgcatgtgtactgggaagagttccagaaggaccctgtgggcctgatgagccgggtggcccagcctgccagcaagaagatcgatcagaacaagctgaaacctgagatggacgagaagggcaacctgaccaccgccggctttgcctgctctcagtgtggccagcccctgttcgtgtacaagctggagcaggtgtctgagaagggcaaggcttacaccaactacttcggacggtgcaatgtggccgagcacgaaaagctgatcctgctggcccagctgaagcccgagaaggatagcgacgaagccgtgacatatagcctgggaaagtttgggcagagggccctggatttctacagcattcatgtgaccaaggagtccacccaccccgtgaagcccctggcccagatcgccggaaacagatacgcctccggacctgtgggaaaggccctgagcgacgcatgtatgggcacaatcgcctccttcctgtctaagtaccaggacatcatcatcgaacaccagaaggtggtgaagggcaaccagaagagactggagagcctgcgggagctggccggcaaggaaaacctggaataccctagcgtgaccctgccacctcagcctcacaccaaggagggcgttgatgcctacaacgaagtgatcgcccgggtgcgaatgtgggtgaacctgaacctgtggcagaagctgaagctaagcagagatgatgccaagcctctgctgagactgaagggattcccttcctttcctctggtcgagagacaggccaacgaagtggactggtgggacatggtgtgtaacgtgaagaagctgatcaacgagaaaaaggaggatggcaaggtgttttggcagaatctggctggctacaagagacaggaagccctgagaccatacctgagcagcgaggaagatcggaagaagggaaagaaattcgctcggtaccagctgggcgacctgctgctgcacctggaaaagaagcacggcgaggactggggaaaggtgtacgacgaggcctgggagcggattgacaagaaagtggaaggcctgagcaagcacatcaagctggaagaggaacggagaagcgaggacgcccagagcaaggccgccctgaccgactggctgcgggctaaggccagcttcgtgatcgagggcctgaaggaggccgacaaggacgagttctgcagatgcgagctgaagctgcagaagtggtacggggacctgcggggaaagcccttcgccatcgaagccgagaacagcatcctggacatcagcggcttcagcaagcagtacaactgtgccttcatctggcagaaggacggcgtgaagaagctgaacctgtacctgatcatcaactacttcaagggcggcaagctgcggttcaagaagatcaaacctgaagccttcgaagccaacagattctacaccgtgatcaacaaaaagagcggcgagatcgtgcccatggaggtgaacttcaacttcgacgaccccaacctgatcatcctgcctctggcctttggcaagagacagggcagagaattcatctggaacgacctgctgtccctggaaaccggcagcctgaagctggccaacggaagagtgatcgagaagacactgtacaacagaagaacccggcaggatgagcctgccctgttcgtggccctgaccttcgagcggcgggaggtcctggactcctccaatatcaaaccaatgaacctgatcggcgtggcaagaggcgaaaacatccccgccgtgatcgccctgaccgaccccgagggctgcccactgagccggtttaaggatagcctgggaaacccaacccacatcctgagaatcggcgagagctataaggagaagcagcggaccatccaggccaagaaggaggtggagcagcggagagccggcggctacagccggaagtacgccagcaaagccaagaatctggcagacgatatggtgagaaacaccgctagagatctgctgtactacgccgtgacccaggatgccatgctgatcttcgccaacctgagccggggcttcggccggcagggcaagcggaccttcatggccgagagacagtacacacggatggaggactggctgaccgccaagctggcctacgagggcctgagcaagacctacctgtccaagacactggcccagtacacctccaagacatgcagcaactgtgggtttaccatcaccagcgccgactacgacagggtgctggagaagctgaagaagacagcaacaggctggatgaccacaattaacggcaaggagctgaaggtggagggccagattacctactacaacagatacaagagacagaacgtagtcaaggacctgtccgtcgagctggatagactgagcgaagaatctgtgaacaacgacatctcctcctggacaaagggcagaagcggagaagctctgagcctcctgaagaaaagattctcccatagacccgtgcaggagaagttcgtgtgcctgaactgcggcttcgagacacacgcagccgagcaagccgccctgaacatcgccagatcctggctgttcctgcggagccaggagtacaagaaataccagacaaacaagacaaccggcaacaccgataagagagccttcgtcgagacctggcagtccttttaccggaagaagcttaaggaggtgtggaaacctgccgtgcggtctggcggatctggcggaggctcctagcctggccctggtgaccttcaaggacgtgctggtgaacttcaccagggaggagtggaagctgctggacgccgcccagcaggtgatgtacagggacgtgatgctggagaactacaggaacctggtgagcctgggccacaggctgcccaagcccgacgtgatcctgcagctggagaagggcgaggagccctggctggtggagaggggcacccaccaggacgcccaccccgactgggacaccgccggatctggctccggcagcggccccaagaaaaagagaaaagtctaagctgccttctgcggggcttgccttctggccatgcccttcttctctcccttgcacctgtacctcttggtctttgaataaagcctgagtaggaaggctagcaaaaaaaaaaaaaaaaaaaaaaaaaaaaaaaaaaaaaaaaaaaaaaaaaaaaaaaaaaaaaaaaaaaaaaaaaaaaaaaa

SEQ ID NO: 15670 - RNA, 9485 nt, synthetic construct
  source 1..9485: mol_type = other RNA
aggaaataagagagaaaagaagagtaagaagaaatataagagccaccatggcccctaagaagaagcgtaaagtgagccggatggaacgcctcgtctacgaggtgcggcagaagtgcagaaacatcgaggacatctgcatctcctgcggatctctgaacgtgaccctggagcacccactgttcatcggcggcatgtgccagaactgtaaaaactgttttctggagtgtgcctatcaatacgacgatgacggctaccagagctactgcaccatctgttgcggcggaagagaggtgctgatgtgtggaaataacaactgctgccggtgcttctgcgtggaatgcgtggacctgctggtgggccccggcgccgcccaggccgctattaaggaagatccttggaactgctacatgtgcggccacaagggcacatacggcctgctgagacggagagaggactggcctagcagactgcagatgttcttcgccaataaccacgaccaggagttcgacccccctaaggtgtaccctcccgtccccgccgagaagagaaagcccatccgggtcctgagcctgttcgatggcatcgccaccggtctgctggtgctgaaggacctgggcatccaggtggataggtacattgcctccgaggtgtgcgaggactccatcaccgtgggaatggtgcgtcatcagggcaagatcatgtacgtgggcgacgtgcggagcgtgacacagaagcatatccaggagtggggccctttcgacctggtgatcggcggcagcccttgcaatgacctgagcatcgtgaacccagcccggaagggcctgtacgagggaaccggcagactgttcttcgagttttacagactgctgcacgacgcccggcctaaggaaggcgacgaccggcccttcttttggctgttcgagaatgtggtggccatgggagtcagcgacaagcgggatattagccggttcctggagagcaaccccgtgatgatcgatgccaaggaagtgagcgccgcccaccgggccagatacttctggggcaatctgcctggcatgaacagacccctggccagcaccgtgaacgacaagctggagctgcaggagtgcctggagcacggccggatcgccaagttcagcaaggtgagaaccatcaccacccgaagcaacagcatcaaacaaggcaaggaccagcactttcctgtgttcatgaacgagaaggaggacatcctgtggtgtaccgagatggagagagtgttcgggttcccagtccactacacagatgtcagcaacatgtctagactggccagacagagactgctgggaagaagctggtccgtccctgtgatcagacacctgttcgcccctctgaaggagtacttcgcctgcgtgagcagcggcaacagcaacgccaacagccggggccccagcttctctagcggcctggtgccactgtccctgagagggagccacatgggccccatggagatctacaaaaccgtgagcgcctggaagcggcagcctgtgcgcgtgctgagcctgtttcggaatatcgataaagtcctgaaaagcctgggattcctggagagcggctctggctccggcggtggcaccctgaagtacgtggaggatgtgacaaacgtggtcagacgggatgtggagaagtggggccccttcgatctggtgtacggcagcacccaacccctgggcagctcttgtgaccggtgccctggctggtacatgtttcagttccaccggatcctgcagtacgccctgccgagacaggagtcccagcggccattcttttggattttcatggacaacttgctgctgaccgaggatgaccaggaaactaccactcggttcctgcagaccgaagccgtgaccctgcaggacgtgagaggccgggactaccagaacgccatgcgggtgtggtccaacatccctggactgaaaagcaagcacgcacctctgacccctaaagaagaggagtacctgcaggcccaggtgcggagcagaagcaagctggacgcccctaaggtggatctgctggtgaagaattgcctcctgcccctgagagagtacttcaagtatttcagccagaatagtctgcccctgggaggcagcggcggcggcgccctggtgacatttgaggacgtcgccgtgcggttcacccaggaggaatgggctctgctggatccttctcagaaaatcctgtaccgggacgtgatgagagagacataccggaatctgacctccgtgggcatcaactgggaatgttgggaccttgaagcctgcttcagaagcctgggaagaaacctgagagtgcaggtggtgaagagaaagtgcgagctgaccaacagcggcccctgcgccgagggcggcccaagcagcggcgcccctcctcccagcggcggcagcccagccggctccccaacctctaccgaggagggcacctctgagtccgccacccccgagagcggccctggcacctccaccgagcccagcgagggcagcgcacccggcagccctgccggcagccccacctccacagaggagggaaccagcaccgagcccagcgaaggcagcgccccaggcaccagcaccgagcctagtgagcaggagattaaacggatcaacaagatcagaagaagacttgtgaaagacagcaacaccaagaaggccggcaagacaggccccatgaaaaccctgctggttagagtgatgacacccgatctgagagagcggctggaaaacctgagaaagaagcctgaaaatatcccccagcccatcagcaatacatctagagccaacctgaataagctgctgaccgattacaccgaaatgaagaaggcgatcctgcatgtgtactgggaagagttccagaaggaccctgtgggcctgatgagccgggtggcccagcctgccagcaagaagatcgatcagaacaagctgaaacctgagatggacgagaagggcaacctgaccaccgccggctttgcctgctctcagtgtggccagcccctgttcgtgtacaagctggagcaggtgtctgagaagggcaaggcttacaccaactacttcggacggtgcaatgtggccgagcacgaaaagctgatcctgctggcccagctgaagcccgagaaggatagcgacgaagccgtgacatatagcctgggaaagtttgggcagagggccctggatttctacagcattcatgtgaccaaggagtccacccaccccgtgaagcccctggcccagatcgccggaaacagatacgcctccggacctgtgggaaaggccctgagcgacgcatgtatgggcacaatcgcctccttcctgtctaagtaccaggacatcatcatcgaacaccagaaggtggtgaagggcaaccagaagagactggagagcctgcgggagctggccggcaaggaaaacctggaataccctagcgtgaccctgccacctcagcctcacaccaaggagggcgttgatgcctacaacgaagtgatcgcccgggtgcgaatgtgggtgaacctgaacctgtggcagaagctgaagctaagcagagatgatgccaagcctctgctgagactgaagggattcccttcctttcctctggtcgagagacaggccaacgaagtggactggtgggacatggtgtgtaacgtgaagaagctgatcaacgagaaaaaggaggatggcaaggtgttttggcagaatctggctggctacaagagacaggaagccctgagaccatacctgagcagcgaggaagatcggaagaagggaaagaaattcgctcggtaccagctgggcgacctgctgctgcacctggaaaagaagcacggcgaggactggggaaaggtgtacgacgaggcctgggagcggattgacaagaaagtggaaggcctgagcaagcacatcaagctggaagaggaacggagaagcgaggacgcccagagcaaggccgccctgaccgactggctgcgggctaaggccagcttcgtgatcgagggcctgaaggaggccgacaaggacgagttctgcagatgcgagctgaagctgcagaagtggtacggggacctgcggggaaagcccttcgccatcgaagccgagaacagcatcctggacatcagcggcttcagcaagcagtacaactgtgccttcatctggcagaaggacggcgtgaagaagctgaacctgtacctgatcatcaactacttcaagggcggcaagctgcggttcaagaagatcaaacctgaagccttcgaagccaacagattctacaccgtgatcaacaaaaagagcggcgagatcgtgcccatggaggtgaacttcaacttcgacgaccccaacctgatcatcctgcctctggcctttggcaagagacagggcagagaattcatctggaacgacctgctgtccctggaaaccggcagcctgaagctggccaacggaagagtgatcgagaagacactgtacaacagaagaacccggcaggatgagcctgccctgttcgtggccctgaccttcgagcggcgggaggtcctggactcctccaatatcaaaccaatgaacctgatcggcgtggcaagaggcgaaaacatccccgccgtgatcgccctgaccgaccccgagggctgcccactgagccggtttaaggatagcctgggaaacccaacccacatcctgagaatcggcgagagctataaggagaagcagcggaccatccaggccaagaaggaggtggagcagcggagagccggcggctacagccggaagtacgccagcaaagccaagaatctggcagacgatatggtgagaaacaccgctagagatctgctgtactacgccgtgacccaggatgccatgctgatcttcgccaacctgagccggggcttcggccggcagggcaagcggaccttcatggccgagagacagtacacacggatggaggactggctgaccgccaagctggcctacgagggcctgagcaagacctacctgtccaagacactggcccagtacacctccaagacatgcagcaactgtgggtttaccatcaccagcgccgactacgacagggtgctggagaagctgaagaagacagcaacaggctggatgaccacaattaacggcaaggagctgaaggtggagggccagattacctactacaacagatacaagagacagaacgtagtcaaggacctgtccgtcgagctggatagactgagcgaagaatctgtgaacaacgacatctcctcctggacaaagggcagaagcggagaagctctgagcctcctgaagaaaagattctcccatagacccgtgcaggagaagttcgtgtgcctgaactgcggcttcgagacacacgcagccgagcaagccgccctgaacatcgccagatcctggctgttcctgcggagccaggagtacaagaaataccagacaaacaagacaaccggcaacaccgataagagagccttcgtcgagacctggcagtccttttaccggaagaagcttaaggaggtgtggaaacctgccgtgcggtctggcggatctggcggaggctccagccaggccagcgtgagcttcaaggacgtgaccgtggagttcacccaggacgagtggaggctgatgagcagcgcccagaggaccctgtacagggaggtgatgctggagaactacagccacctgatcagcatgggctactgcagcaccaagcccgagctgatcttcgccctggagcagaaggacttcagggagagcatcctggagagggagagcctgagcaccatcccccccgaggacttccagggcggcccaagcagcggcgcccctcctcccagcggcggcagcccagccggctccccaacctctaccgaggagggcacctctgagtccgccacccccgagagcggccctggcacctccaccgagcccagcgagggcagcgcacccggcagccctgccggcagccccacctccacagaggagggaaccagcaccgagcccagcgaaggcagcgccccaggcaccagcaccgagcctagtgagcaggagattaaacggatcaacaagatcagaagaagacttgtgaaagacagcaacaccaagaaggccggcaagacaggccccatgaaaaccctgctggttagagtgatgacacccgatctgagagagcggctggaaaacctgagaaagaagcctgaaaatatcccccagcccatcagcaatacatctagagccaacctgaataagctgctgaccgattacaccgaaatgaagaaggcgatcctgcatgtgtactgggaagagttccagaaggaccctgtgggcctgatgagccgggtggcccagcctgccagcaagaagatcgatcagaacaagctgaaacctgagatggacgagaagggcaacctgaccaccgccggctttgcctgctctcagtgtggccagcccctgttcgtgtacaagctggagcaggtgtctgagaagggcaaggcttacaccaactacttcggacggtgcaatgtggccgagcacgaaaagctgatcctgctggcccagctgaagcccgagaaggatagcgacgaagccgtgacatatagcctgggaaagtttgggcagagggccctggatttctacagcattcatgtgaccaaggagtccacccaccccgtgaagcccctggcccagatcgccggaaacagatacgcctccggacctgtgggaaaggccctgagcgacgcatgtatgggcacaatcgcctccttcctgtctaagtaccaggacatcatcatcgaacaccagaaggtggtgaagggcaaccagaagagactggagagcctgcgggagctggccggcaaggaaaacctggaataccctagcgtgaccctgccacctcagcctcacaccaaggagggcgttgatgcctacaacgaagtgatcgcccgggtgcgaatgtgggtgaacctgaacctgtggcagaagctgaagctaagcagagatgatgccaagcctctgctgagactgaagggattcccttcctttcctctggtcgagagacaggccaacgaagtggactggtgggacatggtgtgtaacgtgaagaagctgatcaacgagaaaaaggaggatggcaaggtgttttggcagaatctggctggctacaagagacaggaagccctgagaccatacctgagcagcgaggaagatcggaagaagggaaagaaattcgctcggtaccagctgggcgacctgctgctgcacctggaaaagaagcacggcgaggactggggaaaggtgtacgacgaggcctgggagcggattgacaagaaagtggaaggcctgagcaagcacatcaagctggaagaggaacggagaagcgaggacgcccagagcaaggccgccctgaccgactggctgcgggctaaggccagcttcgtgatcgagggcctgaaggaggccgacaaggacgagttctgcagatgcgagctgaagctgcagaagtggtacggggacctgcggggaaagcccttcgccatcgaagccgagaacagcatcctggacatcagcggcttcagcaagcagtacaactgtgccttcatctggcagaaggacggcgtgaagaagctgaacctgtacctgatcatcaactacttcaagggcggcaagctgcggttcaagaagatcaaacctgaagccttcgaagccaacagattctacaccgtgatcaacaaaaagagcggcgagatcgtgcccatggaggtgaacttcaacttcgacgaccccaacctgatcatcctgcctctggcctttggcaagagacagggcagagaattcatctggaacgacctgctgtccctggaaaccggcagcctgaagctggccaacggaagagtgatcgagaagacactgtacaacagaagaacccggcaggatgagcctgccctgttcgtggccctgaccttcgagcggcgggaggtcctggactcctccaatatcaaaccaatgaacctgatcggcgtggcaagaggcgaaaacatccccgccgtgatcgccctgaccgaccccgagggctgcccactgagccggtttaaggatagcctgggaaacccaacccacatcctgagaatcggcgagagctataaggagaagcagcggaccatccaggccaagaaggaggtggagcagcggagagccggcggctacagccggaagtacgccagcaaagccaagaatctggcagacgatatggtgagaaacaccgctagagatctgctgtactacgccgtgacccaggatgccatgctgatcttcgccaacctgagccggggcttcggccggcagggcaagcggaccttcatggccgagagacagtacacacggatggaggactggctgaccgccaagctggcctacgagggcctgagcaagacctacctgtccaagacactggcccagtacacctccaagacatgcagcaactgtgggtttaccatcaccagcgccgactacgacagggtgctggagaagctgaagaagacagcaacaggctggatgaccacaattaacggcaaggagctgaaggtggagggccagattacctactacaacagatacaagagacagaacgtagtcaaggacctgtccgtcgagctggatagactgagcgaagaatctgtgaacaacgacatctcctcctggacaaagggcagaagcggagaagctctgagcctcctgaagaaaagattctcccatagacccgtgcaggagaagttcgtgtgcctgaactgcggcttcgagacacacgcagccgagcaagccgccctgaacatcgccagatcctggctgttcctgcggagccaggagtacaagaaataccagacaaacaagacaaccggcaacaccgataagagagccttcgtcgagacctggcagtccttttaccggaagaagcttaaggaggtgtggaaacctgccgtgcggtctggcggatctggcggaggctcctagccaggccagcgtgagcttcaaggacgtgaccgtggagttcacccaggacgagtggaggctgatgagcagcgcccagaggaccctgtacagggaggtgatgctggagaactacagccacctgatcagcatgggctactgcagcaccaagcccgagctgatcttcgccctggagcagaaggacttcagggagagcatcctggagagggagagcctgagcaccatcccccccgaggacttccagggatctggctccggcagcggccccaagaaaaagagaaaagtctaagctgccttctgcggggcttgccttctggccatgcccttcttctctcccttgcacctgtacctcttggtctttgaataaagcctgagtaggaaggctagcaaaaaaaaaaaaaaaaaaaaaaaaaaaaaaaaaaaaaaaaaaaaaaaaaaaaaaaaaaaaaaaaaaaaaaaaaaaaaaaa

SEQ ID NO: 15671 - RNA, 9485 nt, synthetic construct
  source 1..9485: mol_type = other RNA
aggaaataagagagaaaagaagagtaagaagaaatataagagccaccatggcccctaagaagaagcgtaaagtgagccggatggaacgcctcgtctacgaggtgcggcagaagtgcagaaacatcgaggacatctgcatctcctgcggatctctgaacgtgaccctggagcacccactgttcatcggcggcatgtgccagaactgtaaaaactgttttctggagtgtgcctatcaatacgacgatgacggctaccagagctactgcaccatctgttgcggcggaagagaggtgctgatgtgtggaaataacaactgctgccggtgcttctgcgtggaatgcgtggacctgctggtgggccccggcgccgcccaggccgctattaaggaagatccttggaactgctacatgtgcggccacaagggcacatacggcctgctgagacggagagaggactggcctagcagactgcagatgttcttcgccaataaccacgaccaggagttcgacccccctaaggtgtaccctcccgtccccgccgagaagagaaagcccatccgggtcctgagcctgttcgatggcatcgccaccggtctgctggtgctgaaggacctgggcatccaggtggataggtacattgcctccgaggtgtgcgaggactccatcaccgtgggaatggtgcgtcatcagggcaagatcatgtacgtgggcgacgtgcggagcgtgacacagaagcatatccaggagtggggccctttcgacctggtgatcggcggcagcccttgcaatgacctgagcatcgtgaacccagcccggaagggcctgtacgagggaaccggcagactgttcttcgagttttacagactgctgcacgacgcccggcctaaggaaggcgacgaccggcccttcttttggctgttcgagaatgtggtggccatgggagtcagcgacaagcgggatattagccggttcctggagagcaaccccgtgatgatcgatgccaaggaagtgagcgccgcccaccgggccagatacttctggggcaatctgcctggcatgaacagacccctggccagcaccgtgaacgacaagctggagctgcaggagtgcctggagcacggccggatcgccaagttcagcaaggtgagaaccatcaccacccgaagcaacagcatcaaacaaggcaaggaccagcactttcctgtgttcatgaacgagaaggaggacatcctgtggtgtaccgagatggagagagtgttcgggttcccagtccactacacagatgtcagcaacatgtctagactggccagacagagactgctgggaagaagctggtccgtccctgtgatcagacacctgttcgcccctctgaaggagtacttcgcctgcgtgagcagcggcaacagcaacgccaacagccggggccccagcttctctagcggcctggtgccactgtccctgagagggagccacatgggccccatggagatctacaaaaccgtgagcgcctggaagcggcagcctgtgcgcgtgctgagcctgtttcggaatatcgataaagtcctgaaaagcctgggattcctggagagcggctctggctccggcggtggcaccctgaagtacgtggaggatgtgacaaacgtggtcagacgggatgtggagaagtggggccccttcgatctggtgtacggcagcacccaacccctgggcagctcttgtgaccggtgccctggctggtacatgtttcagttccaccggatcctgcagtacgccctgccgagacaggagtcccagcggccattcttttggattttcatggacaacttgctgctgaccgaggatgaccaggaaactaccactcggttcctgcagaccgaagccgtgaccctgcaggacgtgagaggccgggactaccagaacgccatgcgggtgtggtccaacatccctggactgaaaagcaagcacgcacctctgacccctaaagaagaggagtacctgcaggcccaggtgcggagcagaagcaagctggacgcccctaaggtggatctgctggtgaagaattgcctcctgcccctgagagagtacttcaagtatttcagccagaatagtctgcccctgggaggcagcggcggcggcgccctggtgacatttgaggacgtcgccgtgcggttcacccaggaggaatgggctctgctggatccttctcagaaaatcctgtaccgggacgtgatgagagagacataccggaatctgacctccgtgggcatcaactgggaatgttgggaccttgaagcctgcttcagaagcctgggaagaaacctgagagtgcaggtggtgaagagaaagtgcgagctgaccaacagcggcccctgcgccgagggcggcccaagcagcggcgcccctcctcccagcggcggcagcccagccggctccccaacctctaccgaggagggcacctctgagtccgccacccccgagagcggccctggcacctccaccgagcccagcgagggcagcgcacccggcagccctgccggcagccccacctccacagaggagggaaccagcaccgagcccagcgaaggcagcgccccaggcaccagcaccgagcctagtgagcaggagattaaacggatcaacaagatcagaagaagacttgtgaaagacagcaacaccaagaaggccggcaagacaggccccatgaaaaccctgctggttagagtgatgacacccgatctgagagagcggctggaaaacctgagaaagaagcctgaaaatatcccccagcccatcagcaatacatctagagccaacctgaataagctgctgaccgattacaccgaaatgaagaaggcgatcctgcatgtgtactgggaagagttccagaaggaccctgtgggcctgatgagccgggtggcccagcctgccagcaagaagatcgatcagaacaagctgaaacctgagatggacgagaagggcaacctgaccaccgccggctttgcctgctctcagtgtggccagcccctgttcgtgtacaagctggagcaggtgtctgagaagggcaaggcttacaccaactacttcggacggtgcaatgtggccgagcacgaaaagctgatcctgctggcccagctgaagcccgagaaggatagcgacgaagccgtgacatatagcctgggaaagtttgggcagagggccctggatttctacagcattcatgtgaccaaggagtccacccaccccgtgaagcccctggcccagatcgccggaaacagatacgcctccggacctgtgggaaaggccctgagcgacgcatgtatgggcacaatcgcctccttcctgtctaagtaccaggacatcatcatcgaacaccagaaggtggtgaagggcaaccagaagagactggagagcctgcgggagctggccggcaaggaaaacctggaataccctagcgtgaccctgccacctcagcctcacaccaaggagggcgttgatgcctacaacgaagtgatcgcccgggtgcgaatgtgggtgaacctgaacctgtggcagaagctgaagctaagcagagatgatgccaagcctctgctgagactgaagggattcccttcctttcctctggtcgagagacaggccaacgaagtggactggtgggacatggtgtgtaacgtgaagaagctgatcaacgagaaaaaggaggatggcaaggtgttttggcagaatctggctggctacaagagacaggaagccctgagaccatacctgagcagcgaggaagatcggaagaagggaaagaaattcgctcggtaccagctgggcgacctgctgctgcacctggaaaagaagcacggcgaggactggggaaaggtgtacgacgaggcctgggagcggattgacaagaaagtggaaggcctgagcaagcacatcaagctggaagaggaacggagaagcgaggacgcccagagcaaggccgccctgaccgactggctgcgggctaaggccagcttcgtgatcgagggcctgaaggaggccgacaaggacgagttctgcagatgcgagctgaagctgcagaagtggtacggggacctgcggggaaagcccttcgccatcgaagccgagaacagcatcctggacatcagcggcttcagcaagcagtacaactgtgccttcatctggcagaaggacggcgtgaagaagctgaacctgtacctgatcatcaactacttcaagggcggcaagctgcggttcaagaagatcaaacctgaagccttcgaagccaacagattctacaccgtgatcaacaaaaagagcggcgagatcgtgcccatggaggtgaacttcaacttcgacgaccccaacctgatcatcctgcctctggcctttggcaagagacagggcagagaattcatctggaacgacctgctgtccctggaaaccggcagcctgaagctggccaacggaagagtgatcgagaagacactgtacaacagaagaacccggcaggatgagcctgccctgttcgtggccctgaccttcgagcggcgggaggtcctggactcctccaatatcaaaccaatgaacctgatcggcgtggcaagaggcgaaaacatccccgccgtgatcgccctgaccgaccccgagggctgcccactgagccggtttaaggatagcctgggaaacccaacccacatcctgagaatcggcgagagctataaggagaagcagcggaccatccaggccaagaaggaggtggagcagcggagagccggcggctacagccggaagtacgccagcaaagccaagaatctggcagacgatatggtgagaaacaccgctagagatctgctgtactacgccgtgacccaggatgccatgctgatcttcgccaacctgagccggggcttcggccggcagggcaagcggaccttcatggccgagagacagtacacacggatggaggactggctgaccgccaagctggcctacgagggcctgagcaagacctacctgtccaagacactggcccagtacacctccaagacatgcagcaactgtgggtttaccatcaccagcgccgactacgacagggtgctggagaagctgaagaagacagcaacaggctggatgaccacaattaacggcaaggagctgaaggtggagggccagattacctactacaacagatacaagagacagaacgtagtcaaggacctgtccgtcgagctggatagactgagcgaagaatctgtgaacaacgacatctcctcctggacaaagggcagaagcggagaagctctgagcctcctgaagaaaagattctcccatagacccgtgcaggagaagttcgtgtgcctgaactgcggcttcgagacacacgcagccgagcaagccgccctgaacatcgccagatcctggctgttcctgcggagccaggagtacaagaaataccagacaaacaagacaaccggcaacaccgataagagagccttcgtcgagacctggcagtccttttaccggaagaagcttaaggaggtgtggaaacctgccgtgcggtctggcggatctggcggaggctccagcctgggcagcgagctgttcagggacgtggccatcgtgttcagccaggaggagtggcagtggctggcccccgcccagagggacctgtacagggacgtgatgctggagacctacagcaacctggtgagcctgggcctggccatcagcaagcccgacgtgatcagcttcctggagcagggcagggagccctggatggtggagagggtggtggccggcggcctgtgccccgtgctggagagcaggggcggcccaagcagcggcgcccctcctcccagcggcggcagcccagccggctccccaacctctaccgaggagggcacctctgagtccgccacccccgagagcggccctggcacctccaccgagcccagcgagggcagcgcacccggcagccctgccggcagccccacctccacagaggagggaaccagcaccgagcccagcgaaggcagcgccccaggcaccagcaccgagcctagtgagcaggagattaaacggatcaacaagatcagaagaagacttgtgaaagacagcaacaccaagaaggccggcaagacaggccccatgaaaaccctgctggttagagtgatgacacccgatctgagagagcggctggaaaacctgagaaagaagcctgaaaatatcccccagcccatcagcaatacatctagagccaacctgaataagctgctgaccgattacaccgaaatgaagaaggcgatcctgcatgtgtactgggaagagttccagaaggaccctgtgggcctgatgagccgggtggcccagcctgccagcaagaagatcgatcagaacaagctgaaacctgagatggacgagaagggcaacctgaccaccgccggctttgcctgctctcagtgtggccagcccctgttcgtgtacaagctggagcaggtgtctgagaagggcaaggcttacaccaactacttcggacggtgcaatgtggccgagcacgaaaagctgatcctgctggcccagctgaagcccgagaaggatagcgacgaagccgtgacatatagcctgggaaagtttgggcagagggccctggatttctacagcattcatgtgaccaaggagtccacccaccccgtgaagcccctggcccagatcgccggaaacagatacgcctccggacctgtgggaaaggccctgagcgacgcatgtatgggcacaatcgcctccttcctgtctaagtaccaggacatcatcatcgaacaccagaaggtggtgaagggcaaccagaagagactggagagcctgcgggagctggccggcaaggaaaacctggaataccctagcgtgaccctgccacctcagcctcacaccaaggagggcgttgatgcctacaacgaagtgatcgcccgggtgcgaatgtgggtgaacctgaacctgtggcagaagctgaagctaagcagagatgatgccaagcctctgctgagactgaagggattcccttcctttcctctggtcgagagacaggccaacgaagtggactggtgggacatggtgtgtaacgtgaagaagctgatcaacgagaaaaaggaggatggcaaggtgttttggcagaatctggctggctacaagagacaggaagccctgagaccatacctgagcagcgaggaagatcggaagaagggaaagaaattcgctcggtaccagctgggcgacctgctgctgcacctggaaaagaagcacggcgaggactggggaaaggtgtacgacgaggcctgggagcggattgacaagaaagtggaaggcctgagcaagcacatcaagctggaagaggaacggagaagcgaggacgcccagagcaaggccgccctgaccgactggctgcgggctaaggccagcttcgtgatcgagggcctgaaggaggccgacaaggacgagttctgcagatgcgagctgaagctgcagaagtggtacggggacctgcggggaaagcccttcgccatcgaagccgagaacagcatcctggacatcagcggcttcagcaagcagtacaactgtgccttcatctggcagaaggacggcgtgaagaagctgaacctgtacctgatcatcaactacttcaagggcggcaagctgcggttcaagaagatcaaacctgaagccttcgaagccaacagattctacaccgtgatcaacaaaaagagcggcgagatcgtgcccatggaggtgaacttcaacttcgacgaccccaacctgatcatcctgcctctggcctttggcaagagacagggcagagaattcatctggaacgacctgctgtccctggaaaccggcagcctgaagctggccaacggaagagtgatcgagaagacactgtacaacagaagaacccggcaggatgagcctgccctgttcgtggccctgaccttcgagcggcgggaggtcctggactcctccaatatcaaaccaatgaacctgatcggcgtggcaagaggcgaaaacatccccgccgtgatcgccctgaccgaccccgagggctgcccactgagccggtttaaggatagcctgggaaacccaacccacatcctgagaatcggcgagagctataaggagaagcagcggaccatccaggccaagaaggaggtggagcagcggagagccggcggctacagccggaagtacgccagcaaagccaagaatctggcagacgatatggtgagaaacaccgctagagatctgctgtactacgccgtgacccaggatgccatgctgatcttcgccaacctgagccggggcttcggccggcagggcaagcggaccttcatggccgagagacagtacacacggatggaggactggctgaccgccaagctggcctacgagggcctgagcaagacctacctgtccaagacactggcccagtacacctccaagacatgcagcaactgtgggtttaccatcaccagcgccgactacgacagggtgctggagaagctgaagaagacagcaacaggctggatgaccacaattaacggcaaggagctgaaggtggagggccagattacctactacaacagatacaagagacagaacgtagtcaaggacctgtccgtcgagctggatagactgagcgaagaatctgtgaacaacgacatctcctcctggacaaagggcagaagcggagaagctctgagcctcctgaagaaaagattctcccatagacccgtgcaggagaagttcgtgtgcctgaactgcggcttcgagacacacgcagccgagcaagccgccctgaacatcgccagatcctggctgttcctgcggagccaggagtacaagaaataccagacaaacaagacaaccggcaacaccgataagagagccttcgtcgagacctggcagtccttttaccggaagaagcttaaggaggtgtggaaacctgccgtgcggtctggcggatctggcggaggctcctagcctgggcagcgagctgttcagggacgtggccatcgtgttcagccaggaggagtggcagtggctggcccccgcccagagggacctgtacagggacgtgatgctggagacctacagcaacctggtgagcctgggcctggccatcagcaagcccgacgtgatcagcttcctggagcagggcagggagccctggatggtggagagggtggtggccggcggcctgtgccccgtgctggagagcaggggatctggctccggcagcggccccaagaaaaagagaaaagtctaagctgccttctgcggggcttgccttctggccatgcccttcttctctcccttgcacctgtacctcttggtctttgaataaagcctgagtaggaaggctagcaaaaaaaaaaaaaaaaaaaaaaaaaaaaaaaaaaaaaaaaaaaaaaaaaaaaaaaaaaaaaaaaaaaaaaaaaaaaaaaa

SEQ ID NO: 15672 - RNA, 9485 nt, synthetic construct
  source 1..9485: mol_type = other RNA
aggaaataagagagaaaagaagagtaagaagaaatataagagccaccatggcccctaagaagaagcgtaaagtgagccggatggaacgcctcgtctacgaggtgcggcagaagtgcagaaacatcgaggacatctgcatctcctgcggatctctgaacgtgaccctggagcacccactgttcatcggcggcatgtgccagaactgtaaaaactgttttctggagtgtgcctatcaatacgacgatgacggctaccagagctactgcaccatctgttgcggcggaagagaggtgctgatgtgtggaaataacaactgctgccggtgcttctgcgtggaatgcgtggacctgctggtgggccccggcgccgcccaggccgctattaaggaagatccttggaactgctacatgtgcggccacaagggcacatacggcctgctgagacggagagaggactggcctagcagactgcagatgttcttcgccaataaccacgaccaggagttcgacccccctaaggtgtaccctcccgtccccgccgagaagagaaagcccatccgggtcctgagcctgttcgatggcatcgccaccggtctgctggtgctgaaggacctgggcatccaggtggataggtacattgcctccgaggtgtgcgaggactccatcaccgtgggaatggtgcgtcatcagggcaagatcatgtacgtgggcgacgtgcggagcgtgacacagaagcatatccaggagtggggccctttcgacctggtgatcggcggcagcccttgcaatgacctgagcatcgtgaacccagcccggaagggcctgtacgagggaaccggcagactgttcttcgagttttacagactgctgcacgacgcccggcctaaggaaggcgacgaccggcccttcttttggctgttcgagaatgtggtggccatgggagtcagcgacaagcgggatattagccggttcctggagagcaaccccgtgatgatcgatgccaaggaagtgagcgccgcccaccgggccagatacttctggggcaatctgcctggcatgaacagacccctggccagcaccgtgaacgacaagctggagctgcaggagtgcctggagcacggccggatcgccaagttcagcaaggtgagaaccatcaccacccgaagcaacagcatcaaacaaggcaaggaccagcactttcctgtgttcatgaacgagaaggaggacatcctgtggtgtaccgagatggagagagtgttcgggttcccagtccactacacagatgtcagcaacatgtctagactggccagacagagactgctgggaagaagctggtccgtccctgtgatcagacacctgttcgcccctctgaaggagtacttcgcctgcgtgagcagcggcaacagcaacgccaacagccggggccccagcttctctagcggcctggtgccactgtccctgagagggagccacatgggccccatggagatctacaaaaccgtgagcgcctggaagcggcagcctgtgcgcgtgctgagcctgtttcggaatatcgataaagtcctgaaaagcctgggattcctggagagcggctctggctccggcggtggcaccctgaagtacgtggaggatgtgacaaacgtggtcagacgggatgtggagaagtggggccccttcgatctggtgtacggcagcacccaacccctgggcagctcttgtgaccggtgccctggctggtacatgtttcagttccaccggatcctgcagtacgccctgccgagacaggagtcccagcggccattcttttggattttcatggacaacttgctgctgaccgaggatgaccaggaaactaccactcggttcctgcagaccgaagccgtgaccctgcaggacgtgagaggccgggactaccagaacgccatgcgggtgtggtccaacatccctggactgaaaagcaagcacgcacctctgacccctaaagaagaggagtacctgcaggcccaggtgcggagcagaagcaagctggacgcccctaaggtggatctgctggtgaagaattgcctcctgcccctgagagagtacttcaagtatttcagccagaatagtctgcccctgggaggcagcggcggcggcgccctggtgacatttgaggacgtcgccgtgcggttcacccaggaggaatgggctctgctggatccttctcagaaaatcctgtaccgggacgtgatgagagagacataccggaatctgacctccgtgggcatcaactgggaatgttgggaccttgaagcctgcttcagaagcctgggaagaaacctgagagtgcaggtggtgaagagaaagtgcgagctgaccaacagcggcccctgcgccgagggcggcccaagcagcggcgcccctcctcccagcggcggcagcccagccggctccccaacctctaccgaggagggcacctctgagtccgccacccccgagagcggccctggcacctccaccgagcccagcgagggcagcgcacccggcagccctgccggcagccccacctccacagaggagggaaccagcaccgagcccagcgaaggcagcgccccaggcaccagcaccgagcctagtgagcaggagattaaacggatcaacaagatcagaagaagacttgtgaaagacagcaacaccaagaaggccggcaagacaggccccatgaaaaccctgctggttagagtgatgacacccgatctgagagagcggctggaaaacctgagaaagaagcctgaaaatatcccccagcccatcagcaatacatctagagccaacctgaataagctgctgaccgattacaccgaaatgaagaaggcgatcctgcatgtgtactgggaagagttccagaaggaccctgtgggcctgatgagccgggtggcccagcctgccagcaagaagatcgatcagaacaagctgaaacctgagatggacgagaagggcaacctgaccaccgccggctttgcctgctctcagtgtggccagcccctgttcgtgtacaagctggagcaggtgtctgagaagggcaaggcttacaccaactacttcggacggtgcaatgtggccgagcacgaaaagctgatcctgctggcccagctgaagcccgagaaggatagcgacgaagccgtgacatatagcctgggaaagtttgggcagagggccctggatttctacagcattcatgtgaccaaggagtccacccaccccgtgaagcccctggcccagatcgccggaaacagatacgcctccggacctgtgggaaaggccctgagcgacgcatgtatgggcacaatcgcctccttcctgtctaagtaccaggacatcatcatcgaacaccagaaggtggtgaagggcaaccagaagagactggagagcctgcgggagctggccggcaaggaaaacctggaataccctagcgtgaccctgccacctcagcctcacaccaaggagggcgttgatgcctacaacgaagtgatcgcccgggtgcgaatgtgggtgaacctgaacctgtggcagaagctgaagctaagcagagatgatgccaagcctctgctgagactgaagggattcccttcctttcctctggtcgagagacaggccaacgaagtggactggtgggacatggtgtgtaacgtgaagaagctgatcaacgagaaaaaggaggatggcaaggtgttttggcagaatctggctggctacaagagacaggaagccctgagaccatacctgagcagcgaggaagatcggaagaagggaaagaaattcgctcggtaccagctgggcgacctgctgctgcacctggaaaagaagcacggcgaggactggggaaaggtgtacgacgaggcctgggagcggattgacaagaaagtggaaggcctgagcaagcacatcaagctggaagaggaacggagaagcgaggacgcccagagcaaggccgccctgaccgactggctgcgggctaaggccagcttcgtgatcgagggcctgaaggaggccgacaaggacgagttctgcagatgcgagctgaagctgcagaagtggtacggggacctgcggggaaagcccttcgccatcgaagccgagaacagcatcctggacatcagcggcttcagcaagcagtacaactgtgccttcatctggcagaaggacggcgtgaagaagctgaacctgtacctgatcatcaactacttcaagggcggcaagctgcggttcaagaagatcaaacctgaagccttcgaagccaacagattctacaccgtgatcaacaaaaagagcggcgagatcgtgcccatggaggtgaacttcaacttcgacgaccccaacctgatcatcctgcctctggcctttggcaagagacagggcagagaattcatctggaacgacctgctgtccctggaaaccggcagcctgaagctggccaacggaagagtgatcgagaagacactgtacaacagaagaacccggcaggatgagcctgccctgttcgtggccctgaccttcgagcggcgggaggtcctggactcctccaatatcaaaccaatgaacctgatcggcgtggcaagaggcgaaaacatccccgccgtgatcgccctgaccgaccccgagggctgcccactgagccggtttaaggatagcctgggaaacccaacccacatcctgagaatcggcgagagctataaggagaagcagcggaccatccaggccaagaaggaggtggagcagcggagagccggcggctacagccggaagtacgccagcaaagccaagaatctggcagacgatatggtgagaaacaccgctagagatctgctgtactacgccgtgacccaggatgccatgctgatcttcgccaacctgagccggggcttcggccggcagggcaagcggaccttcatggccgagagacagtacacacggatggaggactggctgaccgccaagctggcctacgagggcctgagcaagacctacctgtccaagacactggcccagtacacctccaagacatgcagcaactgtgggtttaccatcaccagcgccgactacgacagggtgctggagaagctgaagaagacagcaacaggctggatgaccacaattaacggcaaggagctgaaggtggagggccagattacctactacaacagatacaagagacagaacgtagtcaaggacctgtccgtcgagctggatagactgagcgaagaatctgtgaacaacgacatctcctcctggacaaagggcagaagcggagaagctctgagcctcctgaagaaaagattctcccatagacccgtgcaggagaagttcgtgtgcctgaactgcggcttcgagacacacgcagccgagcaagccgccctgaacatcgccagatcctggctgttcctgcggagccaggagtacaagaaataccagacaaacaagacaaccggcaacaccgataagagagccttcgtcgagacctggcagtccttttaccggaagaagcttaaggaggtgtggaaacctgccgtgcggtctggcggatctggcggaggctccttccaggagagcgtgaccttcagggacgtggccgtggacttcacccaggaggagtggaggcacctggagcccgcccagagggccctgtacagggacgtgatgctggagaactacgagaacctggtgagcgtgggcatccccgtgagcaggctggacgtgaccagcctgctggagaggcaggaggccgtgtggaaggacggcggcctgagggacagctgcctggacagcctgagcaacaagatcggcggcccaagcagcggcgcccctcctcccagcggcggcagcccagccggctccccaacctctaccgaggagggcacctctgagtccgccacccccgagagcggccctggcacctccaccgagcccagcgagggcagcgcacccggcagccctgccggcagccccacctccacagaggagggaaccagcaccgagcccagcgaaggcagcgccccaggcaccagcaccgagcctagtgagcaggagattaaacggatcaacaagatcagaagaagacttgtgaaagacagcaacaccaagaaggccggcaagacaggccccatgaaaaccctgctggttagagtgatgacacccgatctgagagagcggctggaaaacctgagaaagaagcctgaaaatatcccccagcccatcagcaatacatctagagccaacctgaataagctgctgaccgattacaccgaaatgaagaaggcgatcctgcatgtgtactgggaagagttccagaaggaccctgtgggcctgatgagccgggtggcccagcctgccagcaagaagatcgatcagaacaagctgaaacctgagatggacgagaagggcaacctgaccaccgccggctttgcctgctctcagtgtggccagcccctgttcgtgtacaagctggagcaggtgtctgagaagggcaaggcttacaccaactacttcggacggtgcaatgtggccgagcacgaaaagctgatcctgctggcccagctgaagcccgagaaggatagcgacgaagccgtgacatatagcctgggaaagtttgggcagagggccctggatttctacagcattcatgtgaccaaggagtccacccaccccgtgaagcccctggcccagatcgccggaaacagatacgcctccggacctgtgggaaaggccctgagcgacgcatgtatgggcacaatcgcctccttcctgtctaagtaccaggacatcatcatcgaacaccagaaggtggtgaagggcaaccagaagagactggagagcctgcgggagctggccggcaaggaaaacctggaataccctagcgtgaccctgccacctcagcctcacaccaaggagggcgttgatgcctacaacgaagtgatcgcccgggtgcgaatgtgggtgaacctgaacctgtggcagaagctgaagctaagcagagatgatgccaagcctctgctgagactgaagggattcccttcctttcctctggtcgagagacaggccaacgaagtggactggtgggacatggtgtgtaacgtgaagaagctgatcaacgagaaaaaggaggatggcaaggtgttttggcagaatctggctggctacaagagacaggaagccctgagaccatacctgagcagcgaggaagatcggaagaagggaaagaaattcgctcggtaccagctgggcgacctgctgctgcacctggaaaagaagcacggcgaggactggggaaaggtgtacgacgaggcctgggagcggattgacaagaaagtggaaggcctgagcaagcacatcaagctggaagaggaacggagaagcgaggacgcccagagcaaggccgccctgaccgactggctgcgggctaaggccagcttcgtgatcgagggcctgaaggaggccgacaaggacgagttctgcagatgcgagctgaagctgcagaagtggtacggggacctgcggggaaagcccttcgccatcgaagccgagaacagcatcctggacatcagcggcttcagcaagcagtacaactgtgccttcatctggcagaaggacggcgtgaagaagctgaacctgtacctgatcatcaactacttcaagggcggcaagctgcggttcaagaagatcaaacctgaagccttcgaagccaacagattctacaccgtgatcaacaaaaagagcggcgagatcgtgcccatggaggtgaacttcaacttcgacgaccccaacctgatcatcctgcctctggcctttggcaagagacagggcagagaattcatctggaacgacctgctgtccctggaaaccggcagcctgaagctggccaacggaagagtgatcgagaagacactgtacaacagaagaacccggcaggatgagcctgccctgttcgtggccctgaccttcgagcggcgggaggtcctggactcctccaatatcaaaccaatgaacctgatcggcgtggcaagaggcgaaaacatccccgccgtgatcgccctgaccgaccccgagggctgcccactgagccggtttaaggatagcctgggaaacccaacccacatcctgagaatcggcgagagctataaggagaagcagcggaccatccaggccaagaaggaggtggagcagcggagagccggcggctacagccggaagtacgccagcaaagccaagaatctggcagacgatatggtgagaaacaccgctagagatctgctgtactacgccgtgacccaggatgccatgctgatcttcgccaacctgagccggggcttcggccggcagggcaagcggaccttcatggccgagagacagtacacacggatggaggactggctgaccgccaagctggcctacgagggcctgagcaagacctacctgtccaagacactggcccagtacacctccaagacatgcagcaactgtgggtttaccatcaccagcgccgactacgacagggtgctggagaagctgaagaagacagcaacaggctggatgaccacaattaacggcaaggagctgaaggtggagggccagattacctactacaacagatacaagagacagaacgtagtcaaggacctgtccgtcgagctggatagactgagcgaagaatctgtgaacaacgacatctcctcctggacaaagggcagaagcggagaagctctgagcctcctgaagaaaagattctcccatagacccgtgcaggagaagttcgtgtgcctgaactgcggcttcgagacacacgcagccgagcaagccgccctgaacatcgccagatcctggctgttcctgcggagccaggagtacaagaaataccagacaaacaagacaaccggcaacaccgataagagagccttcgtcgagacctggcagtccttttaccggaagaagcttaaggaggtgtggaaacctgccgtgcggtctggcggatctggcggaggctcctttccaggagagcgtgaccttcagggacgtggccgtggacttcacccaggaggagtggaggcacctggagcccgcccagagggccctgtacagggacgtgatgctggagaactacgagaacctggtgagcgtgggcatccccgtgagcaggctggacgtgaccagcctgctggagaggcaggaggccgtgtggaaggacggcggcctgagggacagctgcctggacagcctgagcaacaagatcggatctggctccggcagcggccccaagaaaaagagaaaagtctaagctgccttctgcggggcttgccttctggccatgcccttcttctctcccttgcacctgtacctcttggtctttgaataaagcctgagtaggaaggctagcaaaaaaaaaaaaaaaaaaaaaaaaaaaaaaaaaaaaaaaaaaaaaaaaaaaaaaaaaaaaaaaaaaaaaaaaaaaaaaaa

SEQ ID NO: 15673 - RNA, 9485 nt, synthetic construct
  source 1..9485: mol_type = other RNA
aggaaataagagagaaaagaagagtaagaagaaatataagagccaccatggcccctaagaagaagcgtaaagtgagccggatggaacgcctcgtctacgaggtgcggcagaagtgcagaaacatcgaggacatctgcatctcctgcggatctctgaacgtgaccctggagcacccactgttcatcggcggcatgtgccagaactgtaaaaactgttttctggagtgtgcctatcaatacgacgatgacggctaccagagctactgcaccatctgttgcggcggaagagaggtgctgatgtgtggaaataacaactgctgccggtgcttctgcgtggaatgcgtggacctgctggtgggccccggcgccgcccaggccgctattaaggaagatccttggaactgctacatgtgcggccacaagggcacatacggcctgctgagacggagagaggactggcctagcagactgcagatgttcttcgccaataaccacgaccaggagttcgacccccctaaggtgtaccctcccgtccccgccgagaagagaaagcccatccgggtcctgagcctgttcgatggcatcgccaccggtctgctggtgctgaaggacctgggcatccaggtggataggtacattgcctccgaggtgtgcgaggactccatcaccgtgggaatggtgcgtcatcagggcaagatcatgtacgtgggcgacgtgcggagcgtgacacagaagcatatccaggagtggggccctttcgacctggtgatcggcggcagcccttgcaatgacctgagcatcgtgaacccagcccggaagggcctgtacgagggaaccggcagactgttcttcgagttttacagactgctgcacgacgcccggcctaaggaaggcgacgaccggcccttcttttggctgttcgagaatgtggtggccatgggagtcagcgacaagcgggatattagccggttcctggagagcaaccccgtgatgatcgatgccaaggaagtgagcgccgcccaccgggccagatacttctggggcaatctgcctggcatgaacagacccctggccagcaccgtgaacgacaagctggagctgcaggagtgcctggagcacggccggatcgccaagttcagcaaggtgagaaccatcaccacccgaagcaacagcatcaaacaaggcaaggaccagcactttcctgtgttcatgaacgagaaggaggacatcctgtggtgtaccgagatggagagagtgttcgggttcccagtccactacacagatgtcagcaacatgtctagactggccagacagagactgctgggaagaagctggtccgtccctgtgatcagacacctgttcgcccctctgaaggagtacttcgcctgcgtgagcagcggcaacagcaacgccaacagccggggccccagcttctctagcggcctggtgccactgtccctgagagggagccacatgggccccatggagatctacaaaaccgtgagcgcctggaagcggcagcctgtgcgcgtgctgagcctgtttcggaatatcgataaagtcctgaaaagcctgggattcctggagagcggctctggctccggcggtggcaccctgaagtacgtggaggatgtgacaaacgtggtcagacgggatgtggagaagtggggccccttcgatctggtgtacggcagcacccaacccctgggcagctcttgtgaccggtgccctggctggtacatgtttcagttccaccggatcctgcagtacgccctgccgagacaggagtcccagcggccattcttttggattttcatggacaacttgctgctgaccgaggatgaccaggaaactaccactcggttcctgcagaccgaagccgtgaccctgcaggacgtgagaggccgggactaccagaacgccatgcgggtgtggtccaacatccctggactgaaaagcaagcacgcacctctgacccctaaagaagaggagtacctgcaggcccaggtgcggagcagaagcaagctggacgcccctaaggtggatctgctggtgaagaattgcctcctgcccctgagagagtacttcaagtatttcagccagaatagtctgcccctgggaggcagcggcggcggcgccctggtgacatttgaggacgtcgccgtgcggttcacccaggaggaatgggctctgctggatccttctcagaaaatcctgtaccgggacgtgatgagagagacataccggaatctgacctccgtgggcatcaactgggaatgttgggaccttgaagcctgcttcagaagcctgggaagaaacctgagagtgcaggtggtgaagagaaagtgcgagctgaccaacagcggcccctgcgccgagggcggcccaagcagcggcgcccctcctcccagcggcggcagcccagccggctccccaacctctaccgaggagggcacctctgagtccgccacccccgagagcggccctggcacctccaccgagcccagcgagggcagcgcacccggcagccctgccggcagccccacctccacagaggagggaaccagcaccgagcccagcgaaggcagcgccccaggcaccagcaccgagcctagtgagcaggagattaaacggatcaacaagatcagaagaagacttgtgaaagacagcaacaccaagaaggccggcaagacaggccccatgaaaaccctgctggttagagtgatgacacccgatctgagagagcggctggaaaacctgagaaagaagcctgaaaatatcccccagcccatcagcaatacatctagagccaacctgaataagctgctgaccgattacaccgaaatgaagaaggcgatcctgcatgtgtactgggaagagttccagaaggaccctgtgggcctgatgagccgggtggcccagcctgccagcaagaagatcgatcagaacaagctgaaacctgagatggacgagaagggcaacctgaccaccgccggctttgcctgctctcagtgtggccagcccctgttcgtgtacaagctggagcaggtgtctgagaagggcaaggcttacaccaactacttcggacggtgcaatgtggccgagcacgaaaagctgatcctgctggcccagctgaagcccgagaaggatagcgacgaagccgtgacatatagcctgggaaagtttgggcagagggccctggatttctacagcattcatgtgaccaaggagtccacccaccccgtgaagcccctggcccagatcgccggaaacagatacgcctccggacctgtgggaaaggccctgagcgacgcatgtatgggcacaatcgcctccttcctgtctaagtaccaggacatcatcatcgaacaccagaaggtggtgaagggcaaccagaagagactggagagcctgcgggagctggccggcaaggaaaacctggaataccctagcgtgaccctgccacctcagcctcacaccaaggagggcgttgatgcctacaacgaagtgatcgcccgggtgcgaatgtgggtgaacctgaacctgtggcagaagctgaagctaagcagagatgatgccaagcctctgctgagactgaagggattcccttcctttcctctggtcgagagacaggccaacgaagtggactggtgggacatggtgtgtaacgtgaagaagctgatcaacgagaaaaaggaggatggcaaggtgttttggcagaatctggctggctacaagagacaggaagccctgagaccatacctgagcagcgaggaagatcggaagaagggaaagaaattcgctcggtaccagctgggcgacctgctgctgcacctggaaaagaagcacggcgaggactggggaaaggtgtacgacgaggcctgggagcggattgacaagaaagtggaaggcctgagcaagcacatcaagctggaagaggaacggagaagcgaggacgcccagagcaaggccgccctgaccgactggctgcgggctaaggccagcttcgtgatcgagggcctgaaggaggccgacaaggacgagttctgcagatgcgagctgaagctgcagaagtggtacggggacctgcggggaaagcccttcgccatcgaagccgagaacagcatcctggacatcagcggcttcagcaagcagtacaactgtgccttcatctggcagaaggacggcgtgaagaagctgaacctgtacctgatcatcaactacttcaagggcggcaagctgcggttcaagaagatcaaacctgaagccttcgaagccaacagattctacaccgtgatcaacaaaaagagcggcgagatcgtgcccatggaggtgaacttcaacttcgacgaccccaacctgatcatcctgcctctggcctttggcaagagacagggcagagaattcatctggaacgacctgctgtccctggaaaccggcagcctgaagctggccaacggaagagtgatcgagaagacactgtacaacagaagaacccggcaggatgagcctgccctgttcgtggccctgaccttcgagcggcgggaggtcctggactcctccaatatcaaaccaatgaacctgatcggcgtggcaagaggcgaaaacatccccgccgtgatcgccctgaccgaccccgagggctgcccactgagccggtttaaggatagcctgggaaacccaacccacatcctgagaatcggcgagagctataaggagaagcagcggaccatccaggccaagaaggaggtggagcagcggagagccggcggctacagccggaagtacgccagcaaagccaagaatctggcagacgatatggtgagaaacaccgctagagatctgctgtactacgccgtgacccaggatgccatgctgatcttcgccaacctgagccggggcttcggccggcagggcaagcggaccttcatggccgagagacagtacacacggatggaggactggctgaccgccaagctggcctacgagggcctgagcaagacctacctgtccaagacactggcccagtacacctccaagacatgcagcaactgtgggtttaccatcaccagcgccgactacgacagggtgctggagaagctgaagaagacagcaacaggctggatgaccacaattaacggcaaggagctgaaggtggagggccagattacctactacaacagatacaagagacagaacgtagtcaaggacctgtccgtcgagctggatagactgagcgaagaatctgtgaacaacgacatctcctcctggacaaagggcagaagcggagaagctctgagcctcctgaagaaaagattctcccatagacccgtgcaggagaagttcgtgtgcctgaactgcggcttcgagacacacgcagccgagcaagccgccctgaacatcgccagatcctggctgttcctgcggagccaggagtacaagaaataccagacaaacaagacaaccggcaacaccgataagagagccttcgtcgagacctggcagtccttttaccggaagaagcttaaggaggtgtggaaacctgccgtgcggtctggcggatctggcggaggctccgaggccgtgaccttcaaggacgtggccgtgttcttcaccgaggaggagctgggcctgctggacctggcccagaggaagctgtacagagacgtgatgctggagaacttcaggaacctgctgagcgtgggccaccagcccttccaccaggacgtgttccacttcctgagggaggagaagttctggatgatggagaccgccacccagagggagggcaacagcggcgagaacgccagcgtgcaccccggcggcccaagcagcggcgcccctcctcccagcggcggcagcccagccggctccccaacctctaccgaggagggcacctctgagtccgccacccccgagagcggccctggcacctccaccgagcccagcgagggcagcgcacccggcagccctgccggcagccccacctccacagaggagggaaccagcaccgagcccagcgaaggcagcgccccaggcaccagcaccgagcctagtgagcaggagattaaacggatcaacaagatcagaagaagacttgtgaaagacagcaacaccaagaaggccggcaagacaggccccatgaaaaccctgctggttagagtgatgacacccgatctgagagagcggctggaaaacctgagaaagaagcctgaaaatatcccccagcccatcagcaatacatctagagccaacctgaataagctgctgaccgattacaccgaaatgaagaaggcgatcctgcatgtgtactgggaagagttccagaaggaccctgtgggcctgatgagccgggtggcccagcctgccagcaagaagatcgatcagaacaagctgaaacctgagatggacgagaagggcaacctgaccaccgccggctttgcctgctctcagtgtggccagcccctgttcgtgtacaagctggagcaggtgtctgagaagggcaaggcttacaccaactacttcggacggtgcaatgtggccgagcacgaaaagctgatcctgctggcccagctgaagcccgagaaggatagcgacgaagccgtgacatatagcctgggaaagtttgggcagagggccctggatttctacagcattcatgtgaccaaggagtccacccaccccgtgaagcccctggcccagatcgccggaaacagatacgcctccggacctgtgggaaaggccctgagcgacgcatgtatgggcacaatcgcctccttcctgtctaagtaccaggacatcatcatcgaacaccagaaggtggtgaagggcaaccagaagagactggagagcctgcgggagctggccggcaaggaaaacctggaataccctagcgtgaccctgccacctcagcctcacaccaaggagggcgttgatgcctacaacgaagtgatcgcccgggtgcgaatgtgggtgaacctgaacctgtggcagaagctgaagctaagcagagatgatgccaagcctctgctgagactgaagggattcccttcctttcctctggtcgagagacaggccaacgaagtggactggtgggacatggtgtgtaacgtgaagaagctgatcaacgagaaaaaggaggatggcaaggtgttttggcagaatctggctggctacaagagacaggaagccctgagaccatacctgagcagcgaggaagatcggaagaagggaaagaaattcgctcggtaccagctgggcgacctgctgctgcacctggaaaagaagcacggcgaggactggggaaaggtgtacgacgaggcctgggagcggattgacaagaaagtggaaggcctgagcaagcacatcaagctggaagaggaacggagaagcgaggacgcccagagcaaggccgccctgaccgactggctgcgggctaaggccagcttcgtgatcgagggcctgaaggaggccgacaaggacgagttctgcagatgcgagctgaagctgcagaagtggtacggggacctgcggggaaagcccttcgccatcgaagccgagaacagcatcctggacatcagcggcttcagcaagcagtacaactgtgccttcatctggcagaaggacggcgtgaagaagctgaacctgtacctgatcatcaactacttcaagggcggcaagctgcggttcaagaagatcaaacctgaagccttcgaagccaacagattctacaccgtgatcaacaaaaagagcggcgagatcgtgcccatggaggtgaacttcaacttcgacgaccccaacctgatcatcctgcctctggcctttggcaagagacagggcagagaattcatctggaacgacctgctgtccctggaaaccggcagcctgaagctggccaacggaagagtgatcgagaagacactgtacaacagaagaacccggcaggatgagcctgccctgttcgtggccctgaccttcgagcggcgggaggtcctggactcctccaatatcaaaccaatgaacctgatcggcgtggcaagaggcgaaaacatccccgccgtgatcgccctgaccgaccccgagggctgcccactgagccggtttaaggatagcctgggaaacccaacccacatcctgagaatcggcgagagctataaggagaagcagcggaccatccaggccaagaaggaggtggagcagcggagagccggcggctacagccggaagtacgccagcaaagccaagaatctggcagacgatatggtgagaaacaccgctagagatctgctgtactacgccgtgacccaggatgccatgctgatcttcgccaacctgagccggggcttcggccggcagggcaagcggaccttcatggccgagagacagtacacacggatggaggactggctgaccgccaagctggcctacgagggcctgagcaagacctacctgtccaagacactggcccagtacacctccaagacatgcagcaactgtgggtttaccatcaccagcgccgactacgacagggtgctggagaagctgaagaagacagcaacaggctggatgaccacaattaacggcaaggagctgaaggtggagggccagattacctactacaacagatacaagagacagaacgtagtcaaggacctgtccgtcgagctggatagactgagcgaagaatctgtgaacaacgacatctcctcctggacaaagggcagaagcggagaagctctgagcctcctgaagaaaagattctcccatagacccgtgcaggagaagttcgtgtgcctgaactgcggcttcgagacacacgcagccgagcaagccgccctgaacatcgccagatcctggctgttcctgcggagccaggagtacaagaaataccagacaaacaagacaaccggcaacaccgataagagagccttcgtcgagacctggcagtccttttaccggaagaagcttaaggaggtgtggaaacctgccgtgcggtctggcggatctggcggaggctcctgaggccgtgaccttcaaggacgtggccgtgttcttcaccgaggaggagctgggcctgctggacctggcccagaggaagctgtacagagacgtgatgctggagaacttcaggaacctgctgagcgtgggccaccagcccttccaccaggacgtgttccacttcctgagggaggagaagttctggatgatggagaccgccacccagagggagggcaacagcggcgagaacgccagcgtgcaccccggatctggctccggcagcggccccaagaaaaagagaaaagtctaagctgccttctgcggggcttgccttctggccatgcccttcttctctcccttgcacctgtacctcttggtctttgaataaagcctgagtaggaaggctagcaaaaaaaaaaaaaaaaaaaaaaaaaaaaaaaaaaaaaaaaaaaaaaaaaaaaaaaaaaaaaaaaaaaaaaaaaaaaaaaa

SEQ ID NO: 15674 - RNA, 9485 nt, synthetic construct
  source 1..9485: mol_type = other RNA
aggaaataagagagaaaagaagagtaagaagaaatataagagccaccatggcccctaagaagaagcgtaaagtgagccggatggaacgcctcgtctacgaggtgcggcagaagtgcagaaacatcgaggacatctgcatctcctgcggatctctgaacgtgaccctggagcacccactgttcatcggcggcatgtgccagaactgtaaaaactgttttctggagtgtgcctatcaatacgacgatgacggctaccagagctactgcaccatctgttgcggcggaagagaggtgctgatgtgtggaaataacaactgctgccggtgcttctgcgtggaatgcgtggacctgctggtgggccccggcgccgcccaggccgctattaaggaagatccttggaactgctacatgtgcggccacaagggcacatacggcctgctgagacggagagaggactggcctagcagactgcagatgttcttcgccaataaccacgaccaggagttcgacccccctaaggtgtaccctcccgtccccgccgagaagagaaagcccatccgggtcctgagcctgttcgatggcatcgccaccggtctgctggtgctgaaggacctgggcatccaggtggataggtacattgcctccgaggtgtgcgaggactccatcaccgtgggaatggtgcgtcatcagggcaagatcatgtacgtgggcgacgtgcggagcgtgacacagaagcatatccaggagtggggccctttcgacctggtgatcggcggcagcccttgcaatgacctgagcatcgtgaacccagcccggaagggcctgtacgagggaaccggcagactgttcttcgagttttacagactgctgcacgacgcccggcctaaggaaggcgacgaccggcccttcttttggctgttcgagaatgtggtggccatgggagtcagcgacaagcgggatattagccggttcctggagagcaaccccgtgatgatcgatgccaaggaagtgagcgccgcccaccgggccagatacttctggggcaatctgcctggcatgaacagacccctggccagcaccgtgaacgacaagctggagctgcaggagtgcctggagcacggccggatcgccaagttcagcaaggtgagaaccatcaccacccgaagcaacagcatcaaacaaggcaaggaccagcactttcctgtgttcatgaacgagaaggaggacatcctgtggtgtaccgagatggagagagtgttcgggttcccagtccactacacagatgtcagcaacatgtctagactggccagacagagactgctgggaagaagctggtccgtccctgtgatcagacacctgttcgcccctctgaaggagtacttcgcctgcgtgagcagcggcaacagcaacgccaacagccggggccccagcttctctagcggcctggtgccactgtccctgagagggagccacatgggccccatggagatctacaaaaccgtgagcgcctggaagcggcagcctgtgcgcgtgctgagcctgtttcggaatatcgataaagtcctgaaaagcctgggattcctggagagcggctctggctccggcggtggcaccctgaagtacgtggaggatgtgacaaacgtggtcagacgggatgtggagaagtggggccccttcgatctggtgtacggcagcacccaacccctgggcagctcttgtgaccggtgccctggctggtacatgtttcagttccaccggatcctgcagtacgccctgccgagacaggagtcccagcggccattcttttggattttcatggacaacttgctgctgaccgaggatgaccaggaaactaccactcggttcctgcagaccgaagccgtgaccctgcaggacgtgagaggccgggactaccagaacgccatgcgggtgtggtccaacatccctggactgaaaagcaagcacgcacctctgacccctaaagaagaggagtacctgcaggcccaggtgcggagcagaagcaagctggacgcccctaaggtggatctgctggtgaagaattgcctcctgcccctgagagagtacttcaagtatttcagccagaatagtctgcccctgggaggcagcggcggcggcgccctggtgacatttgaggacgtcgccgtgcggttcacccaggaggaatgggctctgctggatccttctcagaaaatcctgtaccgggacgtgatgagagagacataccggaatctgacctccgtgggcatcaactgggaatgttgggaccttgaagcctgcttcagaagcctgggaagaaacctgagagtgcaggtggtgaagagaaagtgcgagctgaccaacagcggcccctgcgccgagggcggcccaagcagcggcgcccctcctcccagcggcggcagcccagccggctccccaacctctaccgaggagggcacctctgagtccgccacccccgagagcggccctggcacctccaccgagcccagcgagggcagcgcacccggcagccctgccggcagccccacctccacagaggagggaaccagcaccgagcccagcgaaggcagcgccccaggcaccagcaccgagcctagtgagcaggagattaaacggatcaacaagatcagaagaagacttgtgaaagacagcaacaccaagaaggccggcaagacaggccccatgaaaaccctgctggttagagtgatgacacccgatctgagagagcggctggaaaacctgagaaagaagcctgaaaatatcccccagcccatcagcaatacatctagagccaacctgaataagctgctgaccgattacaccgaaatgaagaaggcgatcctgcatgtgtactgggaagagttccagaaggaccctgtgggcctgatgagccgggtggcccagcctgccagcaagaagatcgatcagaacaagctgaaacctgagatggacgagaagggcaacctgaccaccgccggctttgcctgctctcagtgtggccagcccctgttcgtgtacaagctggagcaggtgtctgagaagggcaaggcttacaccaactacttcggacggtgcaatgtggccgagcacgaaaagctgatcctgctggcccagctgaagcccgagaaggatagcgacgaagccgtgacatatagcctgggaaagtttgggcagagggccctggatttctacagcattcatgtgaccaaggagtccacccaccccgtgaagcccctggcccagatcgccggaaacagatacgcctccggacctgtgggaaaggccctgagcgacgcatgtatgggcacaatcgcctccttcctgtctaagtaccaggacatcatcatcgaacaccagaaggtggtgaagggcaaccagaagagactggagagcctgcgggagctggccggcaaggaaaacctggaataccctagcgtgaccctgccacctcagcctcacaccaaggagggcgttgatgcctacaacgaagtgatcgcccgggtgcgaatgtgggtgaacctgaacctgtggcagaagctgaagctaagcagagatgatgccaagcctctgctgagactgaagggattcccttcctttcctctggtcgagagacaggccaacgaagtggactggtgggacatggtgtgtaacgtgaagaagctgatcaacgagaaaaaggaggatggcaaggtgttttggcagaatctggctggctacaagagacaggaagccctgagaccatacctgagcagcgaggaagatcggaagaagggaaagaaattcgctcggtaccagctgggcgacctgctgctgcacctggaaaagaagcacggcgaggactggggaaaggtgtacgacgaggcctgggagcggattgacaagaaagtggaaggcctgagcaagcacatcaagctggaagaggaacggagaagcgaggacgcccagagcaaggccgccctgaccgactggctgcgggctaaggccagcttcgtgatcgagggcctgaaggaggccgacaaggacgagttctgcagatgcgagctgaagctgcagaagtggtacggggacctgcggggaaagcccttcgccatcgaagccgagaacagcatcctggacatcagcggcttcagcaagcagtacaactgtgccttcatctggcagaaggacggcgtgaagaagctgaacctgtacctgatcatcaactacttcaagggcggcaagctgcggttcaagaagatcaaacctgaagccttcgaagccaacagattctacaccgtgatcaacaaaaagagcggcgagatcgtgcccatggaggtgaacttcaacttcgacgaccccaacctgatcatcctgcctctggcctttggcaagagacagggcagagaattcatctggaacgacctgctgtccctggaaaccggcagcctgaagctggccaacggaagagtgatcgagaagacactgtacaacagaagaacccggcaggatgagcctgccctgttcgtggccctgaccttcgagcggcgggaggtcctggactcctccaatatcaaaccaatgaacctgatcggcgtggcaagaggcgaaaacatccccgccgtgatcgccctgaccgaccccgagggctgcccactgagccggtttaaggatagcctgggaaacccaacccacatcctgagaatcggcgagagctataaggagaagcagcggaccatccaggccaagaaggaggtggagcagcggagagccggcggctacagccggaagtacgccagcaaagccaagaatctggcagacgatatggtgagaaacaccgctagagatctgctgtactacgccgtgacccaggatgccatgctgatcttcgccaacctgagccggggcttcggccggcagggcaagcggaccttcatggccgagagacagtacacacggatggaggactggctgaccgccaagctggcctacgagggcctgagcaagacctacctgtccaagacactggcccagtacacctccaagacatgcagcaactgtgggtttaccatcaccagcgccgactacgacagggtgctggagaagctgaagaagacagcaacaggctggatgaccacaattaacggcaaggagctgaaggtggagggccagattacctactacaacagatacaagagacagaacgtagtcaaggacctgtccgtcgagctggatagactgagcgaagaatctgtgaacaacgacatctcctcctggacaaagggcagaagcggagaagctctgagcctcctgaagaaaagattctcccatagacccgtgcaggagaagttcgtgtgcctgaactgcggcttcgagacacacgcagccgagcaagccgccctgaacatcgccagatcctggctgttcctgcggagccaggagtacaagaaataccagacaaacaagacaaccggcaacaccgataagagagccttcgtcgagacctggcagtccttttaccggaagaagcttaaggaggtgtggaaacctgccgtgcggtctggcggatctggcggaggctccacccagctgaccgtggaggacgtggacatcaagttcacccccgaggagtgggagtgcctggaccccgcccagagggccctgtactgggacgtgatggaggagacctacaggaacctgctgagcgtggacgtgagccacatccacatgaccaagaagctgcaggccaaggccaacagcggcaagggcgagatcctgcagaccgtgatgttcggcagggccgagacccacgagatcaaggacttcggcggcccaagcagcggcgcccctcctcccagcggcggcagcccagccggctccccaacctctaccgaggagggcacctctgagtccgccacccccgagagcggccctggcacctccaccgagcccagcgagggcagcgcacccggcagccctgccggcagccccacctccacagaggagggaaccagcaccgagcccagcgaaggcagcgccccaggcaccagcaccgagcctagtgagcaggagattaaacggatcaacaagatcagaagaagacttgtgaaagacagcaacaccaagaaggccggcaagacaggccccatgaaaaccctgctggttagagtgatgacacccgatctgagagagcggctggaaaacctgagaaagaagcctgaaaatatcccccagcccatcagcaatacatctagagccaacctgaataagctgctgaccgattacaccgaaatgaagaaggcgatcctgcatgtgtactgggaagagttccagaaggaccctgtgggcctgatgagccgggtggcccagcctgccagcaagaagatcgatcagaacaagctgaaacctgagatggacgagaagggcaacctgaccaccgccggctttgcctgctctcagtgtggccagcccctgttcgtgtacaagctggagcaggtgtctgagaagggcaaggcttacaccaactacttcggacggtgcaatgtggccgagcacgaaaagctgatcctgctggcccagctgaagcccgagaaggatagcgacgaagccgtgacatatagcctgggaaagtttgggcagagggccctggatttctacagcattcatgtgaccaaggagtccacccaccccgtgaagcccctggcccagatcgccggaaacagatacgcctccggacctgtgggaaaggccctgagcgacgcatgtatgggcacaatcgcctccttcctgtctaagtaccaggacatcatcatcgaacaccagaaggtggtgaagggcaaccagaagagactggagagcctgcgggagctggccggcaaggaaaacctggaataccctagcgtgaccctgccacctcagcctcacaccaaggagggcgttgatgcctacaacgaagtgatcgcccgggtgcgaatgtgggtgaacctgaacctgtggcagaagctgaagctaagcagagatgatgccaagcctctgctgagactgaagggattcccttcctttcctctggtcgagagacaggccaacgaagtggactggtgggacatggtgtgtaacgtgaagaagctgatcaacgagaaaaaggaggatggcaaggtgttttggcagaatctggctggctacaagagacaggaagccctgagaccatacctgagcagcgaggaagatcggaagaagggaaagaaattcgctcggtaccagctgggcgacctgctgctgcacctggaaaagaagcacggcgaggactggggaaaggtgtacgacgaggcctgggagcggattgacaagaaagtggaaggcctgagcaagcacatcaagctggaagaggaacggagaagcgaggacgcccagagcaaggccgccctgaccgactggctgcgggctaaggccagcttcgtgatcgagggcctgaaggaggccgacaaggacgagttctgcagatgcgagctgaagctgcagaagtggtacggggacctgcggggaaagcccttcgccatcgaagccgagaacagcatcctggacatcagcggcttcagcaagcagtacaactgtgccttcatctggcagaaggacggcgtgaagaagctgaacctgtacctgatcatcaactacttcaagggcggcaagctgcggttcaagaagatcaaacctgaagccttcgaagccaacagattctacaccgtgatcaacaaaaagagcggcgagatcgtgcccatggaggtgaacttcaacttcgacgaccccaacctgatcatcctgcctctggcctttggcaagagacagggcagagaattcatctggaacgacctgctgtccctggaaaccggcagcctgaagctggccaacggaagagtgatcgagaagacactgtacaacagaagaacccggcaggatgagcctgccctgttcgtggccctgaccttcgagcggcgggaggtcctggactcctccaatatcaaaccaatgaacctgatcggcgtggcaagaggcgaaaacatccccgccgtgatcgccctgaccgaccccgagggctgcccactgagccggtttaaggatagcctgggaaacccaacccacatcctgagaatcggcgagagctataaggagaagcagcggaccatccaggccaagaaggaggtggagcagcggagagccggcggctacagccggaagtacgccagcaaagccaagaatctggcagacgatatggtgagaaacaccgctagagatctgctgtactacgccgtgacccaggatgccatgctgatcttcgccaacctgagccggggcttcggccggcagggcaagcggaccttcatggccgagagacagtacacacggatggaggactggctgaccgccaagctggcctacgagggcctgagcaagacctacctgtccaagacactggcccagtacacctccaagacatgcagcaactgtgggtttaccatcaccagcgccgactacgacagggtgctggagaagctgaagaagacagcaacaggctggatgaccacaattaacggcaaggagctgaaggtggagggccagattacctactacaacagatacaagagacagaacgtagtcaaggacctgtccgtcgagctggatagactgagcgaagaatctgtgaacaacgacatctcctcctggacaaagggcagaagcggagaagctctgagcctcctgaagaaaagattctcccatagacccgtgcaggagaagttcgtgtgcctgaactgcggcttcgagacacacgcagccgagcaagccgccctgaacatcgccagatcctggctgttcctgcggagccaggagtacaagaaataccagacaaacaagacaaccggcaacaccgataagagagccttcgtcgagacctggcagtccttttaccggaagaagcttaaggaggtgtggaaacctgccgtgcggtctggcggatctggcggaggctcctacccagctgaccgtggaggacgtggacatcaagttcacccccgaggagtgggagtgcctggaccccgcccagagggccctgtactgggacgtgatggaggagacctacaggaacctgctgagcgtggacgtgagccacatccacatgaccaagaagctgcaggccaaggccaacagcggcaagggcgagatcctgcagaccgtgatgttcggcagggccgagacccacgagatcaaggacttcggatctggctccggcagcggccccaagaaaaagagaaaagtctaagctgccttctgcggggcttgccttctggccatgcccttcttctctcccttgcacctgtacctcttggtctttgaataaagcctgagtaggaaggctagcaaaaaaaaaaaaaaaaaaaaaaaaaaaaaaaaaaaaaaaaaaaaaaaaaaaaaaaaaaaaaaaaaaaaaaaaaaaaaaaa

SEQ ID NO: 15675 - RNA, 9485 nt, synthetic construct
  source 1..9485: mol_type = other RNA
aggaaataagagagaaaagaagagtaagaagaaatataagagccaccatggcccctaagaagaagcgtaaagtgagccggatggaacgcctcgtctacgaggtgcggcagaagtgcagaaacatcgaggacatctgcatctcctgcggatctctgaacgtgaccctggagcacccactgttcatcggcggcatgtgccagaactgtaaaaactgttttctggagtgtgcctatcaatacgacgatgacggctaccagagctactgcaccatctgttgcggcggaagagaggtgctgatgtgtggaaataacaactgctgccggtgcttctgcgtggaatgcgtggacctgctggtgggccccggcgccgcccaggccgctattaaggaagatccttggaactgctacatgtgcggccacaagggcacatacggcctgctgagacggagagaggactggcctagcagactgcagatgttcttcgccaataaccacgaccaggagttcgacccccctaaggtgtaccctcccgtccccgccgagaagagaaagcccatccgggtcctgagcctgttcgatggcatcgccaccggtctgctggtgctgaaggacctgggcatccaggtggataggtacattgcctccgaggtgtgcgaggactccatcaccgtgggaatggtgcgtcatcagggcaagatcatgtacgtgggcgacgtgcggagcgtgacacagaagcatatccaggagtggggccctttcgacctggtgatcggcggcagcccttgcaatgacctgagcatcgtgaacccagcccggaagggcctgtacgagggaaccggcagactgttcttcgagttttacagactgctgcacgacgcccggcctaaggaaggcgacgaccggcccttcttttggctgttcgagaatgtggtggccatgggagtcagcgacaagcgggatattagccggttcctggagagcaaccccgtgatgatcgatgccaaggaagtgagcgccgcccaccgggccagatacttctggggcaatctgcctggcatgaacagacccctggccagcaccgtgaacgacaagctggagctgcaggagtgcctggagcacggccggatcgccaagttcagcaaggtgagaaccatcaccacccgaagcaacagcatcaaacaaggcaaggaccagcactttcctgtgttcatgaacgagaaggaggacatcctgtggtgtaccgagatggagagagtgttcgggttcccagtccactacacagatgtcagcaacatgtctagactggccagacagagactgctgggaagaagctggtccgtccctgtgatcagacacctgttcgcccctctgaaggagtacttcgcctgcgtgagcagcggcaacagcaacgccaacagccggggccccagcttctctagcggcctggtgccactgtccctgagagggagccacatgggccccatggagatctacaaaaccgtgagcgcctggaagcggcagcctgtgcgcgtgctgagcctgtttcggaatatcgataaagtcctgaaaagcctgggattcctggagagcggctctggctccggcggtggcaccctgaagtacgtggaggatgtgacaaacgtggtcagacgggatgtggagaagtggggccccttcgatctggtgtacggcagcacccaacccctgggcagctcttgtgaccggtgccctggctggtacatgtttcagttccaccggatcctgcagtacgccctgccgagacaggagtcccagcggccattcttttggattttcatggacaacttgctgctgaccgaggatgaccaggaaactaccactcggttcctgcagaccgaagccgtgaccctgcaggacgtgagaggccgggactaccagaacgccatgcgggtgtggtccaacatccctggactgaaaagcaagcacgcacctctgacccctaaagaagaggagtacctgcaggcccaggtgcggagcagaagcaagctggacgcccctaaggtggatctgctggtgaagaattgcctcctgcccctgagagagtacttcaagtatttcagccagaatagtctgcccctgggaggcagcggcggcggcgccctggtgacatttgaggacgtcgccgtgcggttcacccaggaggaatgggctctgctggatccttctcagaaaatcctgtaccgggacgtgatgagagagacataccggaatctgacctccgtgggcatcaactgggaatgttgggaccttgaagcctgcttcagaagcctgggaagaaacctgagagtgcaggtggtgaagagaaagtgcgagctgaccaacagcggcccctgcgccgagggcggcccaagcagcggcgcccctcctcccagcggcggcagcccagccggctccccaacctctaccgaggagggcacctctgagtccgccacccccgagagcggccctggcacctccaccgagcccagcgagggcagcgcacccggcagccctgccggcagccccacctccacagaggagggaaccagcaccgagcccagcgaaggcagcgccccaggcaccagcaccgagcctagtgagcaggagattaaacggatcaacaagatcagaagaagacttgtgaaagacagcaacaccaagaaggccggcaagacaggccccatgaaaaccctgctggttagagtgatgacacccgatctgagagagcggctggaaaacctgagaaagaagcctgaaaatatcccccagcccatcagcaatacatctagagccaacctgaataagctgctgaccgattacaccgaaatgaagaaggcgatcctgcatgtgtactgggaagagttccagaaggaccctgtgggcctgatgagccgggtggcccagcctgccagcaagaagatcgatcagaacaagctgaaacctgagatggacgagaagggcaacctgaccaccgccggctttgcctgctctcagtgtggccagcccctgttcgtgtacaagctggagcaggtgtctgagaagggcaaggcttacaccaactacttcggacggtgcaatgtggccgagcacgaaaagctgatcctgctggcccagctgaagcccgagaaggatagcgacgaagccgtgacatatagcctgggaaagtttgggcagagggccctggatttctacagcattcatgtgaccaaggagtccacccaccccgtgaagcccctggcccagatcgccggaaacagatacgcctccggacctgtgggaaaggccctgagcgacgcatgtatgggcacaatcgcctccttcctgtctaagtaccaggacatcatcatcgaacaccagaaggtggtgaagggcaaccagaagagactggagagcctgcgggagctggccggcaaggaaaacctggaataccctagcgtgaccctgccacctcagcctcacaccaaggagggcgttgatgcctacaacgaagtgatcgcccgggtgcgaatgtgggtgaacctgaacctgtggcagaagctgaagctaagcagagatgatgccaagcctctgctgagactgaagggattcccttcctttcctctggtcgagagacaggccaacgaagtggactggtgggacatggtgtgtaacgtgaagaagctgatcaacgagaaaaaggaggatggcaaggtgttttggcagaatctggctggctacaagagacaggaagccctgagaccatacctgagcagcgaggaagatcggaagaagggaaagaaattcgctcggtaccagctgggcgacctgctgctgcacctggaaaagaagcacggcgaggactggggaaaggtgtacgacgaggcctgggagcggattgacaagaaagtggaaggcctgagcaagcacatcaagctggaagaggaacggagaagcgaggacgcccagagcaaggccgccctgaccgactggctgcgggctaaggccagcttcgtgatcgagggcctgaaggaggccgacaaggacgagttctgcagatgcgagctgaagctgcagaagtggtacggggacctgcggggaaagcccttcgccatcgaagccgagaacagcatcctggacatcagcggcttcagcaagcagtacaactgtgccttcatctggcagaaggacggcgtgaagaagctgaacctgtacctgatcatcaactacttcaagggcggcaagctgcggttcaagaagatcaaacctgaagccttcgaagccaacagattctacaccgtgatcaacaaaaagagcggcgagatcgtgcccatggaggtgaacttcaacttcgacgaccccaacctgatcatcctgcctctggcctttggcaagagacagggcagagaattcatctggaacgacctgctgtccctggaaaccggcagcctgaagctggccaacggaagagtgatcgagaagacactgtacaacagaagaacccggcaggatgagcctgccctgttcgtggccctgaccttcgagcggcgggaggtcctggactcctccaatatcaaaccaatgaacctgatcggcgtggcaagaggcgaaaacatccccgccgtgatcgccctgaccgaccccgagggctgcccactgagccggtttaaggatagcctgggaaacccaacccacatcctgagaatcggcgagagctataaggagaagcagcggaccatccaggccaagaaggaggtggagcagcggagagccggcggctacagccggaagtacgccagcaaagccaagaatctggcagacgatatggtgagaaacaccgctagagatctgctgtactacgccgtgacccaggatgccatgctgatcttcgccaacctgagccggggcttcggccggcagggcaagcggaccttcatggccgagagacagtacacacggatggaggactggctgaccgccaagctggcctacgagggcctgagcaagacctacctgtccaagacactggcccagtacacctccaagacatgcagcaactgtgggtttaccatcaccagcgccgactacgacagggtgctggagaagctgaagaagacagcaacaggctggatgaccacaattaacggcaaggagctgaaggtggagggccagattacctactacaacagatacaagagacagaacgtagtcaaggacctgtccgtcgagctggatagactgagcgaagaatctgtgaacaacgacatctcctcctggacaaagggcagaagcggagaagctctgagcctcctgaagaaaagattctcccatagacccgtgcaggagaagttcgtgtgcctgaactgcggcttcgagacacacgcagccgagcaagccgccctgaacatcgccagatcctggctgttcctgcggagccaggagtacaagaaataccagacaaacaagacaaccggcaacaccgataagagagccttcgtcgagacctggcagtccttttaccggaagaagcttaaggaggtgtggaaacctgccgtgcggtctggcggatctggcggaggctccacctgcatggtgcacaggcagaccatgagctgcagcggcgccggcggcatcaccgccttcgtggccttcagggacgtggccgtggacttcacccaggaggagtggaggctgctgagccccgcccagaggaccctgcacagggaggtgatgctggagacctacaaccacctggtgagcctggagatccccagcagcaagcccaagctgatcgcccagctggagaggggcgaggagccctggaggggcggcccaagcagcggcgcccctcctcccagcggcggcagcccagccggctccccaacctctaccgaggagggcacctctgagtccgccacccccgagagcggccctggcacctccaccgagcccagcgagggcagcgcacccggcagccctgccggcagccccacctccacagaggagggaaccagcaccgagcccagcgaaggcagcgccccaggcaccagcaccgagcctagtgagcaggagattaaacggatcaacaagatcagaagaagacttgtgaaagacagcaacaccaagaaggccggcaagacaggccccatgaaaaccctgctggttagagtgatgacacccgatctgagagagcggctggaaaacctgagaaagaagcctgaaaatatcccccagcccatcagcaatacatctagagccaacctgaataagctgctgaccgattacaccgaaatgaagaaggcgatcctgcatgtgtactgggaagagttccagaaggaccctgtgggcctgatgagccgggtggcccagcctgccagcaagaagatcgatcagaacaagctgaaacctgagatggacgagaagggcaacctgaccaccgccggctttgcctgctctcagtgtggccagcccctgttcgtgtacaagctggagcaggtgtctgagaagggcaaggcttacaccaactacttcggacggtgcaatgtggccgagcacgaaaagctgatcctgctggcccagctgaagcccgagaaggatagcgacgaagccgtgacatatagcctgggaaagtttgggcagagggccctggatttctacagcattcatgtgaccaaggagtccacccaccccgtgaagcccctggcccagatcgccggaaacagatacgcctccggacctgtgggaaaggccctgagcgacgcatgtatgggcacaatcgcctccttcctgtctaagtaccaggacatcatcatcgaacaccagaaggtggtgaagggcaaccagaagagactggagagcctgcgggagctggccggcaaggaaaacctggaataccctagcgtgaccctgccacctcagcctcacaccaaggagggcgttgatgcctacaacgaagtgatcgcccgggtgcgaatgtgggtgaacctgaacctgtggcagaagctgaagctaagcagagatgatgccaagcctctgctgagactgaagggattcccttcctttcctctggtcgagagacaggccaacgaagtggactggtgggacatggtgtgtaacgtgaagaagctgatcaacgagaaaaaggaggatggcaaggtgttttggcagaatctggctggctacaagagacaggaagccctgagaccatacctgagcagcgaggaagatcggaagaagggaaagaaattcgctcggtaccagctgggcgacctgctgctgcacctggaaaagaagcacggcgaggactggggaaaggtgtacgacgaggcctgggagcggattgacaagaaagtggaaggcctgagcaagcacatcaagctggaagaggaacggagaagcgaggacgcccagagcaaggccgccctgaccgactggctgcgggctaaggccagcttcgtgatcgagggcctgaaggaggccgacaaggacgagttctgcagatgcgagctgaagctgcagaagtggtacggggacctgcggggaaagcccttcgccatcgaagccgagaacagcatcctggacatcagcggcttcagcaagcagtacaactgtgccttcatctggcagaaggacggcgtgaagaagctgaacctgtacctgatcatcaactacttcaagggcggcaagctgcggttcaagaagatcaaacctgaagccttcgaagccaacagattctacaccgtgatcaacaaaaagagcggcgagatcgtgcccatggaggtgaacttcaacttcgacgaccccaacctgatcatcctgcctctggcctttggcaagagacagggcagagaattcatctggaacgacctgctgtccctggaaaccggcagcctgaagctggccaacggaagagtgatcgagaagacactgtacaacagaagaacccggcaggatgagcctgccctgttcgtggccctgaccttcgagcggcgggaggtcctggactcctccaatatcaaaccaatgaacctgatcggcgtggcaagaggcgaaaacatccccgccgtgatcgccctgaccgaccccgagggctgcccactgagccggtttaaggatagcctgggaaacccaacccacatcctgagaatcggcgagagctataaggagaagcagcggaccatccaggccaagaaggaggtggagcagcggagagccggcggctacagccggaagtacgccagcaaagccaagaatctggcagacgatatggtgagaaacaccgctagagatctgctgtactacgccgtgacccaggatgccatgctgatcttcgccaacctgagccggggcttcggccggcagggcaagcggaccttcatggccgagagacagtacacacggatggaggactggctgaccgccaagctggcctacgagggcctgagcaagacctacctgtccaagacactggcccagtacacctccaagacatgcagcaactgtgggtttaccatcaccagcgccgactacgacagggtgctggagaagctgaagaagacagcaacaggctggatgaccacaattaacggcaaggagctgaaggtggagggccagattacctactacaacagatacaagagacagaacgtagtcaaggacctgtccgtcgagctggatagactgagcgaagaatctgtgaacaacgacatctcctcctggacaaagggcagaagcggagaagctctgagcctcctgaagaaaagattctcccatagacccgtgcaggagaagttcgtgtgcctgaactgcggcttcgagacacacgcagccgagcaagccgccctgaacatcgccagatcctggctgttcctgcggagccaggagtacaagaaataccagacaaacaagacaaccggcaacaccgataagagagccttcgtcgagacctggcagtccttttaccggaagaagcttaaggaggtgtggaaacctgccgtgcggtctggcggatctggcggaggctcctacctgcatggtgcacaggcagaccatgagctgcagcggcgccggcggcatcaccgccttcgtggccttcagggacgtggccgtggacttcacccaggaggagtggaggctgctgagccccgcccagaggaccctgcacagggaggtgatgctggagacctacaaccacctggtgagcctggagatccccagcagcaagcccaagctgatcgcccagctggagaggggcgaggagccctggaggggatctggctccggcagcggccccaagaaaaagagaaaagtctaagctgccttctgcggggcttgccttctggccatgcccttcttctctcccttgcacctgtacctcttggtctttgaataaagcctgagtaggaaggctagcaaaaaaaaaaaaaaaaaaaaaaaaaaaaaaaaaaaaaaaaaaaaaaaaaaaaaaaaaaaaaaaaaaaaaaaaaaaaaaaa

SEQ ID NO: 15676 - RNA, 9485 nt, synthetic construct
  source 1..9485: mol_type = other RNA
aggaaataagagagaaaagaagagtaagaagaaatataagagccaccatggcccctaagaagaagcgtaaagtgagccggatggaacgcctcgtctacgaggtgcggcagaagtgcagaaacatcgaggacatctgcatctcctgcggatctctgaacgtgaccctggagcacccactgttcatcggcggcatgtgccagaactgtaaaaactgttttctggagtgtgcctatcaatacgacgatgacggctaccagagctactgcaccatctgttgcggcggaagagaggtgctgatgtgtggaaataacaactgctgccggtgcttctgcgtggaatgcgtggacctgctggtgggccccggcgccgcccaggccgctattaaggaagatccttggaactgctacatgtgcggccacaagggcacatacggcctgctgagacggagagaggactggcctagcagactgcagatgttcttcgccaataaccacgaccaggagttcgacccccctaaggtgtaccctcccgtccccgccgagaagagaaagcccatccgggtcctgagcctgttcgatggcatcgccaccggtctgctggtgctgaaggacctgggcatccaggtggataggtacattgcctccgaggtgtgcgaggactccatcaccgtgggaatggtgcgtcatcagggcaagatcatgtacgtgggcgacgtgcggagcgtgacacagaagcatatccaggagtggggccctttcgacctggtgatcggcggcagcccttgcaatgacctgagcatcgtgaacccagcccggaagggcctgtacgagggaaccggcagactgttcttcgagttttacagactgctgcacgacgcccggcctaaggaaggcgacgaccggcccttcttttggctgttcgagaatgtggtggccatgggagtcagcgacaagcgggatattagccggttcctggagagcaaccccgtgatgatcgatgccaaggaagtgagcgccgcccaccgggccagatacttctggggcaatctgcctggcatgaacagacccctggccagcaccgtgaacgacaagctggagctgcaggagtgcctggagcacggccggatcgccaagttcagcaaggtgagaaccatcaccacccgaagcaacagcatcaaacaaggcaaggaccagcactttcctgtgttcatgaacgagaaggaggacatcctgtggtgtaccgagatggagagagtgttcgggttcccagtccactacacagatgtcagcaacatgtctagactggccagacagagactgctgggaagaagctggtccgtccctgtgatcagacacctgttcgcccctctgaaggagtacttcgcctgcgtgagcagcggcaacagcaacgccaacagccggggccccagcttctctagcggcctggtgccactgtccctgagagggagccacatgggccccatggagatctacaaaaccgtgagcgcctggaagcggcagcctgtgcgcgtgctgagcctgtttcggaatatcgataaagtcctgaaaagcctgggattcctggagagcggctctggctccggcggtggcaccctgaagtacgtggaggatgtgacaaacgtggtcagacgggatgtggagaagtggggccccttcgatctggtgtacggcagcacccaacccctgggcagctcttgtgaccggtgccctggctggtacatgtttcagttccaccggatcctgcagtacgccctgccgagacaggagtcccagcggccattcttttggattttcatggacaacttgctgctgaccgaggatgaccaggaaactaccactcggttcctgcagaccgaagccgtgaccctgcaggacgtgagaggccgggactaccagaacgccatgcgggtgtggtccaacatccctggactgaaaagcaagcacgcacctctgacccctaaagaagaggagtacctgcaggcccaggtgcggagcagaagcaagctggacgcccctaaggtggatctgctggtgaagaattgcctcctgcccctgagagagtacttcaagtatttcagccagaatagtctgcccctgggaggcagcggcggcggcgccctggtgacatttgaggacgtcgccgtgcggttcacccaggaggaatgggctctgctggatccttctcagaaaatcctgtaccgggacgtgatgagagagacataccggaatctgacctccgtgggcatcaactgggaatgttgggaccttgaagcctgcttcagaagcctgggaagaaacctgagagtgcaggtggtgaagagaaagtgcgagctgaccaacagcggcccctgcgccgagggcggcccaagcagcggcgcccctcctcccagcggcggcagcccagccggctccccaacctctaccgaggagggcacctctgagtccgccacccccgagagcggccctggcacctccaccgagcccagcgagggcagcgcacccggcagccctgccggcagccccacctccacagaggagggaaccagcaccgagcccagcgaaggcagcgccccaggcaccagcaccgagcctagtgagcaggagattaaacggatcaacaagatcagaagaagacttgtgaaagacagcaacaccaagaaggccggcaagacaggccccatgaaaaccctgctggttagagtgatgacacccgatctgagagagcggctggaaaacctgagaaagaagcctgaaaatatcccccagcccatcagcaatacatctagagccaacctgaataagctgctgaccgattacaccgaaatgaagaaggcgatcctgcatgtgtactgggaagagttccagaaggaccctgtgggcctgatgagccgggtggcccagcctgccagcaagaagatcgatcagaacaagctgaaacctgagatggacgagaagggcaacctgaccaccgccggctttgcctgctctcagtgtggccagcccctgttcgtgtacaagctggagcaggtgtctgagaagggcaaggcttacaccaactacttcggacggtgcaatgtggccgagcacgaaaagctgatcctgctggcccagctgaagcccgagaaggatagcgacgaagccgtgacatatagcctgggaaagtttgggcagagggccctggatttctacagcattcatgtgaccaaggagtccacccaccccgtgaagcccctggcccagatcgccggaaacagatacgcctccggacctgtgggaaaggccctgagcgacgcatgtatgggcacaatcgcctccttcctgtctaagtaccaggacatcatcatcgaacaccagaaggtggtgaagggcaaccagaagagactggagagcctgcgggagctggccggcaaggaaaacctggaataccctagcgtgaccctgccacctcagcctcacaccaaggagggcgttgatgcctacaacgaagtgatcgcccgggtgcgaatgtgggtgaacctgaacctgtggcagaagctgaagctaagcagagatgatgccaagcctctgctgagactgaagggattcccttcctttcctctggtcgagagacaggccaacgaagtggactggtgggacatggtgtgtaacgtgaagaagctgatcaacgagaaaaaggaggatggcaaggtgttttggcagaatctggctggctacaagagacaggaagccctgagaccatacctgagcagcgaggaagatcggaagaagggaaagaaattcgctcggtaccagctgggcgacctgctgctgcacctggaaaagaagcacggcgaggactggggaaaggtgtacgacgaggcctgggagcggattgacaagaaagtggaaggcctgagcaagcacatcaagctggaagaggaacggagaagcgaggacgcccagagcaaggccgccctgaccgactggctgcgggctaaggccagcttcgtgatcgagggcctgaaggaggccgacaaggacgagttctgcagatgcgagctgaagctgcagaagtggtacggggacctgcggggaaagcccttcgccatcgaagccgagaacagcatcctggacatcagcggcttcagcaagcagtacaactgtgccttcatctggcagaaggacggcgtgaagaagctgaacctgtacctgatcatcaactacttcaagggcggcaagctgcggttcaagaagatcaaacctgaagccttcgaagccaacagattctacaccgtgatcaacaaaaagagcggcgagatcgtgcccatggaggtgaacttcaacttcgacgaccccaacctgatcatcctgcctctggcctttggcaagagacagggcagagaattcatctggaacgacctgctgtccctggaaaccggcagcctgaagctggccaacggaagagtgatcgagaagacactgtacaacagaagaacccggcaggatgagcctgccctgttcgtggccctgaccttcgagcggcgggaggtcctggactcctccaatatcaaaccaatgaacctgatcggcgtggcaagaggcgaaaacatccccgccgtgatcgccctgaccgaccccgagggctgcccactgagccggtttaaggatagcctgggaaacccaacccacatcctgagaatcggcgagagctataaggagaagcagcggaccatccaggccaagaaggaggtggagcagcggagagccggcggctacagccggaagtacgccagcaaagccaagaatctggcagacgatatggtgagaaacaccgctagagatctgctgtactacgccgtgacccaggatgccatgctgatcttcgccaacctgagccggggcttcggccggcagggcaagcggaccttcatggccgagagacagtacacacggatggaggactggctgaccgccaagctggcctacgagggcctgagcaagacctacctgtccaagacactggcccagtacacctccaagacatgcagcaactgtgggtttaccatcaccagcgccgactacgacagggtgctggagaagctgaagaagacagcaacaggctggatgaccacaattaacggcaaggagctgaaggtggagggccagattacctactacaacagatacaagagacagaacgtagtcaaggacctgtccgtcgagctggatagactgagcgaagaatctgtgaacaacgacatctcctcctggacaaagggcagaagcggagaagctctgagcctcctgaagaaaagattctcccatagacccgtgcaggagaagttcgtgtgcctgaactgcggcttcgagacacacgcagccgagcaagccgccctgaacatcgccagatcctggctgttcctgcggagccaggagtacaagaaataccagacaaacaagacaaccggcaacaccgataagagagccttcgtcgagacctggcagtccttttaccggaagaagcttaaggaggtgtggaaacctgccgtgcggtctggcggatctggcggaggctccagccagagcctggtgaccttcggcgacgtggccgtggacttcagccaggaggagtgggagtggctgaacagcgcccagaggaacctgtacaggagcgtgatgctggagaactacaggaacctggtgagcctgggcctgtgcgtgagcaagcccgacatgatcagcagcctggagcagaggaaggagccctggatggtgaagaggaagctgaccaggggcaggtgccccgacctgaagaccgtgggcggcccaagcagcggcgcccctcctcccagcggcggcagcccagccggctccccaacctctaccgaggagggcacctctgagtccgccacccccgagagcggccctggcacctccaccgagcccagcgagggcagcgcacccggcagccctgccggcagccccacctccacagaggagggaaccagcaccgagcccagcgaaggcagcgccccaggcaccagcaccgagcctagtgagcaggagattaaacggatcaacaagatcagaagaagacttgtgaaagacagcaacaccaagaaggccggcaagacaggccccatgaaaaccctgctggttagagtgatgacacccgatctgagagagcggctggaaaacctgagaaagaagcctgaaaatatcccccagcccatcagcaatacatctagagccaacctgaataagctgctgaccgattacaccgaaatgaagaaggcgatcctgcatgtgtactgggaagagttccagaaggaccctgtgggcctgatgagccgggtggcccagcctgccagcaagaagatcgatcagaacaagctgaaacctgagatggacgagaagggcaacctgaccaccgccggctttgcctgctctcagtgtggccagcccctgttcgtgtacaagctggagcaggtgtctgagaagggcaaggcttacaccaactacttcggacggtgcaatgtggccgagcacgaaaagctgatcctgctggcccagctgaagcccgagaaggatagcgacgaagccgtgacatatagcctgggaaagtttgggcagagggccctggatttctacagcattcatgtgaccaaggagtccacccaccccgtgaagcccctggcccagatcgccggaaacagatacgcctccggacctgtgggaaaggccctgagcgacgcatgtatgggcacaatcgcctccttcctgtctaagtaccaggacatcatcatcgaacaccagaaggtggtgaagggcaaccagaagagactggagagcctgcgggagctggccggcaaggaaaacctggaataccctagcgtgaccctgccacctcagcctcacaccaaggagggcgttgatgcctacaacgaagtgatcgcccgggtgcgaatgtgggtgaacctgaacctgtggcagaagctgaagctaagcagagatgatgccaagcctctgctgagactgaagggattcccttcctttcctctggtcgagagacaggccaacgaagtggactggtgggacatggtgtgtaacgtgaagaagctgatcaacgagaaaaaggaggatggcaaggtgttttggcagaatctggctggctacaagagacaggaagccctgagaccatacctgagcagcgaggaagatcggaagaagggaaagaaattcgctcggtaccagctgggcgacctgctgctgcacctggaaaagaagcacggcgaggactggggaaaggtgtacgacgaggcctgggagcggattgacaagaaagtggaaggcctgagcaagcacatcaagctggaagaggaacggagaagcgaggacgcccagagcaaggccgccctgaccgactggctgcgggctaaggccagcttcgtgatcgagggcctgaaggaggccgacaaggacgagttctgcagatgcgagctgaagctgcagaagtggtacggggacctgcggggaaagcccttcgccatcgaagccgagaacagcatcctggacatcagcggcttcagcaagcagtacaactgtgccttcatctggcagaaggacggcgtgaagaagctgaacctgtacctgatcatcaactacttcaagggcggcaagctgcggttcaagaagatcaaacctgaagccttcgaagccaacagattctacaccgtgatcaacaaaaagagcggcgagatcgtgcccatggaggtgaacttcaacttcgacgaccccaacctgatcatcctgcctctggcctttggcaagagacagggcagagaattcatctggaacgacctgctgtccctggaaaccggcagcctgaagctggccaacggaagagtgatcgagaagacactgtacaacagaagaacccggcaggatgagcctgccctgttcgtggccctgaccttcgagcggcgggaggtcctggactcctccaatatcaaaccaatgaacctgatcggcgtggcaagaggcgaaaacatccccgccgtgatcgccctgaccgaccccgagggctgcccactgagccggtttaaggatagcctgggaaacccaacccacatcctgagaatcggcgagagctataaggagaagcagcggaccatccaggccaagaaggaggtggagcagcggagagccggcggctacagccggaagtacgccagcaaagccaagaatctggcagacgatatggtgagaaacaccgctagagatctgctgtactacgccgtgacccaggatgccatgctgatcttcgccaacctgagccggggcttcggccggcagggcaagcggaccttcatggccgagagacagtacacacggatggaggactggctgaccgccaagctggcctacgagggcctgagcaagacctacctgtccaagacactggcccagtacacctccaagacatgcagcaactgtgggtttaccatcaccagcgccgactacgacagggtgctggagaagctgaagaagacagcaacaggctggatgaccacaattaacggcaaggagctgaaggtggagggccagattacctactacaacagatacaagagacagaacgtagtcaaggacctgtccgtcgagctggatagactgagcgaagaatctgtgaacaacgacatctcctcctggacaaagggcagaagcggagaagctctgagcctcctgaagaaaagattctcccatagacccgtgcaggagaagttcgtgtgcctgaactgcggcttcgagacacacgcagccgagcaagccgccctgaacatcgccagatcctggctgttcctgcggagccaggagtacaagaaataccagacaaacaagacaaccggcaacaccgataagagagccttcgtcgagacctggcagtccttttaccggaagaagcttaaggaggtgtggaaacctgccgtgcggtctggcggatctggcggaggctcctagccagagcctggtgaccttcggcgacgtggccgtggacttcagccaggaggagtgggagtggctgaacagcgcccagaggaacctgtacaggagcgtgatgctggagaactacaggaacctggtgagcctgggcctgtgcgtgagcaagcccgacatgatcagcagcctggagcagaggaaggagccctggatggtgaagaggaagctgaccaggggcaggtgccccgacctgaagaccgtgggatctggctccggcagcggccccaagaaaaagagaaaagtctaagctgccttctgcggggcttgccttctggccatgcccttcttctctcccttgcacctgtacctcttggtctttgaataaagcctgagtaggaaggctagcaaaaaaaaaaaaaaaaaaaaaaaaaaaaaaaaaaaaaaaaaaaaaaaaaaaaaaaaaaaaaaaaaaaaaaaaaaaaaaaa
